United States Patent Application Publication US 2008/0050393 A1 - sequence listing, part 36

SEQ ID NO: 125925 - DNA, 12036 bp, Homo sapiens
atgctgggtaatgccactgccggattgagtaatgcattaggtgattttcgaaactctgcaagacagcaagctggtgatgcaattatggctgaagccatgcgttaccaagaccctaatgagtatcgtaatgccttagcttctggagcattatttgctggctatgacccttctctaatttcttctcgtactatggagaacttagataatcgtgctggcaatctgttagaccaagcatctaaacaacaaaatctggatttcactcgatacagtaatgacagaaccatgaaggtaaatgcagctactgatgctgctgcccctgcattacaggaattagctctggcttatcaatctggtgacccaagaaaggttcaggcagcacaggctcagtatggggatgtattaaaaacccttcctgctggtgttgttatggactacatgaacaaccttcaaggacagggtactgctggtattggtcaacgtcgcagcttattcaacttaggtgttgatatacgtaacgatgcggatactcaggctgctatgcagttactgaataatattcgtcgtggtgcatacagtgctgacgatgctcgtatgcttgcagagggtacgttcgaccaaatgtcaccaggagcagtaagtcgtgcactatctcagttagatagagcatatccaggtgcatatactccgggaactggttctgcatccctatctcctcctggtactcagggtactcggaatggttctgcatatgacactacctataagttcacaccaactgatgtacctattactcagatgaacttaggtgaggtggttcagcatcaagacactatgaagaagacactaggtgcttctcctgttggtgcataccagattaaccaagatactcttaaagactttgctccaaaggtatttggtgaagattggcagaacattcctatgtctccggagaaccaagacaaactgggtgaagctatttttaatgcccgtaagaatggcaatctgaagagtacatgggctgctttaccggatgatactcctggtgcttataagaacttgtcatgggatgaaatgaaggattacattgctcaagcagaaacaggtaattctattaatccattacaggaacaagcattcacttctgttgctggtaatactgttggtactcgtaatatgcagaatattggtaatactctgctgccagaataccaagctgctactgttgacccttctacgactggtcaggtggctaaacgtattattgatagcaatgaactgaaaggcattaaccaaggtgcactggttcgacaaatcaatgaggtagcaaaacagaatgctatttctcccgctatggcaggagcaatcattcaacgtagtatcaccgccgtagaagcaaatgcaaaacttgcaactactggtactgctattgaacagaatgctcgtaatcagcttactgcacaaattcaatcaaacatctatgcagcacagaatacgttagatactgcacttgctgatttacgtgaagtacagcgtcgtattcagaccggtcaggaaaaccttagaagtgtactacctcgctatcaggagcgagttaacactgctaaacgtcttcttgatggtgctcgtagtgctgtagctgctgaccctcagaatttggatattaagagcctacaaaatattaaacaggaagagagcgaggcaaaccggagaagtttaggcagagatgccggacgtcgattggacagcgtaaccaatgcaaagcaagttgacgtctctactgcaaccgcccagaagaaagctgaacaaggtgtcactactcctcttgtttctcctgatgctgcttatcaaatgcaagctgcccgtactggtaatgttggggctaatgcatttgaaccagggacagtgcaatcagatttcatgaatctgactccaatgcaaatcatgaataagtatggggttgagcaaggcttacaacttatcaacgctcgtgctgatgcagggaaccaggtattcaatgattcagttactacaagaactcctggggaagaactgggggatattgctactggtgttggtcttggttttgttaatacccttgggggcattggtgctcttggggcaggcttactcaacgatgatgcaggtgctgttgttgctcaacaattgagtaagtttaatgatgctgtccatgctacccaaagccaagcattacaagataaacgtaagctctttgctgctcgtaacttaatgagtgaagtagagagtgaacgtcagtatcaaacagataagaaagaaggcactaatgacatagtagcttccttatctaaatttggacgtgattttgtaggttcaattgagaacgctgcccaaactgactccattatttctgatgggttagcagaaggggtaggttctctattaggtgctggtcctgtattaaggggtgcatctttactgggtaaagcagttgttccagcaaatactcttcgtagtgctgcattggctggtgctattgatgcaggtactggtactcagtccctggctcgtattgcttctactgtaggcagagctgcaccaggtatagttggtgttggtgcaatggaagctggtggtgcataccaacaaactgctgatgaaattatgaagatgagtcttaaagacttagagaagtctcctgtttatcaacaacatattaaagatggtatgtctccagaacaggctcgtcgtcagactgcatctgaaactggtcttactgctgctgctattcaattacctattgctgctgcaactggtcctctggtatctcgttttgagatggctcctttccgtgctggttctttaggtgctgtaggtatgaaccttgcccgtgaaacagtggaagaaggtgttcagggtgctacaggccaactggctcagaatattgcacagcaacaaaacattgataagaaccaagacctgcttaaaggtgtcggtacacaagctggtttaggtgctctttatggctttggttctgctggtgttgtacaggctccggctggtgctgctcgtttagcaggtgctgcaactgctcctgtattgcgtaccacaatggctggtgttaaagctgctggtagtgtagcaggtaaggttgtttcccctattaagaacactttggtagctcgtggtgagcgggttatgaagcagaatgaagaagcatctcctgttgctgatgactatgttgcacaggcagcacaagaagctatggctcaagcaccagaagcagaagttactattcgtgatgctgttgaagcaactgatgctactccggaacagaaagttgcagcacaccagtatgtttctgacttaatgaatgctactcgttttaatcctgaaaattatcaggaagcaccagagcatattcgtaatgctgtagctggttctactgaccaagtacaggttattcaaaagttagcagacctagttaacacattagatgaatctaatcctcaagcactgatggaagctgcatcttatatgtatgatgctgtttcagagtttgagcaattcattaaccgtgaccctgctgcactggatagtattcctaaagattctccggctattgagttactcaatcgttatacaaatctgacagctaatattcagaacacaccaaaagtaattggtgcactgaatgttattaatcgaatgattaatgaatctgcccagaatggttctttggatgtgactgaagaatccagtccacaggaaatgcagaacgtagcattagctgctgaagtagctcctgaaaagctcaatccagaatctgtaaatgttgttcttaaacatgctgctgatggtcgtattaaactgaataatcgccaaattgctgcccttcagaatgctgctgcaatcctgaagggggcacgggaatatgatgcagaagctgcccgtcttggattacgtcctcaagacattgtgagtaaacagattaaaacggatgagagcagaactcaggaaggacaatactctgcgttgcaacatgcgaataggattcggtctgcgtataactctggtaatttcgagttggcctccgcttacctgaacgactttatgcagttcgcccagcacatgcagaataaggttggagcgttgaatgagcatcttgttacggggaatgcggataagaataagtctgtccactaccaagctcttactgctgacagagaatgggttcgtagccgtaccggattgggggtcaatccctatgacactaagtcggttaaatttgcccagcaagttgctcttgaagcgaaaacggtagcggatattgctaatgccctcgcttcggcttacccggaactgaaggtcagtcatataaaagttactccattggattcacgtcttaacgcccctgctgctgaggtggtcaaggcattccgtcaaggcaatcgagacgttgctttttctcaacagaaagctgactccgtgaatcaggttaaagaaactcctgttacaaaacaggaaccagttacatctactgtacagactaagactcctgttagtgaacctgttaaaacagaacctactactaaagagtctagaccacaggctataaaagaacctgtgagccagtctgaaaaacgggatgttaaccttactaatgaggacaccatcaagcaacctactgaatctgttaaagaaactgaaacttctgcaaaagaaagcacagttacagaagaattaagagaaggtatcgatgctgtttacccctcattggtaggtactgctgattctaaagcagagggtattaagaactatttcaaattgtcctttaccttaccggaagaacagaaatcccgtactgttggttcagaagcacctctaaaagaggtagctcaagctctgtcttctcgtgctcgttatgaactctttactgagaaagaagttgctaatcctgcttttaatggggaagttattaagcgatataaagaactcatggaacatggggaaggtattgctgatattcttcgttcccgtctggctaagttccttaacactaaggatgttggtaaacgttttgctcagggtacagaagccaaccgttgggtaggcggtaagttacttaacatcgttgaacaggatggggatacctttaagtacaatgagcaattgctacagactgctgtattagcgggtcttcagtggagacttactgctaccagcaatactgctatcaaagatgcaaaagatgttgctgctattactggtattgaccaagccctgctgccagaagcaatggctgctgaaattctggctgcatttgtagagtctactgatgttgtagagaacatcgtggatatgtcagaaattgacccagataataagaagacgattggtctgtacaccattactgaactggattccttcgacccaattaatagcttccctactgctattgaagaagctgttttagtaaatcctacagagaagatgttctttggtgatgacattcctcctgtagctaatactcagcttcgtaaccctgctgttcgtaatactccagaacagaaggctgcattgaaagcagaacaggctacagagttctatgtacacactccaatggttcaattctatgagacgttaggtaaagaccgtattctcgaactgatgggtgctggtactctgaataaagagttacttaatgataatcatgctaaatctctggaaggtaagaaccgttcagtagaggactcttacaaccaactgttctccgtcattgagcaggtaagagcacagagtgaagacatctctactgtgcctattcactatgcatacaatatgacccgtgttggtcgtatgcagatgttaggtaaatacaatcctcaatcagccaaactggttcgtgaggctatcctacctactaaagctactttggatttatcgaaccagaacaatgaagacttctctgcattccagttaggtctggctcaggcattggacattaaagtccatactatgactcgtgaggttatgtctgacgagttgactaaattactggaaggtaatctgaaaccagccattgatatgatggttgagtttaataccactggttccttaccagaaaatgcagttgatgttctgaatacagcattaggagataggaagtcattcgtagcattgatggctcttatggagtattcccgttacttagtagcagaggataaatctgcatttgtaaccccactgtatgtagaagcagatggtgttactaatggtccaatcaatgccatgatgctaatgacaggtggcctgtttactcctgactggattcgtaatattgccaaagggggcttgttcattggttctccaaataagaccatgaatgagcatcgttctactgctgacaataatgatttatatcaagcatccactaatgctttgatggaatcgttgggtaagttacgtagtaactatgcttctaatatgcctattcagtcccagatagacagtcttctttctctgatggatttgttcctaccggatattaatcttggtgagaatggtgctttagaacttaaacgtggtattgctaagaacccgctgactattaccatctatggttctggtgctcgtggtattgcaggtaagctggttagttctgttactgatgccatctatgagcgtatgtctgatgtgctgaaagctcgtgctaaagacccaaacatctctgctgctatggcaatgtttggtaagcaagctgcttcagaagcacatgctgaagaacttcttgctcgtttcctgaaagatatggaaacactgacttctactgttcctgttaaacgtaaaggtgtactggaactacaatccacaggtgcaggagccaaagggaaaatcaatcctaagacctataccattaagggtgagcaactgaaggcacttcaggaaaatatgctgcacttctttgtagaaccactacgtaatggtattactcagactgtaggtgaaagtctggtgtactccactgaacaattacagaaagctactcagattcaatctgtagtgctggaagatatgttcaaacagcgagtacaggagaagctgacagagaaggctaaagacccgacatggaagaaaggcgatttccttactcagaaagaactgaatgatattcaggcttctctgaataacttagctcctatgattgagacaggttctcagactttctacattgctggctcagaaaatgcagaagtagcaaatcaggtattagctactaaccttgatgaccgtatgcgtgtaccaatgagtatctatgccccagcacaggctggtgtagcaggtattccatttatgactattggtactggtgatggcatgatgatgcaaactctttccactatgaaaggtgcaccaaagaataccctcaaaatctttgatggtatgaacattggtttgaatgacatcactgatgctagtcgtaaggctaatgaagctgtttacacttcttggcagggtaaccctattaagaatgtttacgaatcatatgctaagttcatgaagaatgtagatttcagcaagttgtcccctgaagcattggaagcaattggtaaatctgctctggaatatgaccaacgtgagaatgctactgtagatgatattgctaatgctgcatctttgattgaacgtaacttacgtaatattgcactgggtgtagatattcgccataaggtactggataaggtaaatctgtccattgaccagatggctgctgtaggtgctccttatcagaacaacggtaagattgaccttagcaatatgactcctgaacaacaggctgatgaactgaatatacttttccgtgaagagttagaagcccgtaaacaaaaagtcgctaaggctaaggctgaagtcaaagaagaaattgtttctgaaaaagaaccagtgaatccagactttggtatggtaggccgtgagcataaggcatccggtgttcgtatcctgtctgctactgctattcgtaacctggctaagattagtaatctgccatctactcaggcagctactcttgcagagattcagaaatcactggcagctaaagactataagattatctacggtacacctactcaggttgcagaatatgctcgtcagaagaatgttactgaattgacttctcaggaaatggaagaagctcaggcaggtaatatttatggctggactaacttcgacgataagaccatttatctggttagcccatctatggaaaccctcattcatgaactggttcatgcttctaccttcgaggaagtttattccttctatcagggtaatgaagtaagccctacttctaagcaggctattgagaaccttgaaggtctgatggaacagttccgttctctggatatttccaaagattctccagaaatgagagaagcatatgctgatgctattgcaactattgaaggtcatttgagtaatggctttgttgacccagctatttctaaagctgctgctcttaatgagtttatggcttgggggttagctaaccgtgctctggctgctaaacagaagagaacatcttcactggttcaaatggtgaaagatgtttatcaggccattaagaaattgatttggggacgtaaacaagctcctgcattgggagaagatatgttctctaatctgctgtttaattctgcaattctgatgcgtagccaacctacaactcaggcagtagctaaagatggcacactgttccatagcaaagcatatggtaacaatgaacgtctgtctcagttgaatcagaccttcgataaactggtaactgattaccttcgtactgacccagttacagaagtagaacgtcgtggcaatgtggctaatgcattaatgagtgctactcgactagttcgtgatgttcagtctcgtggcttcaatatgactgctcaggaacaatctgtattccagatggttactgctgcattagcaactgaagctgcaattgacccacacgctatggctcgtgctcaggaactttatacccatgtaatgaaacaccttacggtagaacatttcatggctgaccctgatagtactaaccctgctgaccgttactacgctcaacagaaatatgacactatctctggtgctaatctggttgaagtagatgccaaaggcagaaccagtctgttacctacattcctgggtctggctatggttaatgaagaactacgttcaatcattaaagaaatgcctgtacctaaagcagataagaaattagggaatgatgtagatactctgcttaccaatgcaggcactcagaaagctactaatgttcaggacagtattgatgctctgtcagaaacaatcatggctgctgctctgaaacgagagtccttctatgatgctgtagcaacccctaccggtaatttcattgaccgtgctaatcagtacgtaacagatagcattgaacggttatctgaaactgttattgagaaggcagataaggtaattgctaatccttctaatgtagctgctaaaggtgttgctcatctggctagactgactgctgctattgcatctgacaaacaaggtgagatagtggctcagggtgttatgactgctatgaaccagggtaaagtatggcatcctttccatgacttagttaatgacattgttggccgtactaagactaatgccaatgtctatgacttaatcaaattggttaagagccagatttctcaagaccgtcaacaattccgtgagcatttacctacagtcattgctggtaagttttcccgtaaactgactgataccgagtggtctgcaatgcatactggtttaggtaaaacagatttagctgttctacgtgaaactatgagcatggctgaaattagagatttactctcttcacctaagaaagtgaaagatgaaatctctactctggaaaaagagattcagaaccaagcaggtagaaactggaatctggttcagaagaaatctaagcaactggctcaatacatgattacaggggaggtaggtaataacctccttcgtaatgcccatgctattagtcgtttattaggtgaacgtattactaatggtcctgtggcagatgtagctgctattgataagctcattactttgtactctctggaattgatgaataagtctgaccgtggccttttgtcagaattggctcaatcagaagtggagggtatggagttctccattgcttatatggtgggtcaacgtactgaagagatgcgtaaagctaaaggtgataaccgtactttgctgaatcactttaagggctatatccctgtagagaaccagcaaggtgtgaatttgattattgctgacgataaagagtttgctaagttaaatagccaatcttttactcgtattggtacttatcagggaagcactggtttacgtactggttctaaaggttattacttcagcccagtagctgcccgtgccccatactctcaaggtattcttcagaacgttcgtaatactgctggtggtgtggatattggtacaggctttacgttaggtactatggttgctggtcgtattactgacaaaccaaccgtagagcgtattaccaaagctctggctaaaggtgaacgtggacgtgaaccgctgatgccaatttataacagcaaaggtcaggtagttgcttatgagcaatccgtcgaccctaatatgttgaagcatctaaaccaagacaatcactttgctaagatggtgggtgtatggcgtggtcgtcaggtggaagaggctaaagcacaacgttttaatgacattctcattgagcaattacatgctatgtatgagaaagacattaaagactccagtgctaataaatctcaatatgtaaacctgttaggtaaaattgatgacccagtactggctgatgcaattaacctgatgaacattgagactcgccataaggccgaagaactctttggtaaagatgagttatgggttcgtagggatatgctgaatgatgcacttggctatcgtgctgcatctattggtgatgtatggactggtaactctcgttggtcacctagcacccttgatactgttaagaagatgttcctcggtgcatttggtaataaggcatatcatgtagtaatgaatgctgaaaataccattcagaacttggtgaaggatgctaagacagtaattgttgttaaatctgttgtagtaccggcagttaacttccttgctaacatctaccagatgattggacgtggtgttcctgttaaggatattgctgtgaatattcctcgtaagacgtcagagattaatcagtacattaaatctcgcttacgtcagattgatgcagaagcagaattacgtgctgctgaaggcaatcctaatctggttcgtaaacttaaaaccgagattcaatctattactgatagccatcgtcgtatgagcatctggcctttgattgaagcaggtgagttctcttctattgctgatgctggtattagtcgtgatgacctgttagtagctgaaggtaagattcatgagtacatggaaaaacttgctaataaacttccagaaaaagtacgtaatgctggccgttatgctcttattgctaaggacactgctctgttccagggtatccagaaaacagtagagtattcggacttcattgctaaagccatcatctatgatgatttagtgaaacgtaagaagaaatcctcttctgaagcattaggtcaagtaactgaagagtttgttaactatgacagattgcctggtcgtttccgtggttatatggaaagcatgggtctgatgtggttctacaactttaagattcgttccattaaagttgctatgagcatgattagaaacaacccagtacattctctgattgctacagtagtacctgctcctgccatgtttggtaatgtaggtctgccaattcaggacaacatgttaaccatgctggctgaaggaagactggattattcattaggcttcggacaaggactaagagcaccaaccctcaatccttggttcaaccttacccactaa

SEQ ID NO: 125926 - DNA, 16395 bp, Homo sapiens
atggataagaactttgatgacttattccgtctggttcaggaataccaaccacaacaagttggtgtagaaactactggacagcaaggtggttttatttctcttcttcagaaggaaatgcttaaccgtaatgtgttctttaactttgcatccagtcgtggaggccaaccgggtattcatcctgtaaccagtaagctatcaaggtttaacctcgtggttccctggttcaaagctggtaagatgtattttcctgctgaaatgaaagatagcccaatcatgacactctttatggggcaaattcgtttagccactatcaatggtcttaaaggtaaggatgactgtattgataccatttcaatgcttggctacctgaacccgtggaaaccacaagcaggtatcgttacagatgacaaaggtgacattgaagatgatagtaagcctttcattatcgtagctgctaatgaggcactgactcgtctgcatggtcgcttcaacatgcgtaacaacaacgtggttgttgagatgcaagaaggtagaaccaactacccattactagctaagtatgctgttcagtcttatgacccaaatgaagtgaagtgtcccttcattatggacttagcaggtgagaagtttgctgaggatgttattcgtattctggaagtgtatgacgataagggtcgtagacgtccgttgaatgaccgaaataatcctcacagtttgttcaccccaaggccaaacgttctacagaacaatgctccaaaagcatgggaagtattgaacgtaatgtatcaggctaaacatcctaaactgtctacagcagaggatggctataatgagatagacattcctgatacccttgacccagctttggatgcctacattgcttaccgttattacacttctctgaataccccagagagttcagcaaaggcagcagagtatctgtccttttatgacagcatctgttattgctgcgaaacacttaatgacccaatcgttgataagatgattggtaatgcttactacgttgttaagttcgtagcattacgaatgacctttattaaaaatgtcagtgataatatgactcagctacttgctatccataacaagttaactgagctatctgctatctacactaagctagatgaactacaacttattcataataatctggataagttacaggaactctacaatcaattatctaaactgactggtctatatgacaatcttcaggcattgctgagggtctatgacaacctgactccaatcaatactgtagcttctaacattgacgcagttaatacagtagcaactgatattgctaaagtaattattgtttctgctcaaattgataaagtaattactgttgctaatagcattaccaacgtgaataccgttgctggttccattgatgctgttaatacagtaagtactaatatcaatgcgattaagaatgtgaataccaatatggcagcactgcttgatttggataatcacatgactgaactattagctgtacatgccagattaggtgacttagttaccattgcagagcagctagacacaatcattgctgaccatgaaaagtatgctactgctgaaggtgcaggtctgattggctttaatcaggcacagacttatgcagctaatacagtaggtgcaatgctccgtcaggttattactatggataatgacaaaggtggttatgctgtagcaggtaaactgacctctactggtggagtatggtcgttagctactggttccatcaacatgaatgcccctactgctggtgcagtagctaacctggttcttaattataaagccggtaaagttagtggtttgttggtagcacctagtcaacaaatggcattggatggcctgattatgggtgcatctactactgacaatacagctactgtatctgttactgccccactccgttttaaagcagacctaactgctaaagcaatctccggtgtgaatacccgtatcatgccttccagtgcagtgactctgaatgtagatgcatatggtggcatcactcttggatatccacctagccttcagactgtagaaccagtgatgactttcattacccctacaggcaaggctccactgaccccacgattctccagtgttacggcaggggctgctgtactggttatggttggtgaagcagaagcacaactgaaatattcaggtggtggttgggctgctgtatctgattgggattcgggtacttattgtgcattcgatacagtatctggtgagttaacggtatatcacagtactcttatcaaagattctactgttacatttagcttactgttacctaccgatggtactcagcttacggcacaactgaagagtcatactgatagttccttcgtattgaagattgctaaaccagatggttctttacttgatgccccattggaaggtatgggtatcatgtactctcgtggtatgcacggaatctataaagtaccttatggttctctaatcgtagatgtcggtcgtgttcaggttaaattcagtgaatttaacaccacggaaggccgggaaaccggccttattactggagcagttatgtccattgaagattacctcaaaggcaagaattgcctagcttctcctaattatgacccggatgaccagcactcttcttggagagaagacctccctcaatttaagaaagacagggaacatctgacgttggtcaacactcgtcgtaatcggacttataacactaaactaaatcgtttcgaccctgagtattgggtagttgattacaatgccttaatggtagccaccatcattccgtatggttctaagtcttttaaagttccttgtcagtggcgtactaacaaagacttcttaggtgtccgttggatgacggaggatacctttgaccatcatctgtatcgttatgaaacagaccctaattacttaggtctgattctggcttttcgtcataaccctgatgaaccagataaattcacagttactattcagactcctgaaaaagcatatacgtatcgtctggctccatatggattcaataataaaacccgtcgatgggagtgtttggatacaaagtatggaaccaagagaacgtatcaggctgacatctttgtagctactgatgaagatattcctgaatctgaaatgacagaagtctatggcactaaggactatatcttcattctggactttgctgatttacgtacaggtgtggcatttaatggggtaactattaaccctcgtaatatcacaatgatttctttcgactgtactgaagcacatcatggtctagggaaagatgcttacattgccgccatgtataacaatgacgatggtgctactttccagatggaaattgggggtattcatactaatgctgctttagctgctggggataaactccaatgcatctggagatacttggatgttaatggtaatgctccagcagcagagaatgagttcgaagtaacagatggtcctattaaacaagtagactctgttaaatggtttactaaccttactgtatctggttccggtcgtaagcaactgggtcaacgtaaatatccacaagtagtgatgggtatgggcatgacttcaggctttgatgatggctataaccttactcctgagcgtcaggataaagaaacgggtgagttaatcacagaacagactgtattagattacccaattctatttgctggtgaatctcaggttgctattcacttcatgtctggtgcataccctgaccgtggctatgatgtattccagaagtacatgactgaaacttggggcattaactatgcaggtgtacgccctattaatgggacaactggttctactgctgtagaccgtgcatgtgcagttaatcctgattctgaagtatttgaccctacccaatcatccgatgcaggtggtctttggtggtgggatttagaagcagataaacccggtcctgcattactatattgtgtagagcaagtaggtaagctcaagcctaaagctattatttgggggcaaggtgaccaagatgccactgctttggcatatccaggtgaccgtgacccagcaccatcattaaccagaaccaagcaagctactaagaaggtatttgagtatcttcgtagtttgtatggacagattcctatcttcattcaggaactgagctatgcatggggcatcactaacactgatgaacctaatgtacctattcgtacaggattaccttctttcctggcagcccgtcgtaatacatggggagatattgagttccgttggaagtcttacggattagaccctgcattagctcaatatcgtattgaaatctataacccttctaatttgaaccagatacttcactcatttgtagtatcaggtactcaagaagcaaatggttatgtatatgctgacttcactgtagaagactggattcctgtaatgatggaagcggttggttctcctaatccgtgggagttcatgaagtggcgagtagtttgtctgtatcaggaaagagaaattccttcagcaccttggtcagataacattcctttggataatgcagggcttgttaagaagaccattctggtaggtattaaccagtttggtggtggacactttactgatatgtctgacccaactgctaccacagctaatggtgcaattggtcgtaaagacaaggtatctgcttctacgttacgtctgacttttgcagagaaagctggattacgtcctattcaggtaatgcctattaacgtagctgctgatagtgcaggtatgacggtaggtactcacaaatggtggaatacttccagtaattccccaggtgatgcactactggctattaacgatatggttaaaggtttgggtgttaaacctgattacttcattgaagctaatccgtgggaaaccatgtatatgaaggatgttaattcttctacatggcctgctttaatgactgcttttgaatcgtctaacaaagcaatgcttgcatggatgagaaccaactggggcaaccctaatctggagatttggttccagggggctactactgtttggtttggtgttgctccacctaatgaccttaactctgaagctactgttactgtacgtgataaacagattcagatggctacagctaatataggctttaaactgggttcctttgttcctggttctaacctgtacactgcgtaccgtaatgtggaatccagttggatttactacacggtagaagcattccatgccacagccattgagctaggtgaagcactggctcttaatgttaaccgtgctactaatccacctgattggtcttacttgcgcccaccagcaaatctgcaaggtcgtaagttagctactcgtgatattaagatgacatgggataaccgtgctgggattacccactggaagtatgctaaccgtcatgtcaccacaggggcagaaatctcttctggtatcctcaccagtcccgagtatgtgtttaccctgaatgaccagcaaaatgcttataacggggacactcttaatatgagtttctctgtttctgagtatgctgctgattctggtgcagtaggtgcatcttcttcctttgtaggggtagtccagaatggttcctatatgcagactcctactcaactgaaagctgctaaacagcttaatggtgacattatcttcacttgggtaggacgtccttcatggcaacacttctgggtagtgaataccagtgttaatgattctaagactgttatcttctctaaagaatggtctagtgaatctctaacatggactgttgcagaacagaacgagttctacggcctggaagaaggtggtgctactcatgtcatcttcatggtatctgagtatgacccaagtaacggattagtatctattggtgctcaagttactggtcaaacagagcagccatctaatccaatgaatcctgttgctggattgtatgcagtgttcaccggtgacccaggtaactctaatattaagattatgtgggataaaccttctgttggtggacgtgatgttcgtattcgaaatatgcatgtaacgtccagtgcaactattagtgaccagtttgtatctgataacaatcttgtgttcacacgagaagaacaggtagctgcttatggctttactgcttcaagcgtatctgttcgtgctcaagaacatgatattgaatcaggtgcattgggtcttactactgagtatgttgctgtaccggaaacagcaggaacagttggacagggctttgctaagaaagactctgtaggtaactgtactatgtcatgggaagtaggtgatgctgtccaatggcaggttgagattatcaatgctgagaactctactgttgttaaaacagagattgttgtagcacctacaatcacttggacggctgaagaaattacagccgagtatggttacctgactgaccatatggtttggcgagtaagaccttatcgtgcagatggggcatctaacattagggagattcaattacagcttattaatgagatgactgatgttcatatgggggcattgacggcacagtacatgccggatgactttaccttcgaaccaggaataggacagattcatttcaatgttgagacttccagaaaggtttgtttagaccttgctaagtctgttcttagactggttcctgtttatccattacctactaacaaagatgctctggattttgtaagtaaagcccaatgtcagattttgaaagaatgccagaacttgggaatggagctgtacttccagattggtgagccttggtggtgggatggttcatacaatacaggtgagggtaagaatgccccttgtatttatgaccctaagactatggctttatacaaagaagagacaggtaatgatgtacctactccatggattaaagacatctttgctccagtagaagaacatcagtggccttatgtagattggctatgcaccaaactgggtcaatccactaactacatacgtgactatgtaaaaggtaagttccctgatgcacaggcaacccttctgttctttacaccacagattatgtcccctgcatctgaactaacaggtcgattaaacttccctgagtcagagtgggtattccctaactatgactttgttcagattgaagactatgattggattattgatggaagacttgacctggttccactgacatttgatgctgccgtgaatagactagggtatccattgaatgtagttcactacttcataggattcgtactgttacctgaagatgctaagaaaatctgggctgatgttgataaggcgtggggattggcactagaggcaggatttagcatgagtcatgaatccgtagaggtgctcctagctcgaatggaggaacgtatgaagacactcttcgaaaataatgcccgtgatgctaaatctcggcaagatttagatgatgctgtacgtaaccttcaactgtctattaataagatggacactcgactggagaatgtagaaaagtctctggctgagtctgtccctactattgaagagttcattaccatcaaacacaaagttgttggtgctggattgtttggtaaatgggtatgggctggatcaggtatcattattggtatactggctgctgccagacgggagatttttgcatggaggattggtgtggcaataagtaagaagaaggttggcggtgttggaggggttattgcagcaatcattgctgctgtatttgctgttgagggtggatacgttaatgaccccaaagacccaggaggtgaaactaatcatggtgtaactattcaggttgctcaaaagcataagcaagaactagagtcgatgtataactgggatggttcaatgaagaacttaactcaggaaatggcatcaagtatttattacaacgattacatcttgaagcctggctttgttaagtttgcagatgtatcaccagcggtaacagaaaaactagtagatgctggtgttaatactggacctgcaagaccatctcgttggttacaagaatctcttaatgctttctccagaaatggcaaagactaccctaaaatacaagttgatggtaaagtcggttctggaactctaagtgcatataaaagccttcagaataaacgaggcaaagtagaagcctgtaagctcattttgaagtctctagatggtaaacagttaaactactatttatctcttaatatgcctgagtacactacaggatggattgctaatcgtattggtaatgtccctctggagaggggtagctctgggagctacctttttcttcttggttcacaacatggtgaaaagaaagttcaagcactatgggatgaagataagaaggagtactcaaaagaacttgatagagtaaaactggcttatgaccaaaagaatcgggaacacagttatgaagtcgggcaacttacccttcgacttgataaagccaaagagtcttatgaagtcgttattgattctattactaaccagtacaatagtcggttgctccagtcagaaaaacgagccgagagttataaacgtcaagcctcaaccggaaccactcaatgcctcaatcttgcaagccatgcagccagactcgactcaagtcttgaagaaggcagacgtttggttgaagaactcagggcaactgttagactccgtgataaccaactgattgaactggggaaccagattcgttctgaccgaattactatggaacaaaacactgattctatggttccattgccagacccaagccaagctactaagttaactagctggaagaatgaaccttccttgcaagcacttaaagcagacttggatgcagcaaagccatctcatactgccatgatgattaaggtcaaagaatggaatgaccttatgcgtattgaaggcaaagccaagccacctaaagtcaaaggacgttcacaggtacagcctaaacttgtacgtcgtcaagctgaatggcgttattctgctttaactgaacctttccttggttctaataagttattcaaagttactcctgtaacttgggaagatgtacaaggtgcacgccagaatgaactggttcttaactaccaattccgtaccaaactaaatcgtgtaagtttcattgataactatgttcgttcagttgttgatgatggtactggtattgttcgtgttggttggaacagggaaattcgtaaagagaagcaagaagttcctgtatttagtttgttccctattcaaacacaagaacaagctgatgctttacaacaggctctacaacttcgtacagataaccctcgcggttatgaagagaatgtagatgaagctattaaggaatcagtacgtttctttgatgaaacgggacaagcaacgtatgcagtacaaactgggacaactacaactgaagttgaagttcctttagcaaaccatcctacggtggaaatgctaaacccagagaacattattatcgacccttcatgtcagggtgatattaataaggcaatgtttgccattgtctcttttgaaacttgtaaggcagacctgcttaaagagaaagaccgttatcacaatctaaataagattgattggcaaagctctgctcccgttaatgaaccagaccatgcaaccactactcctcaagaatttcagattagtgaccctatgcgtaagcgtgtagttgcttatgaatattggggattctgggatattgaagggaatggtgtattagagcctatcgttgctacttggattggttctacccttattcgtttagagaagaatccttatcctgacggcaaactcccatttgtattaattccgtatatgcctgttaaacgggatatgtatggcgaaccagatgcagagttattaggtgataaccaagcagtacttggtgctgtaatgcgtgggatgattgacttacttggacgtagtgccaatggtcaacgtggtatgcctaaaggtatgcttgatgccctgaatagtcgtcgttacagggaaggtgaggattatgaatacaatcctacacaaaaccctgctcaaatgattattgagcataagttccctgaattgccacaatcagcactgactatggctactcttcagaaccaggaagcagaatctcttactggtgttaaagcatttgctggtggggtaactggtgagtcttatggtgatgtagctgctggtattcgtggtgtattagatgctgcttctaaacgtgagatggctatccttcgtcgtttagctaaaggcatgtctgaaattggtaataagattattgctatgaatgctgtgttcttggcagagcatgaagtagtacgtattaccaatgaagaatttgtcactattaaacgtgaagacctgaaaggtaactttgaccttgaagtagatatttctactgctgaagtagacaaccaaaagtcccaagacttaggctttatgcttcagactattggtccaaacgtagaccagcaaatcactttgaatattcttgcagagattgctgacttgaaacgtatgcctaaactggctcatgatttacgtacatggcaacctcaaccagacccagtacaggaacaactcaaacaattggctgttgagaaagcacagcttgagaatgaagagttacgttctaaaattcgtcttaatgatgcacaagctcaaaaagctatggcagaacgagacaataagaatctggattatctggaacaagaatctggcactaaacatgctcgtgaccttgagaagatgaaagctcaatcacaaggtaatcagcaattagaaattactaaagcattaaccaagccacgtaaggaaggagaacttccccctaacttatctgctgcaattgggtataatgcattgactaatggggaggatacaggtattcaatctgtatctgaacgggatatagctgctgaagccaaccctgcttattcacttggttccagtcagtttgacccaacccgtgacccagctcttaacccaggaattagattagactgtgctcgttatgtacaagaatcctgtgacccattgcttgaagaccgtcaacgtgctgatgctcttgctatggctcaagctgctggttgtttaaaacgttatctggaaattactcttcagaaagcagaaacactggtaggtgtccaatcagatattgagaatgcattggatgttgctcgtgatacccccatgactacggaagctgcaaaaacagcttccgacatttttaaaatgtcggatgaagagattctgaacatgcctggtccatcaagcattcagaacaacccggaaccggtagaaaataatactcctgcacaaccagacccaattgttgaagttgaacaaactgatgaaccagaagtaactactgaaccaactgaagtagaaaatacttctgaatcagaaagcaattcagatgcattcacaactggtaatgatagtgctacagttgacccaaataaggttgacagcaacagtaagcctgctactgataatgcaccttctactactgagcaaggccaagcaaaagtagtagaagacaagcaggtatcagaccagaaaactgacttcgactataaggctggttatgaacggataatggctccgtttaaagctaacggcaaaatgattactcctcagagtcctgaagaggtcattagcttgatgcaaatgggagctaactatacccgtaaaatgcaggagattcagccgtatcgtaagtatctcctgatgttagaaaacaacggattattagatgaagggcaactctcttatgctatcgatttagttaaagggaatcctgatgctattaagaagttggttaaagaatctggtattgatgttctggatattaatccagaagaggaagttaaataccaagctggtaatcaccgtgtgtcagatgctgaagcagcatttgcaaccgaactggaagatgctaaatccactccagaaggacaagctactcttcagttaatttcgactacgtgggatgaccacagcaaacaggcattgctggaaaatcgtggtctggttaataccatcgttgaacagaaagctaacggtatttacgaccgtattgtttctgaaattgaacgactcaaaatcttaggccaaatcccaatcggtacagcattcctggatgcttataatcaagtcggtaactaccttgctgctaatggtggttttaatgatttgattaagcagaaacctgttgaacaacctgaaccagtggttcagccagtagcaactcgtgttgcaacacctaagtctgaaatcactaatactcaacaggcagcagcggcatccccatcacgggttacaccgcgtaagacagaaaaatctagtattgatggtgctaactctgaccagatgcaaaccttcttctggctgaagaaagcaatcatcactgcccgtaaagagcagtacttcatgccactggcctctgtaactaacatgccgaagcattacggtaagaccatcaaggtatatgaatatgttcctctgctggatgaccgtaacatcaatgaccagggtattgatgcaagtggtgctactattgttaacggtaacctgtatggttccagcaaagacatcggtaacattacttccaaactgcctctactgactgaaaacggtggtcgagttaaccgtgttggttttactcgtattgctcgtgaaggttctattcacaagtttggcttcttctatgagttcactcaggaatctattgacttcgattctgatgatggcctgatggaacacctgtcccgtgaactgatgaatggtgctactcagattactgaagctgtactgcaaaaagacctgctggctgctgctggtactgttctgtatgctggtgctgctacttctgatgccaccatcactggtgaaggttctactccgtctatcgtttcttataagaacctgatgcgtcttgaccagattctgacagagaaccgtactcctactcagactaccattatcactggttcccgtatgattgatactaaagtcatcggtgctactcgtgttatgtatgtaggttctgaactggttccagaactgaaagcaatgaaagacctgttcggtaataaagcctttatcgaaactcagcactatgctgatgcaggtactatcatgaatggtgaagtcggttctattgataagttccgtatcattcagaaatgctgcactggggcaggtgctggtgcacaggctactgtagctaaccctggttaccgtacctctatggtatctggccaagagcactatgacgtttacccaatgctggtagtaggtgatgattcctttacctccattggcttccagactgacggatatatacacatgagcattaacgataaaccgaccgctgatttaactcagggcaacgatgacaccgttgatgaagttaaggttgatgaactttctctgctgaaacaacgagctaatatgatgggtatttcatactcaaataatattagtgctgaaactcttcgtaagaagattgaagcagctcaggaaccagtagaacctcagcctaatcctctggctctgtctacaggtacagtaactacggcaacttctttacgtcaccagcaacgcttagaacaattaaagctggttcgagtacgtattcagaaccttgaccctaagaagaaagacctgcctggtgagattattacagtagctaacgaatatattggtactgttcgtaaattcgttccatttggtgaagctactgatgagggctatcacatcccttactgtatttataacttcctcaaagaacgtaagttcctgaacattcgagttaccaaaggtaagaatggtcagcctaatattacgtctgcatgggtacgtgagtttgccattgaagttctgtctccactgactaaggaagaattacaaactctggctgctgctcagattgctgctggtgaggattttacgcttcctgacatcgacatgtctggcagtgagtatgatattcctggtggcattaatagccctatctatgcagagatagagaagataaccacagaacaactaactactcgtgaggttgggggttctggtgtatttgacgctttaatgcaatcagcaagcaatcatctactggcagaatttaagaataaccgaattactggtggtgattacgttaaggcatacattgctactatggaagcatgtatggctaatgctgtgcaattcctcaccactaaagaccaggcttattggaatgctgttactgctcaggtagctgcaattactgctcgtgctaatcttggtattatcaaagctaactttgttacagctaagattcaggctctggctactaaagctgaatatgcccttactaagctgaagctgtctaatgagtcagtaacttactgtactgctcaatacaatctatcctctatgcttcctcaacaattactgatgttgaagaaccagaccactcaggttgctgaacagactaagttaactactgaacaaatcaatatgacgaaagagcagaaggaagcacaacgtgctcagacttctgatactcgtactgatggtactcgtgtagctggttctgtaggtaaacagaaagaactctatgaccaacagattacgtcttataaacgtgatgctgaagttaaagctgccaaactgtttactgatgcatgggtcactcagaaaaccattgatgagggtctgtctcctcctaatggcttcactaacaccagtctggatagcattcttactgcattgaagaataacaacgcattgggtaagactaaaatctacgtagcatcctctgtctacaatttggcaggggatatacataaacgtccaaattatttaaagactacggtgattggtaacatcgtcagtaaatctgactttagtatgggtgataccatcactaactcttatttaaatggacctggtattcgtttacgtagattccctggttgggctgcaactaactatgacccttcaattggtattgcttatgggaacttgtcaatactgtctcagatagaccctgaagtagttaaatggcaagttcctcaaaaagcaggttatgaggtacaggttcagagcagtaggattggatttggtgattttgaggaatgggctgataaattcctctatgagaattatccagaccgtattactgaagagtttgaaatagacatcatggatgatgacaggattgtactcactgctactgatggtagtgagttatccttttatccagagaattacagtcaggatgcaatgtatctgtatgtgaactattactacatacagcctactagtgttgcagacccagtggttcatcctgctgtatctgtaccatctgctgatgacttaccttctacttctgaatggactcaggtatctcagaaccatactcctaagtcagctaccctgaagacagttactcatattaagagtgtattctctgatggcagacctgatgaggaaagtaccaatactgaagaagaacaggttagttggactaacttctcagatgtttacgagaaagaatttcgtgaaccaagtgaagtaggcttaatcattattcgtaagactacaatgacccaggtacagactggtactgtatctactggttccactacaaacactgaagttattgatttaggtggtggggttactgaaaccagaactactacagtaactacagatactttaggttatacatggtcttatcagaatacagatgtagttactactatgtctgctggtggtatgcctcaattgtttatttataaacagaacagtggtaatgccatccttgatgctctgtttattaataagacgaccaataacagattctattcattcatccctatccgtagtgataagaactggatttctggttctacatatactctttgtaagaaagcctttaagaaggctacagggggtaagatttctgacattatggatgacctgaagaagaacaaagatattggtgatattcagtatatctatgctgtatttggttgttctcttaatagtcctgaaaatacagctaaagagtacatatacagattcttccagttagtgaatcagtcaatgcctgctgacccaaactacccaactatggatgctttggtagaaggctttgctcaggctaacagagactttgatgcttatcaggaatggtgggaatctcgcagtgaagaagtagttgaagtagaaactactactgaaactgttgatgaaactgttgaagtagctgaagaagctgctgctcaggaagaagaaaaagaagtacaggaagaagaggctaaagaaccagtacaagccaaaccttctctgtttgcaggtctgaaacgttaa

SEQ ID NO: 125927 - DNA, 23157 bp, Homo sapiens
atggctatcactacttttgctaaaacttttggtcaggcttctactaaaactgaatccaacaatggttctcgcccgaaagctcaattctggattaacgttggctatgtagctaatgaaggcactgaagatgaacgtttcatctctctgcctactggtattccactggatactcaggaacatctgccaaccaattcctctaacgaagacttccgtgcaatgcgttgtgcacagaacgatttgttagatcaactgatggaatttgctaagactctggaaccaggtcaggaaggagttatctcactgcaagttcaacttcgtcgagttaaagaagaagctcctgctatctcagcaagcaagtatcttagaagacagccaatcagtgaagaaacagtagatgctctgtgtaagagctttactcatttacttcctgataatgataccaatctaccattcaatgtagatgttctcgactacatgatggaatgttctgatggaagatgtcatctgaaccaaagtcgaattaattggattaagagtcagttggagaaagcattactggataaaaacttctatgactatatctgtgatgatggagaaacacttcatattgcagtacatggtggagttacctatcaaggtgtccctcagtggactgatgggattaaagtcataggttatgactgtgctcatgcaggggataaactgaaatgtcctaaacaattcattggctccattagggagaaactctatgaggattcttatggagtatggcgagatgaagaatactgcatcaatgaatgtgaaagcatggaatttgactgtatagtgagcgatcttaattccatcgcgcgtgagtatagcgatggggctatctatgtgaaccgtgaaaagtttgcgtcctggaccgggaccgccgataaggacgatgttgactttcttaatgagtacgccgtgtgccccgtgagcctcttaggtcttgtctttgaaggtgccgaggccgtgatcgcaaggagtggaagggccgtctttgtcggtaattgcgtaagtgaaggtgtctattttgttcccctcggtgtagacgtcccgactgttacgcggtatctcgcatgccgttaccgatttctagttgaggccacggtgtgtggtgttcccttccctgcgtccaagagttatcattttgcaacccccaagtatgagtggaacaatgcaaaggacacccacatgactaggaggaggcagaaagtgaatagggagctcttattactttttgagtgtcagcaaggaagtccatcagagaaaagccatctcttttggctcagtgctctcatacgaggtgggggaggtaccctttttcttcttggttcacaacatggtgaaaagaaaggtcaagcactatgggatgaagataagaaggagtactcaaaagaacttggtagaggaaaactggcttatgaccaaaagaatcgggaacacagttatgaaggcgggcaacttacccttcgacttgataaagccaaagagtcttatgaagtcgttattgattctattactaaccagtacaatagtcggttgctccagtcagaaaaacgagccgagagttataaacgtcaagcctcaaccggaaccactcaatgcctcaatcttgcaagccatgcagccagactcgactcaagtcttgaagaaggcagacgtttggttgaagaactcagggcaactgttagactccgtgataaccaactgattgaactggggaaccagattcgttctgaccgaattactatggaacaaaacactgattctatggttccattgccagacccaagccaagctactaagttaactagctggaagaatgaaccttccttgcaagcacttaaagcagacttggatgcagcaaagccatctcatactgccatgatgattaaggtcaaagaatggaatgaccttatgcgtattgaaggcaaagccaagccacctaaagtcaaaggacgttcacaggtacagcctaaacttgtacgtcgtcaagctgaatggcgttattctgctttaactgaacctttccttggttctaataagttattcaaagttactcctgtaacttgggaagatgtacaaggtgcacgccagaatgaactggttcttaactaccaattccgtaccaaactaaatcgtgtaagtttcattgataactatgttcgttcagttgttgatgatggtactggtattgttcgtgttggttggaacagggaaattcgtaaagagaagcaagaagttcctgtatttagtttgttccctattcaaacacaagaacaagctgatgctttacaacaggctctacaacttcgtacagataaccctcgcggttatgaagagaatgtagatgaagctattaaggaatcagtacgtttctttgatgaaacgggacaagcaacgtatgcagtacaaactgggacaactacaactgaagttgaagttcctttagcaaaccatcctacggtggaaatgctaaacccagagaacattattatcgacccttcatgtcagggtgatattaataaggcaatgtttgccattgtctcttttgaaacttgtaaggcagacctgcttaaagagaaagaccgttatcacaatctaaataagattgattggcaaagctctgctcccgttaatgaaccagaccatgcaaccactactcctcaagaatttcagattagtgaccctatgcgtaagcgtgtagttgcttatgaatattggggattctgggatattgaagggaatggtgtattagagcctatcgttgctacttggattggttctacccttattcgtttagagaagaatccttatcctgacggcaaactcccatttgtattaattccgtatatgcctgttaaacgggatatgtatggcgaaccagatgcagagttattaggtgataaccaagcagtacttggtgctgtaatgcgtgggatgattgacttacttggacgtagtgccaatggtcaacgtggtatgcctaaaggtatgcttgatgccctgaatagtcgtcgttacagggaaggtgaggattatgaatacaatcctacacaaaaccctgctcaaatgattattgagcataagttccctgaattgccacaatcagcactgactatggctacccttcagaaccaggaagcagaatctcttactggtgttaaagcatttgctggtggggtaactggtgagtcttatggtgatgtagctgctggtattcgtggtgtattagatgctgcttctaaacgtgagatggctatccttcgtcgtttagctaaaggcatgtctgaaattggtaataagattattgctatgaatgctgtgttcttggcagagcatgaagtagtacgtattaccaatgaagaatttgtcactattaaacgtgaagacctgaaaggtaactttgaccttgaagtagatatttctactgctgaagtagacaaccaaaagtcccaagacttaggctttatgcttcagactattggtccaaacgtagaccagcaaatcactttgaatattcttgcagagattgctgacttgaaacgtatgcctaaactggctcatgatttacgtacatggcaacctcaaccagacccagtacaggaacaactcaaacaattggctgttgagaaagcacagcttgagaatgaagagttacgttctaaaattcgtcttaatgatgcacaagctcaaaaagctatggcagaacgagacaataagaatctggattatctggaacaagaatctggcactaaacatgctcgtgaccttgagaagatgaaagctcaatcacaaggtaatcagcaattagaaattactaaagcattaaccaagccacgtaaggaaggagaacttccccctaacttatctgctgcaattgggtataatgcattgactaatggggaggatacaggtattcaatctgtatctgaacgggatatagctgctgaagccaaccctgcttattcacttggttccagtcagtttgacccaacccgtgacccagctcttaacccaggaattagattagactgtgctcgttatgtacaagaatcctgtgacccattgcttgaagaccgtcaacgtgctgatgctcttgctatggctcaagctgctggttgtttaaaacgttatctggaaattactcttcagaaagcagaaacactggtaggtgtccaatcagatattgagaatgcattggatgttgctcgtgatacccccatgactacggaagctgcaaaaacagcttccgacatttttaaaatgtcggatgaagagattctgaacatgcctggtccatcaagcattcagaacaacccggaaccggtagaaaataatactcctgcacaaccagacccaattgttgaagttgaacaaactgatgaaccagaagtaactactgaaccaactgaagtagaaaatacttctgaatcagaaagcaattcagatgcattcacaactggtaatgatagtgctacagttgacccaaataaggttgacagcaacagtaagcctgctactgataatgcaccttctactactgagcaaggccaagcaaaagtagtagaagacaagcaggtatcagaccagaaaactgacttcgactataaggctggttatgaacggataatggctccgtttaaagctaacggcaaaatgattactcctcagagtcctgaagaggtcattagcttgatgcaaatgggagctaactatacccgtaaaatgcaggagattcagccgtatcgtaagtatctcctgatgttagaaaacaacggattattagatgaagggcaactctcttatgctatcgatttagttaaagggaatcctgatgctattaagaagttggttaaagaatctggtattgatgttctggatattaatccagaagaggaagttaaataccaagctggtaatcaccgtgtgtcagatgctgaagcagcatttgcaaccgaactggaagatgctaaatccactccagaaggacaagctactcttcagttaatttcgactacgtgggatgaccacagcaaacaggcattgctggaaaatcgtggtctggttaataccatcgttgaacagaaagctaacggtatttacgaccgtattgtttctgaaattgaacgactcaaaatcttaggccaaatcccaatcggtacagcattcctggatgcttataatcaagtcggtaactaccttgctgctaatggtggttttaatgatttgattaagcagaaacctgttgaacaacctgaaccagtggttcagccagtagcaactcgtgttgcaacacctaagtctgaaatcactaatactcaacaggcagcagcggcatccccatcacgggttacaccgcgtaagacagaaaaatctagtattgatggtgctaactctgaccagatgcaaaccttcttctggctgaagaaagcaatcatcactgcccgtaaagagcagtacttcatgccactggcctctgtaactaacatgccgaagcattacggtaagaccatcaaggtatatgaatatgttcctctgctggatgaccgtaacatcaatgaccagggtattgatgcaagtggtgctactattgttaacggtaacctgtatggttccagcaaagacatcggtaacattacttccaaactgcctctactgactgaaaacggtggtcgagttaaccgtgttggttttactcgtattgctcgtgaaggttctattcacaagtttggcttcttctatgagttcactcaggaatctattgacttcgattctgatgatggcctgatggaacacctgtcccgtgaactgatgaatggtgctactcagattactgaagctgtactgcaaaaagacctgctggctgctgctggtactgttctgtatgctggtgctgctacttctgatgccaccatcactggtgaaggttctactccgtctatcgtttcttataagaacctgatgcgtcttgaccagattctgacagagaaccgtactcctactcagactaccattatcactggttcccgtatgattgatactaaagtcatcggtgctactcgtgttatgtatgtaggttctgaactggttccagaactgaaagcaatgaaagacctgttcggtaataaagcctttatcgaaactcagcactatgctgatgcaggtactatcatgaatggtgaagtcggttctattgataagttccgtatcattcaggttccagaaatgctgcactgggcaggtgctggtgcacaggctactgtagctaaccctggttaccgtacctctatggtatctggccaagagcactatgacgtttacccaatgctggtagtaggtgatgattcctttacctccattggcttccagactgacggatatatacacatgagcattaacgataaaccgaccgctgatttaactcagggcaacgatgacaccgttgatgaagttaaggttgatgaactttctctgctgaaacaacgagctaatatgatgggtatttcatactcaaataatattagtgctgaaactcttcgtaagaagattgaagcagctcaggaaccagtagaacctcagcctaatcctctggctctgtctacaggtacagtaactacggcaacttctttacgtcaccagcaacgcttagaacaattaaagctggttcgagtacgtattcagaaccttgaccctaagaagaaagacctgcctggtgagattattacagtagctaacgaatatattggtactgttcgtaaattcgttccatttggtgaagctactgatgagggctatcacatcccttactgtatttataacttcctcaaagaacgtaagttcctgaacattcgagttaccaaaggtaagaatggtcagcctaatattacgtctgcatgggtacgtgagtttgccattgaagttctgcctccactgactaaggaagaattacaaactctggctgctgctcagattgctgctggtgaggattttacgcttcctgacatcgacatgtctggcagtgagtatgatattcctggtggcattaatagccctatctatgcagagatagagaagataaccacagaacaactaactactcgtgaggttgggggttctggtgtatttgacgctttaatgcaatcagcaagcaatcatctactggcagaatttaagaataaccgaattactggtggtgattacgttaaggcatacattgctactatggaagcatgtatggctaatgctgtgcaattcctcaccactaaagaccaggcttattggaatgctgttactgctcaggtagctgcaattactgctcgtgctaatcttggtattatcaaagctaactttgttacagctaagattcaggctctggctactaaagctgaatatgcccttactaagctgaagctgtctaatgagtcagtaacttactgtactgctcaatacaatctatcctctatgcttcctcaacaattactgatgttgaagaaccagaccactcaggttgctgaacagactaagttaactactgaacaaatcaatatgacgaaagagcagaaggaagcacaacgtgctcagacttctgatactcgtactgatggtactcgtgtagctggttctgtaggtaaacagaaagaactctatgaccaacagattacgtcttataaacgtgatgctgaagttaaagctgccaaactgtttactgatgcatgggtcactcagaaaaccattgatgagggtctgtctcctcctaatggcttcactaacaccagtctggatagcattcttactgcattgaagaataacaacgcattgggtaagactaaaatctacgtagcatcctctgtctacaatttggcaggggatatacataaacgtccaaattatttaaagactacggtgattggtaacatcgtcagtaaatctgactttagtatgggtgataccatcactaactcttatttaaatggacctggtattcgtttacgtagattccctggttgggctgcaactaactatgacccttcaattggtattgcttatgggaacttgtcaatactgtctcagatagaccctgaagtagttaaatggcaagttcctcaaaaagcaggttatgaggtacaggttcagagcagtaggattggatttggtgattttgaggaatgggctgataaattcctctatgagaattatccagaccgtattactgaagagtttgaaatagacatcatggatgatgacaggattgtactcactgctactgatggtagtgagttatccttttatccagagaattacagtcaggatgcaatgtatctgtatgtgaactattactacatacagcctactagtgttgcagacccagtggttcatcctgctgtatctgtaccatctgctgatgacttaccttctacttctgaatggactcaggtatctcagaaccatactcctaagtcagctaccctgaagacagttactcatattaagagtgtattctctgatggcagacctgatgaggaaagtaccaatactgaagaagaacaggttagttggactaacttctcagatgtttacgagaaagaatttcgtgaaccaagtgaagtaggcttaatcattattcgtaagactacaatgacccaggtacagactggtactgtatctactggttccactacaaacactgaagttattgatttaggtggtggggttactgaaaccagaactactacagtaactacagatactttaggttatacatggtcttatcagaatacagatgtagttactactatgtctgctggtggtatgcctcaattgtttatttataaacagaacagtggtaatgccatccttgatgctctgtttattaataagacgaccaataacagattctattcattcatccctatccgtagtgataagaactggatttctggttctacatatactctttgtaagaaagcctttaagaaggctacagggggtaagatttctgacattatggatgacctgaagaagaacaaagatattggtgatattcagtatatctatgctgtatttggttgttctcttaatagtcctgaaaatacagctaaagagtacatatacagattcttccagttagtgaatcagtcaatgcctgctgacccaaactacccaactatggatgctttggtagaaggctttgctcaggctaacagagactttgatgcttatcaggaatggtgggaatctcgcagtggtaatagggatattcccatagggaagcctcctaaaagacccgtatatccaacaataccttctaaatccattaatattcgttctaacggtggataccgttacaacatgactattagttggaacttcattgaagaatcagttagttcaggtaaagcattctctggagccaagaaagggcagctcaagtttgcttatgaaggtactgtagtccttatgcagaaagccgttatgtactctgaaaagggtaatgacaaagttgggtttactatctacaggctagataagataacaatgtattggcagaatggggataattcatggaggaagatttctgtctatggcctgaaccataacaataatgtttacaagaataaatctgtaagcatttctggtgtagatgcactaaatgatgatgaagagtccggatttatcatccctcttcataacaacatttatcgtagtatgtctttggtaaatggtactcagttatctactgcatgttgttatctggttcttaactcatataagaaagttaagaagaaatggtatcagtctggcatttttaaagtagtagtggttgttgttgcagtagtagtgtctgtgttctttactcctgctgctggtgctggggtaatgggtactgctgcttctattggtgctgcattaggttttgcagggttagctgctattatcgttggggctgtggctaatgccattgcagctatgattctgatgtccattattcaaacagtctctgttagtctgcttggggataagattggaatcattgttgctactattgcctctatggtagccatgaatgtcggcacagctttatccactggttcatccatgtctacgatgctgggtgaaatgatgaaagcagacaacatcattaaactcacttcatctgtaggaaatggcataagtgattacatcaatgcttctgctatggaaactgtcaaaaagacagagaaacttatggcagagtaccgtgaccagataaaaaccattcaggaaaagtacgaggaaatgtttggcactgagggcatgggttacattgacccaatgaacctaactaatgtaggccaacaatttgaaccactggattcattccttagccgtactcttatgactggtcatgatatagctgatatgtctaacaacatgattaccaactttgcagatataacgttgcagcttgatttagataccaattttggctatgggtatggttcctttaataccccaaccatgaactataaccctatgcaatctggcatccttagtaatgactggcttcagaatattactggtggtgctacagggaataccggtgggcagactcaagggcttactgaccaactgggtctgaacattcctacattccagttggggttaggtggtcttaatgcactgggtaatatctatggtgcattacaggctaacaagttagctaagaatcagttctcttttgctaaagatgttactaacactaatctgaataaccagattaagtcctataacactgctctggaagaccgtgctcgtagtcgtgctgttgcagaaaatcgtgaccaatctacggctgatgcttacattgcagctaatcgcttaactcgtgattttcgaaactctgcaagacagcaagctggtgatgcaattatggctgaagccatgcgttaccaagaccctaatgagtatcgtaatgccttagcttctggagcattatttgctggctatgacccttctctaatttcttctcgtactatggagaacttagataatcgtgctggcaatctgttagaccaagcatctaaacaacaaaatctggatttcactcgatacagtaatgacagaaccatgaaggtaaatgcagctactgatgctgctgcccctgcattacaggaattagctctggcttatcaatctggtgacccaagaaaggttcaggcagcacaggctcagtatggggatgtattaaaaacccttcctgctggtgttgttatggactacatgaacaaccttcaaggacagggtactgctggtattggtcaacgtcgcagcttattcaacttaggtgttgatatacgtaacgatgcggatactcaggctgctatgcagttactgaataatattcgtcgtggtgcatacagtgctgacgatgctcgtatgcttgcagagggtacgttcgaccaaatgtcaccaggagcagtaagtcgtgcactatctcagttagatagagcatatccaggtgcatatactccgggaactggttctgcatccctatctcctcctggtactcagggtactcggaatggttctgcatatgacactacctataagttcacaccaactgatgtacctattactcagatgaacttaggtgaggtggttcagcatcaagacactatgaagaagacactaggtgcttctcctgttggtgcataccagattaaccaagatactcttaaagactttgctccaaaggtatttggtgaagattggcagaacattcctatgtctccggagaaccaagacaaactgggtgaagctatttttaatgcccgtaagaatggcaatctgaagagtacatgggctgctttaccggatgatactcctggtgcttataagaacttgtcatgggatgaaatgaaggattacattgctcaagcagaaacaggtaattctattaatccattacaggaacaagcattcacttctgttgctggtaatactgttggtactcgtaatatgcagaatattggtaatactctgctgccagaataccaagctgctactgttgacccttctacgactggtcaggtggctaaacgtattattgatagcaatgaactgaaaggcattaaccaaggtgcactggttcgacaaatcaatgaggtagcaaaacagaatgctatttctcccgctatggcaggagcaatcattcaacgtagtatcaccggtaaaccagagggatggtttagtggtattcgaaatgcctttgatactgatgttattgatttgggtggtgattaccaactggataaagcagccgtagaagcaaatgcaaaacttgcaactactggtactgctattgaacagaatgctcgtaatcagcttactgcacaaattcaatcaaacatctatgcagcacagaatacgttagatactgcacttgctgatttacgtgaagtacagcgtcgtattcagaccggtcaggaaaaccttagaagtgtactacctcgctatcaggagcgagttaacactgctaaacgtcttcttgatggtgctcgtagtgctgtagctgctgaccctcagaatttggatattaagagcctacaaaatattaaacaggaagagagcgaggcaaaccggagaagtttaggcagagatgccggacgtcgattggacagcgtaaccaatgcaaagcaagttgacgtctctactgcaaccgcccagaagaaagctgaacaaggtgtcactactcctcttgtttctcctgatgctgcttatcaaatgcaagctgcccgtactggtaatgttggggctaatgcatttgaaccagggacagtgcaatcagatttcatgaatctgactccaatgcaaatcatgaataagtatggggttgagcaaggcttacaacttatcaacgctcgtgctgatgcagggaaccaggtattcaatgattcagttactacaagaactcctggggaagaactgggggatattgctactggtgttggtcttggttttgttaatacccttgggggcattggtgctcttggggcaggcttactcaacgatgatgcaggtgctgttgttgctcaacaattgagtaagtttaatgatgctgtccatgctacccaaagccaagcattacaagataaacgtaagctctttgctgctcgtaacttaatgagtgaagtagagagtgaacgtcagtatcaaacagataagaaagaaggcactaatgacatagtagcttccttatctaaatttggacgtgattttgtaggttcaattgagaacgctgcccaaactgactccattatttctgatgggttagcagaaggggtaggttctctattaggtgctggtcctgtattaaggggtgcatctttactgggtaaagcagttgttccagcaaatactcttcgtagtgctgcattggctggtgctattgatgcaggtactggtactcagtccctggctcgtattgcttctactgtaggcagagctgcaccaggtatagttggtgttggtgcaatggaagctggtggtgcataccaacaaactgctgatgaaattatgaagatgagtcttaaagacttagagaagtctcctgtttatcaacaacatattaaagatggtatgtctccagaacaggctcgtcgtcagactgcatctgaaactggtcttactgctgctgctattcaattacctattgctgctgcaactggtcctctggtatctcgttttgagatggctcctttccgtgctggttctttaggtgctgtaggtatgaaccttgcccgtgaaacagtggaagaaggtgttcagggtgctacaggccaactggctcagaatattgcacagcaacaaaacattgataagaaccaagacctgcttaaaggtgtcggtacacaagctggtttaggtgctctttatggctttggttctgctggtgttgtacaggctccggctggtgctgctcgtttagcaggtgctgcaactgctcctgtattgcgtaccacaatggctggtgttaaagctgctggtagtgtagcaggtaaggttgtttcccctattaagaacactttggtagctcgtggtgagcgggttatgaagcagaatgaagaagcatctcctgttgctgatgactatgttgcacaggcagcacaagaagctatggctcaagcaccagaagcagaagttactattcgtgatgctgttgaagcaactgatgctactccggaacagaaagttgcagcacaccagtatgtttctgacttaatgaatgctactcgttttaatcctgaaaattatcaggaagcaccagagcatattcgtaatgctgtagctggttctactgaccaagtacaggttattcaaaagttagcagacctagttaacacattagatgaatctaatcctcaagcactgatggaagctgcatcttatatgtatgatgctgtttcagagtttgagcaattcattaaccgtgaccctgctgcactggatagtattcctaaagattctccggctattgagttactcaatcgttatacaaatctgacagctaatattcagaacacaccaaaagtaattggtgcactgaatgttattaatcgaatgattaatgaatctgcccagaatggttctttggatgtgactgaagaatccagtccacaggaaatgcagaacgtagcattagctgctgaagtagctcctgaaaagctcaatccagaatctgtaaatgttgttcttaaacatgctgctgatggtcgtattaaactgaataatcgccaaattgctgcccttcagaatgctgctgcaatcctgaagggggcacgggaatatgatgcagaagctgcccgtcttggattacgtcctcaagacattgtgagtaaacagattaaaacggatgagagcagaactcaggaaggacaatactctgcgttgcaacatgcgaataggattcggtctgcgtataactctggtaatttcgagttggcctccgcttacctgaacgactttatgcagttcgcccagcacatgcagaataaggttggagcgttgaatgagcatcttgttacggggaatgcggataagaataagtctgtccactaccaagctcttactgctgacagagaatgggttcgtagccgtaccggattgggggtcaatccctatgacactaagtcggttaaatttgcccagcaagttgctcttgaagcgaaaacggtagcggatattgctaatgccctcgcttcggcttacccggaactgaaggtcagtcatataaaagttactccattggattcacgtcttaacgcccctgctgctgaggtggtcaaggcattccgtcaaggcaatcgagacgttgctttttctcaacagaaagctgactccgtgaatcaggttaaagaaactcctgttacaaaacaggaaccagttacatctactgtacagactaagactcctgttagtgaacctgttaaaacagaacctactactaaagagtctagaccacaggctataaaagaacctgtgagccagtctgaaaaacgggatgttaaccttactaatgaggacaccatcaagcaacctactgaatctgttaaagaaactgaaacttctgcaaaagaaagcacagttacagaagaattaagagaaggtatcgatgctgtttacccctcattggtaggtactgctgattctaaagcagagggtattaagaactatttcaaattgtcctttaccttaccggaagaacagaaatcccgtactgttggttcagaagcacctctaaaagaggtagctcaagctctgtcttctcgtgctcgttatgaactctttactgagaaagaagttgctaatcctgcttttaatggggaagttattaagcgatataaagaactcatggaacatggggaaggtattgctgatattcttcgttcccgtctggctaagttccttaacactaaggatgttggtaaacgttttgctcagggtacagaagccaaccgttgggtaggcggtaagttacttaacatcgttgaacaggatggggatacctttaagtacaatgagcaattgctacagactgctgtattagcgggtcttcagtggagacttactgctaccagcaatactgctatcaaagatgcaaaagatgttgctgctattactggtattgaccaagccctgctgccagaaggtttagtagagcaatttgatactggtatgacactcactgaagcagttagttccctggctcagaaaattgagtcttactggggattatctcgtaatccaaatgctccattgggttataccaaaggtatccctacagcaatggctgctgaaattctggctgcatttgtagagtctactgatgttgtagagaacatcgtggatatgtcagaaattgacccagataataagaagacgattggtctgtacaccattactgaactggattccttcgacccaattaatagcttccctactgctattgaagaagctgttttagtaaatcctacagagaagatgttctttggtgatgacattcctcctgtagctaatactcagcttcgtaaccctgctgttcgtaatactccagaacagaaggctgcattgaaagcagaacaggctacagagttctatgtacacactccaatggttcaattctatgagacgttaggtaaagaccgtattctcgaactgatgggtgctggtactctgaataaagagttacttaatgataatcatgctaaatctctggaaggtaagaaccgttcagtagaggactcttacaaccaactgttctccgtcattgagcaggtaagagcacagagtgaagacatctctactgtgcctattcactatgcatacaatatgacccgtgttggtcgtatgcagatgttaggtaaatacaatcctcaatcagccaaactggttcgtgaggctatcctacctactaaagctactttggatttatcgaaccagaacaatgaagacttctctgcattccagttaggtctggctcaggcattggacattaaagtccatactatgactcgtgaggttatgtctgacgagttgactaaattactggaaggtaatctgaaaccagccattgatatgatggttgagtttaataccactggttccttaccagaaaatgcagttgatgttctgaatacagcattaggagataggaagtcattcgtagcattgatggctcttatggagtattcccgttacttagtagcagaggataaatctgcatttgtaaccccactgtatgtagaagcagatggtgttactaatggtccaatcaatgccatgatgctaatgacaggtggcctgtttactcctgactggattcgtaatattgccaaagggggcttgttcattggttctccaaataagaccatgaatgagcatcgttctactgctgacaataatgatttatatcaagcatccactaatgctttgatggaatcgttgggtaagttacgtagtaactatgcttctaatatgcctattcagtcccagatagacagtcttctttctctgatggatttgttcctaccggatattaatcttggtgagaatggtgctttagaacttaaacgtggtattgctaagaacccgctgactattaccatctatggttctggtgctcgtggtattgcaggtaagctggttagttctgttactgatgccatctatgagcgtatgtctgatgtgctgaaagctcgtgctaaagacccaaacatctctgctgctatggcaatgtttggtaagcaagctgcttcagaagcacatgctgaagaacttcttgctcgtttcctgaaagatatggaaacactgacttctactgttcctgttaaacgtaaaggtgtactggaactacaatccacaggtgcaggagccaaagggaaaatcaatcctaagacctataccattaagggtgagcaactgaaggcacttcaggaaaatatgctgcacttctttgtagaaccactacgtaatggtattactcagactgtaggtgaaagtctggtgtactccactgaacaattacagaaagctactcagattcaatctgtagtgctggaagatatgttcaaacagcgagtacaggagaagctgacagagaaggctaaagacccgacatggaagaaaggcgatttccttactcagaaagaactgaatgatattcaggcttctctgaataacttagctcctatgattgagacaggttctcagactttctacattgctggctcagaaaatgcagaagtagcaaatcaggtattagctactaaccttgatgaccgtatgcgtgtaccaatgagtatctatgccccagcacaggctggtgtagcaggtattccatttatgactattggtactggtgatggcatgatgatgcaaactctttccactatgaaaggtgcaccaaagaataccctcaaaatctttgatggtatgaacattggtttgaatgacatcactgatgctagtcgtaaggctaatgaagctgtttacacttcttggcagggtaaccctattaagaatgtttacgaatcatatgctaagttcatgaagaatgtagatttcagcaagttgtcccctgaagcattggaagcaattggtaaatctgctctggaatatgaccaacgtgagaatgctactgtagatgatattgctaatgctgcatctttgattgaacgtaacttacgtaatattgcactgggtgtagatattcgccataaggtactggataaggtaaatctgtccattgaccagatggctgctgtaggtgctccttatcagaacaacggtaagattgaccttagcaatatgactcctgaacaacaggctgatgaactgaataaacttttccgtgaagagttagaagcccgtaaacaaaaagtcgctaaggctaaggctgaagtcaaagaagaaattgtttctgaaaaagaaccagtgaatccagactttggtatggtaggccgtgagcataaggcatccggtgttcgtatcctgtctgctactgctattcgtaacctggctaagattagtaatctgccatctactcaggcagctactcttgcagagattcagaaatcactggcagctaaagactataagattatctacggtacacctactcaggttgcagaatatgctcgtcagaagaatgttactgaattgacttctcaggaaatggaagaagctcaggcaggtaatatttatggctggactaacttcgacgataagaccatttatctggttagcccatctatggaaaccctcattcatgaactggttcatgcttctaccttcgaggaagtttattccttctatcagggtaatgaagtaagccctacttctaagcaggctattgagaaccttgaaggtctgatggaacagttccgttctctggatatttccaaagattctccagaaatgagagaagcatatgctgatgctattgcaactattgaaggtcatttgagtaatggctttgttgacccagctatttctaaagctgctgctcttaatgagtttatggcttgggggttagctaaccgtgctctggctgctaaacagaagagaacatcttcactggttcaaatggtgaaagatgtttatcaggccattaagaaattgatttggggacgtaaacaagctcctgcattgggagaagatatgttctctaatctgctgtttaattctgcaattctgatgcgtagccaacctacaactcaggcagtagctaaagatggcacactgttccatagcaaagcatatggtaacaatgaacgtctgtctcagttgaatcagaccttcgataaactggtaactgattaccttcgtactgacccagttacagaagtagaacgtcgtggcaatgtggctaatgcattaatgagtgctactcgactagttcgtgatgttcagtctcgtggcttcaatatgactgctcaggaacaatctgtattccagatggttactgctgcattagcaactgaagctgcaattgacccacacgctatggctcgtgctcaggaactttatacccatgtaatgaaacaccttacggtagaacatttcatggctgaccctgatagtactaaccctgctgaccgttactacgctcaacagaaatatgacactatctctggtgctaatctggttgaagtagatgccaaaggcagaaccagtctgttacctacattcctgggtctggctatggttaatgaagaactacgttcaatcattaaagaaatgcctgtacctaaagcagataagaaattagggaatgatgtagatactctgcttaccaatgcaggcactcaggtaatggaatctctgaaccgtcgtatggctggtgaccagaaagctactaatgttcaggacagtattgatgctctgtcagaaacaatcatggctgctgctctgaaacgagagtccttctatgatgctgtagcaacccctaccggtaatttcattgaccgtgctaatcagtacgtaacagatagcattgaacggttatctgaaactgttattgagaaggcagataaggtaattgctaatccttctaatgtagctgctaaaggtgttgctcatctggctaaactgactgctgctattgcatctgaaaaacaaggtgaaatagtggctcagggtgttatgactgctatgaaccagggtaaagtatggcaacctttccatgacttagttaatgacattgttggccgtactaagactaatgccaatgtctatgacttaatcaaattggttaagagccagatttctcaagaccgtcaacaattccgtgagcatttacctacagtcattgctggtaagttttcccgtaaactgactgataccgagtggtctgcaatgcatactggtttaggtaaaacagatttagctgttctacgtgaaactatgagcatggctgaaattagagatttactctcttcacctaagaaagtgaaagatgaaatctctactctggaaaaagagattcagaaccaagcaggtagaaactggaatctggttcagaagaaatctaagcaactggctcaatacatgattacaggggaggtaggtaataacctccttcgtaatgcccatgctattagtcgtttattaggtgaacgtattactaatggtcctgtggcagatgtagctgctattgataagctcattactttgtactctctggaattgatgaataagtctgaccgtggccttttgtcagaattggctcaatcagaagtggagggtatggagttctccattgcttatatggtgggtcaacgtactgaagagatgcgtaaagctaaaggtgataaccgtactttgctgaatcactttaagggctatatccctgtagagaaccagcaaggtgtgaatttgattattgctgacgataaagagtttgctaagttaaatagccaatcttttactcgtattggtacttatcagggaagcactggtttacgtactggttctaaaggttattacttcagcccagtagctgcccgtgccccatactctcaaggtattcttcagaacgttcgtaatactgctggtggtgtggatattggtacaggctttacgttaggtactatggttgctggtcgtattactgacaaaccaaccgtagagcgtattaccaaagctctggctaaaggtgaacgtggacgtgaaccgctgatgccaatttataacagcaaaggtcaggtagttgcttatgagcaatccgtcgaccctaatatgttgaagcatctaaaccaagacaatcactttgctaagatggtgggtgtatggcgtggtcgtcaggtggaagaggctaaagcacaacgttttaatgacattctcattgagcaattacatgctatgtatgagaaagacattaaagactccagtgctaataaatctcaatatgtaaacctgttaggtaaaattgatgacccagtactggctgatgcaattaacctgatgaacattgagactcgccataaggccgaagaactctttggtaaagatgagttatgggttcgtagggatatgctgaatgatgcacttggctatcgtgctgcatctattggtgatgtatggactggtaactctcgttggtcacctagcacccttgatactgttaagaagatgttcctcggtgcatttggtaataaggcatatcatgtagtaatgaatgctgaaaataccattcagaacttggtgaaggatgctaagacagtaattgttgttaaatctgttgtagtaccggcagttaacttccttgctaacatctaccagatgattggacgtggtgttcctgttaaggatattgctgtgaatattcctcgtaagacgtcagagattaatcagtacattaaatctcgcttacgtcagattgatgcagaagcagaattacgtgctgctgaaggcaatcctaatctggttcgtaaacttaaaaccgagattcaatctattactgatagccatcgtcgtatgagcatctggcctttgattgaagcaggtgagttctcttctattgctgatgctggtattagtcgtgatgacctgttagtagctgaaggtaagattcatgagtacatggaaaaacttgctaataaacttccagaaaaagtacgtaatgctggccgttatgctcttattgctaaggacactgctctgttccagggtatccagaaaacagtagagtattcggacttcattgctaaagccatcatctatgatgatttagtgaaacgtaagaagaaatcctcttctgaagcattaggtcaagtaactgaagagtttgttaactatgacagattgcctggtcgtttccgtggttatatggaaagcatgggtctgatgtggttctacaactttaagattcgttccattaaagttgctatgagcatgattagaaacaacccagtacattctctgattgctacagtagtacctgctcctgccatgtttggtaatgtaggtctgccaattcaggacaacatgttaaccatgctggctgaaggaagactggattattcattaggcttcggacaaggactaagagcaccaaccctcaatccttggttcaaccttacccactaa

SEQ ID NO: 125928 - DNA, 235 bp, Homo sapiens
gccaagaggaagcgggaggagctgagcaacgtactggccgccatgaggaaagctgctgccaagaaagactgagcccctcccctgccctctccctgaaataaagaacagcttgacagaagccctggctctcctgctgtccgtgggtgggtgtgggtgtgtcgggggcccgcagtcccctgtctggtgcccgctctgagccacaccctctccgggtgctgcctggtcgtgaatcaaa

SEQ ID NO: 125929 - DNA, 672 bp, Homo sapiens
gctgaaggagccgggacgcggggctctgggcctcgggaactgagccggtactcacctccgccccttctccccgtcgctgtccgcagccatggccctacgctaccctatggccgtgggcctcaacaagggccacaaagtgaccaagaacgtgagcaagcccaggcacagccgacgccgcagggcgtcttgaccaaacacaccaagttcgtgcgggacatgattcgggaggtgtgtggctttgccccgtacgagcggcgcgccatggagttactgaaggtctccaaggacaaacgggccctcaaatttatcaagaaaagggtggggacgcacatccgcgccaagaggaagcgggaggagctgagcaacagtactggccgccatgaggaaagctgctgccaagaaagatttaggcccctccccctgccctctccctgaaattaaagacaagcttgacagaagccctggctctcctgctgtccgtgggtgggtgtgggtgtgtcgggggcccgcagtcccctgtctggtgcccgctttgagccacaccctctccgggtgctgcctggtcgtgaatcaaaagccgtggcccgcccacccttcccggggcagcaggtgaggaagccgccgtactgcaaatgactttaatcattaaatagcttttaaacaacactctga

SEQ ID NO: 125930 - DNA, 418 bp, Homo sapiens
  misc_feature (1)...(418): n = a,t,c or g
tttcgtggaagatgctgcgtccagcgttaccgtggctgtaccttggcctctgcagcctcctggtgggggaggcagaggccccgagccccgtggatccgctggagcggagccggccgtacgcggtgctgcgagggcagaacctggagnnnnnnnnnnnnnnnnnnnnnnnnnnnnnnnnnnnnnnnnnnnnnnnnnnnnnnnnnnnnnnnnnnnnnnnnnnnnnnnnnnnnnnnnnnnnnnnnnnnnnnnnnnnnnnnnnnnnnnnnnnnnnnngtcggttgaggattgcatcactactagagagggggcgttatagaggaggccaggctgcgcacacactcctgacatcgcgaacctcctgtcttgtgctacctnnnnnnnnnnnnnnnnnnnnnnnnnnnnnnnnncgtgatagaga

SEQ ID NO: 125931 - DNA, 725 bp, Homo sapiens
ttttttttttaggattttactttagttttaattgacgttttgctcaaaagcaaagaactgaacatttcaatggttcaatgttacaagattacaaacaaaatccttacacagttacagtatcctacttcggttacttcacattaaatgcaggttgttaaaatcagtgctgtgcttgaacacaagataagcatttcaatttaataacaaaattaaatctagcaccttgaaataaatattgacgacagctttataagtatgaaagtatcatttcaataggaggaaaaaatccagttcaccaacagtggaaactaatagcagcattttcaaagctgagatgaagaacttgtctggctgtcaccgacgccgaatgggcttgtagacacaaaatgccataaggatgacagtcaccagcaggatgctgaaaatggttcccatcaacactgtaatcccagctactcagggggctgaggcaggagaatcgcttgaaccccagacgcggaggttgcagcgagccgagatcgcaccattgcactccagcctgggcgacagggactccaggttctgccctcgcagcaccgcgtacggccggctccgctccagcggatccacggggctcggggcctgtgcctcccccaccaggaggctgcagaggccaaggctcagccacggtaacgctggacgcagcatcttccccagccctgcagaagcagagaggccacttccgt

SEQ ID NO: 125932 - DNA, 500 bp, Homo sapiens
gcgtccggtggcctatctgcttctgcagggctggggaagatgctgcgtccagcgttaccgtggctgtaccttggcctctgcagcctcctggtgggggaggcagaggccccgagccccgtggatccgctggagcggagccggccgtacgcggtgctgcgagggcagaacctggatcaaactcttcattgaagtactcatcaggcgtgatggctgtggggttgtttgcagtagcacattccgtggtgaggtcctgctgagccagaactcaggagagtcagaaatgccaaatgatgttcacaagtgaaggcctgtggcactcagtgtctgaggtggacgtgttaaccagctaaagaccgggaagttctattcactaacttttttgcatggaacaagaaaatctatgaggatatcaccaaactacacaggaagtgtaatggatttcttcattttaaaatatttctctactctcctttacatttttaaatcctgattataacaaa

SEQ ID NO: 125933 - DNA, 1784 bp, Homo sapiens
atgtggattgggactctgaagaacaactttatggtggacaccttcgtctccatctgctttgctctggtgagtggcaagctgtaccagtggaaagagcctgtcatcagttctgtgcacagcaaggtgaaaaggacagcagaagtgaaagaggagatcgtggagaaagaaatgaagaagttggtgcacagtgtctttaacatggcagattacaccttccctttgcaggtgaacacctgcctcctggtgggggaggcagaggccccgagcccccgtggatccggctggagcgaagccgggccgtacgcggtgctgcgagggcagaacctggtgttgatgggaaccattttcagcatcctgctggtgactgtcatccttatggcattttgtgtctacaagcccattcggcgtcggtgacagccagacaagttcttcaatgagtatttggggaataggataagttgtgttgcacacaggccagtggagaagttggaaccaaaactttcctacttggaaatgacctttggtctgtgacagttggaaaacgctaaatgaattagaagaaaacatgtactagacattattttttcctaacactgtagcgcaaataattggcccctgagtccgcttctcagtgtttctgactggacttgctaaaagaaagacctgagagctccaaaggtcagcgtgaagatggagtgttcatgagaaagaaaacatggtaaccttgtgagtgcctgtaagaaccacactgtaaagaactcatcattaatgcttgaaaatgttattaagaaggagacttaccatgcagacattccctatttaagaaccatttggttacagtgggttaagaatcacagatttttttttttaatctcacctgagttagcctagaattccgctggttgcaaagtggtgtcagctgtggggatcttgggccctcgttcctcacctgcatcctgccctgcactcaggtgcttccccctggaagtcagggtcacatcaggtaggacctgttactatatggcacctttgggcctgggaattgctcttgaagttgggactgggaaatgtttacttagggttgggcctgtttacaaaaagggacccccattcctgctttaaacacatttgatcttccctttgccctggcattttgagtcttttcttaggcccacgggtctggaaacttgagggcagctttccaggatttgggaatgtaaaaggtctcagtggggcacttctggtttcatccctggggtgggggagggcccagccaacaggaagtgcatgtcccactgtgcgggcccagtgtgtgtttacacaaatttccatctcagctttgaaaatgctgctattagtttccactgttggtgaactggattttttcccccccccattgaaatggatacctttccataccttataaagctgtccgtcaatatttatttccaaggtgcctagatttaattttgttattaaattgaaatgccttatcttgtgttcaagcacagcactgattttaacaacctgcatttaatgtgaagtaaccgaagtaggatactgtaactgtgtaaggattttgtttgtaatcttgtaacattgaaccattgaaatgttcaagttctttgcttttgagcaaaacgtcaattaaaactaaagtaaaatcctatatattgttttactccaccagttatttcccaagtgtttgaaatgcaggtgtgtgtctgaatttggatctaatccacttaaagaagctctgtggaggggaaattccttttttgagg

SEQ ID NO: 125934 - DNA, 1173 bp, Homo sapiens; identical to SEQ ID NO: 115866

SEQ ID NO: 125935 - DNA, 558 bp, Homo sapiens
atgtcagacgcagccgtagacaccagctccgaaatcaccaccaaggacttaaagaagaaggaagctgtggaggaagcggaaaatggaagagacacccctgctaatgggaaggctaatgaggaaaatggggagcaggaagctgacaatgaagtagatgaagaagaggaagaaggtggggaggaagacgaggaggaagaagaaggcgatggtgaggaagaggatggtgatgaagacgaggaagctgagtccgctaggggcaagctctgtgtgattgattggaagacatcagagaaaccaaagccttttattcaaagtacatttgacaacccactgcaagttgtggcatacatgggtgccatgaaccatgataccaactacagctttcaggttcaatgtggcttaattgtggtggcctacaaagatggatcacctgcccacccacatttcatggatgcagagctctgttcccagtactggaccaagtggcttcttcgactagaagaatatacggaaaagaaaaagaaccagaatattcagaaaccagaatattcagaatag

SEQ ID NO: 125936 - DNA, 1470 bp, Homo sapiens
ttaggttactatatccttgtaatatattttaaagtcaggtaatgtgatgcctccaggtttgttcattttgtttagagttgctttggctatttggacttttttgtagatatgcggcattatttctgagggctctattctgttccattggtctatatctctgttttggtaccagtaccatgctgttttggttactgtagccttgtagtatagtttgaagtcaggtagcgtgatgcctccagctttgttcttttggcttaggattgacttggcaatgcgggctctcttttggttccatatgaactttaaagtagttgtttccaattctgtgaagaaagtcattggtagcttgatggggatggcattgaatctataaattaccttgggcagtatggccattttcacgatattgattattcctacccatgagcatggaatgttcttccatttgtttgtatcctcttttatttcattgagcagtggtttgtagttctccttgaagaggtccttcacgccccttgtaagttggattcctaggtattttattctctttgaagcaattgtgaatgggagttcactcgtgatttggctctctgtttgtctgttattggtgtataagaatgcttgtgatttttgcacattgattttgtatcctgacactttgctgaagttgcttatcagcttaaggagattttgggctgagacgatggggttttctagatatacaatcatgtcatctgcaaacagggacaatttgacttcctcttttcctacttgaataccctttatttccttctcttgcctgattgccctggccagaacttccaacactttggtctttgatgatggtgatgtacagatggggttttggtgtggatgtcctttctgtttgttagttttccttctaacagtcaggaccctcagctgcaggtctgttggagtttgctggaggtccactccagaccctgtttgccatttccactcaatattgtactggaggtcatagccagaggaataaaacaagaagaaattaaaagcgtacaggcttactcttcttttctgcccgtttagcatagcaatctgttgtacgttttgtttactgctgtattgccggagcctgctaccatgcttggaacacagcaggctctcaataaaaaatgtgttgaataaagaaataatactgaggctgagatgaggatcttcggggactagctggccaactggagtaactgggtacatttgaagatggaaagaagaaccttccagctcacttgactctgggtcaggtgagtctctggtgtaattgagaccaattatcaacatgcagttttttcttgagctatcagcaacagaatctccttgcccaagccagacattgcgagtcacctgcatgatcttggtcatgtatcccattagaatgtcacagttgttaagcgattccagcctttgggctttgctgagttcctgcaccat

SEQ ID NO: 125937 - DNA, 2835 bp, Homo sapiens; identical to SEQ ID NO: 121594

SEQ ID NO: 125938 - DNA, 2991 bp, Homo sapiens
ttagtaccagtaccatgctgttttggttactgtagccttgtagtatagtttgaagtcaggtagcgtgatgcctccagctttgttcttttggcttaggattgtcttggcaatgctggctcttttttggttccatatgaactttaaagtagttttttccaattctgtgaagaaagtcattggtagcttgatggggatggcattgaatctataaattaccttgggcaatatggccattttcacaacattgattcttcctacccatgagcatggaatgttcttccatttgtttgtgtcctcttttatttcattgatcagtggtttgtagttctccttgaagaggtccttcacatcccttgtaagttggattcctaggtattttattctctttgaagcaattgtgaatgggagttcactcatgatttggctctctgtttgtctgttattggtgtataggaatgcttgtgatttttgcacactgactttgtatcctgagactttgctgaagttgcttatcaacttaaggagattttgggctgagatgatgggggtttctaaatatacaatcatgtcatctgcaaacagggacaatttgacttcctcttttcctaatggaataccctttatttctttctcctgcctgattgccctggccagaacttccaacactgtcttgtgccaattttcaaagggaatgcttccagtttttgcccagtcagtatgatattggctgtgggtgagatatgtcccatcaatacctagtttattgagagtttttagcatgaagggctgttgaattttgttgaaggccttttctgcatctattgagataatcatgtggtttttgtctttggttctctggtagaattcagctgtgaatccatctggtcctggactttttttggttggtaggctattaattattgcctcaaattcagagcctgttattggtctattcagggattcaacttcttcctggtttagtattgggagggtatatgtgtccaggaatttatccatttcttctagattttctagtttatttgcgtaccagtaccaaataatataaacagtagtttgtatttctgtgggatcggtggtgatatcacctttatcattttttattgtgtctatttgattcttctctcttttcttctttattagtcttgctagtgttctatcaattttgttgatcttttcaaaaaaccagctcctggattcattgattttttgaagggttttttgtgtctctatctccttcagttctgctctgatcttagttgtttcttgccttctgctagcttttgaatgtgtttgctcttgcttctctagttctgttaattgtgatattagggtgtcaattttagatctttgctgctttctcttgtgggcatttagtgccataaatttcccactatacattgctttaaatgtgtcccagagattctggtatgttgtgtctttgttctcattggtttcaaagaacatctttatttctgccttcatttctttatatacccagtagtcattcaggagcagattgttaagtttccatgtagttgagcggttttgagtgagtttcttaatcctgagttctaatttgattgcactatggtctgagagacagtttgttataatttctgttcttttacatttgctgaggagtgctttacttccaactatgtggtcaattttagaataagtgggatgtggtgctgagaagaatgtatattctgttgatttggggtggagagttctttggtctttgatgatggtgacatacagatggggttttggtggatgtcctttctgtttgttagttttccttctaatagtcaggaccctcaactgcaggtctgttggagtttgctggaggtccactccagaccctgtttgcctgggtgtcaccagtggaggtgtttggcctgctgttaccaactcccaaagtaatgtgaccagggacgcttcactcgtttcttttctactgccttgactcaactcagtgtcatctggctgcttgaagtcttggtttacaataacttttgttattgttgttattctctggctgtcattttgaggctttttccccccacagattttaattgaatgttccagaggggacatatttctcagtggtgggtagtagttggggcattgacagtgttcacgtctgtccttgacactgaccccatgagagataacaagagaagtgggtctgagatcctgcctttctgcagggagcatggaacaagctttacatataatcatgcccattctcctctgtcctgctccccttcctgtctgttctccggtctggctctctttagcccagaaaacaacagtggtttcctctgcatgacactgcctgcatcgtttactgctggaaatcgtcttttctcttctgctggtcagccttggtggattcagcaaggattcaaagcacacgccaaagctaggagactcatacttcttgcttttcaccactattgctgccgcccctttcttgctgtggaacttaagccttctcctgtctctacaccaaccttcctctttgcttgactgttgcctccgtgctctgtccctggggctatcctccacgagagctttggggaagcaatcacctggttggatgctgaaaagtgatacatgccagcccttcctgtcaatggcgatgccgtggctggaaacatgcgcttccactgagcttggctccaggttgccaagagcctgcacctgacaagcaaccaggggggaatccttccgatacacagcaagagcaaaagagagagtctgcattgaaaaccggccctggcccagctggtccattgagaataagaataagaacctggtaaactgcttcttccttccatcaaatgtgtccatcttagctttgggggcctgaatgacaaaagatgggcattgccttacaaacaaaggaacttttcgtttctgtcttgtgcttggactgtgaggctgctctgagtggggaggcat

SEQ ID NO: 125939 - DNA, 490 bp, Homo sapiens
atgatcaaaaccctcagcaaaataggcatagaagggacataccttaaggtaataaaagccatctatgacaaacccacagccaacattatactgaatggggaaaagttgaaagcattcctcctgagaactggaacaacacaaggatgcccattttcaccatttctattcaacacattatcagaagttctagcgagagcaatcaaacaagagaaagaaatcaagggcatccaaatgggtaaagaggaagtcaaactgttgctttttgctgaagatatgaccgtatacctagaaaaccctaaagactcatccaaaaaactcctagaactgcctctgctgctgatacccaggcaaacagggtctggagtggacctccagcaagctccaacagacctgcagctgagggtcctgactgttagaaggaaaactaacaaacagaaaggacatccacagcaaaaccccatctgtacgtcaccatcatcaaagaccaaag

SEQ ID NO: 125940 - DNA, 683 bp, Homo sapiens
ccaatatcatactgaatgggcaaaagctggaagcattccctttgaaaactggcacaagacaaagatgccctctctcaccactcctattcaacatggtattggaagttctggccaggtcaatcaggcaagagaaagaaataaaagtattcaaataggaagagaggaagccaaattgtctctctttgcagatgacatgattgtatatttagaaaaccccatcgtctcagcccaaaatctccttaagctgataagcaacttctgcaaagtctcaggatacaaaatcaatgtgcaaaaatcacaagtgttcctatacaccaataacagacaaacagagagccaaatcatgagtgaactcctattcacaattgctactaagagaataaaatacctaggaatccaacttacaagggatgtgaaggacctcttcaaggagaactacaaactgctgctcaaggaaataagagaggacacaaacatatggaaaaacattccaggctcatggataggaagaatcaatatccctccgctgctgatacccaggcaaacagggtctggagtggacctccagcaaactccaacagacctgcagctgagggtcctgactgctacaaggaaaactaaccaacagaaaggacatccacaccaaaaccccatctgtacatcaccatcatcaaagaccaaag

SEQ ID NO: 125941 - DNA, 707 bp, Homo sapiens
ttagttgactgtcagctgtccttgctccaggatgctgtttttgacaacggatgttttattgcctttgatgttcattaagaagcttggcgcaaatgttgcctccccctcctcgaagaagcctctgtttgtcataagacttgtgataaccacattgttgcctttggcttgcggcactttaccaacttcatccgtttcacgtacaacattttttagaaccatgcttccccaggcatcccgaatttgctcctccatccacggggactgagagccattactattgctgtatttggtaagcaaaatacgtacatcaggctcgaaccctttaagatcaacgttcttgagcagatcacgaagcatatcgaaaaacctgcacttgcgtccgtccacggtctcctcctcaaagccttctccgaccttgaagttgatctcagtggtgcgcaccgtggtggatgtcttgatgtagaactgatccccgtcctggcggatctccacgtgcggcttggacgcagccgctacggccactttcctcagcatggcgttcacacctttggtctttgatggtggtgacgtacagatggggttttggtgtggatgtcctttctgtttgttagttttccttctaacagacaggaccctcagctgcaggtctgttggagtttgctggaggtccactccagaccctgtttgctgggtatcaccagcggagg

SEQ ID NO: 125942 - DNA, 798 bp, Homo sapiens; identical to SEQ ID NO: 116519

SEQ ID NO: 125943 - DNA, 441 bp, Homo sapiens
atgaagcttccagaggaaggatcaggcagcagcatttgccgttctgcaatatttgctgttctgcagcctccactggtgatacccaggcaaacagggtctggagtggacctccagcaaactccaacagacctgcagctgaaggtcttgactgttagaaggaaaactaacaaacagaaaggacatccacaccaaaacccgatctgtacatcaccatcatcaaagaccaaagtctcttgtgagtttgtcgtccccgttcacagcaattcgcgtctagaggccctctttaaggggaccatttggtgggaaaccagagagtattctgggccaccaagggacgttggaaaacaccaggaatatgacacaccaagccacggggagtactgccagactaccactgatgttctgttaaggcccaaggactctcaagtcagcttgtggtga

SEQ ID NO: 125944 - DNA, 852 bp, Homo sapiens
atgaagcttccagaggaaggatcaggcagcagcatttgccgttctgcaatatttgctgttctgcagcctccactggtgatacccaggcaaacagggtctggagtggacctccagcaaactccaacagacctgcagctgaaggtcttgactgttagaaggaaaactaacaaacagaaaggacatccacaccaaaacccgatctgtacatcaccatcatcaaagaccaaagactcatcccgggactgttcacctctccctggatttcagcaagaatctaaggctagggagatttctccccacttagagcagaaaaagggggcctgtttggaagatactcttctggattggaatctggtctgggatcttggtttgggatgccttttgcgtgttttcactttgagtctccctctgttaccgagaaagctcactcttttacccaaacgtgtcaagcctttgaatgcattttgtcttacaatttctgacggaattcttggggatcatggggacacctcttctactccctctttagaagtatctcttccttatgcgaaggcaaatgaggagcaaagtcaagtcttacatggcggcaggcaagagcgcttgtgcagggaactcccatttataaaaccatcagaccttgtgagagtgattcactactatgagaacattgtgggggaaaccactcccgtattcaatgatctccacttggccctacccttgacacatggggattattacaattcaagactactactgggtaataaaaagaaacaagctattgatacatataacaacatggatgaatctccagagaattatgatgaatacaaaaagtcaatcctgaaagattag

SEQ ID NO: 125945 - DNA, 1213 bp, Homo sapiens
cttaacctctcccactcgaggtttccatgccaccccaatcctgctcgaagcagccctgaaaaacatcacccattatctctccataccaccccccaaaatttttgccaccccaacacttcgccactgtcttgttttgtttttcttattaatacaagaagacagtaatgtcaggcctctgagcctaagcctgcagtgttttgaagttggagagggtcacaggaaaaggaacgcaggaggcttccaggagcgaaaggtagacctgggactgagagctagcaaggaaacaggaacgacacacctacaacttgtattaacagtcagtctggagtatacacaaggaaagctaagtggaaagaagaaaaaggagaaagctagactcttccttgcccctaggtattggaagaagaaaggaaagagggagaagagtaaaaaatccagggtggaacacaacaggtcccagcgagcagagtttgatcctgctggcgtcaaaagggttctagcgctcgtgcactccagatcctgccttgtttgcttgcattccttcctgcaaggagttgagactgccaccctccttgccaacttgagtgtccctgtggtggtcaagaggtttctcatgcccatctgcctgaggccagtggcaagagcaggttgcttcttgctagtccaactcaccggtttccctggagccatctctaactgggaggcacctcccagtaagggtcaactgacacctcatactgccgggtgtccctctgagatgaagcttccagaggaaggatcactcagcgatatttgctgttctgcaatatttgctgttctgcagcctctgctggtgatacccagggaaacagggtctggagtggacctccagcaaactccaacagacctgcagctgagacaaacagagagccaaatcatgagtgaactcccattcacagttgcttcaaagagaataaaatacctaggaatccaacttacaaaggatgtgaaggacctcttcaaggagatctacaaaccactgctcagcgaaataaaggaggacacaaacaaatggaagagcattccatgctcatggttaggaagaatcaatatcgtgaaaatggccatactgcccaaggtaacctatatattcaatgccatccacatcaagctaccaatgacagaattggaaaaaactaaagttcatatggaaccggaaaagagcctgcattga

SEQ ID NO: 125946 - DNA, 1425 bp, Homo sapiens
tcatcttggatacaagaggcatgaaccgtcagtgcggaaatccctaagattatttatggaagtgggacctactgctatttctgttcccatctccagaaggtttaagtcagataccttctggaacagtcttttctctgcttcttgtatacttgtaattttggcttgccaagcttcacatgcacaactttccaaaaggtgtttatgacttagatcaaccattgatttgagaagaattagctgtgacaagatataaagacagcacccagatctgtaccataaggtggaacacagatgccccttaatatcttcatgaataccgcttcggctacacccaaacatgcttatatgtggcctacaagctgtgcttctgcttccatttctcacaactgatttctggttttctgggtacttgctcatgttagatgccacacagcagcaaagttctagctgcaggtcgactctaaagatcccagcaaatattaacctgccagccttttgacccccagattgactaaatggattcaactcagagaaatgaggcaatttcttctgagaatgcaatttagggacgtagccagtacaatcctcccagtaagggctgactgatacctcatacaggtgggtgcccctctgggatgaagcttccagaggaaggatcaggcagcaatatttgctgttctgcaatatttgctgttctgcagcctctgctgctgatacccaggcaaacagggtctggagtggacctccagcaaactccaacagacctgcagctgagggacctgacttttctcctccagaggattccagctccttgctagcaatggaataaagctcaatggataatgattttgatgagttgatagaagtaggcttcagaaggtcagtaataacaaacttgtccaagctaaaggaggatgttcgaacccattgcaaggaagctaaaaactggacaatcccaaggatgcgaattctgtcagcaacctgagagaacttggaagtggatctttccacagccccacaggtgaggggcctttgggccaaggcactgttgagagtcgcacctctatcaatttggtctggatttattaaactctgcagggtccgggataggaaagaatgaagtccaggagcagaaacgggcagaagtgggagcccgtgcagctccagagaaggaactgcctgaagcactgtcttggttcctgaaagtactttggtaatggccacagcgtggtccagggagacaaagagcccatgagccaggctgacggctgtgggaatggagagagggacacacatagcaaaaggggttaggagtatctttttctcagagatactctcttccccactatgagaaaaatcgcatttgctggcctctacttccacttcactcactgctaaccaagtgtgtccattatgtttgctcat

SEQ ID NO: 125947 - DNA, 894 bp, Homo sapiens
atgaagcttccagaggaaggatcaggcagcaacatctgccgttcttcaatatttgctgttctgcagcctccgctggtgatacccaggaaaacagggtctggagtggacctccagcaaactccaacagacctacagctgagggtcctgactattacaaggaaaactaacaaacagaaaggacatccacaccaaaaccccatctgtacgtcaccatcgtcaaagaccaaagaaatgcaaaatgctctggacagtctcagcaacagaattgaacaagtagaagaaagaatttcagagtttaaagacaaggtcttcaaattaatcctattcaataaagacaaagacaaaagaatgagaaaatatgaacaaagcttccaagaagtctgggattatgtcaagcaaccaaacctaagaataattggtgttgccaaggaagaagagaaatctaaaagcttggaaaacatatttgggggaataatcgaggaaaacttccccggcctttctagagacctagacatccaaatacaagaagcacaaagaacacccgggaaattcattgcaaaaagatcttcacctaggcacattgtcatcaggttttccaaagttaagacgacggaaagaatcttaagagctgtgagacagaagcaccaggtaacctacaaaggaaaacttaacagattaacagtcgatttctcagaagaaaccctacaagctagaaggggggcctgcaggccactaacaggagtccctgctctgtctcatacttacactgagaggcatctaacaaacacaagagccatccacctaaagtggtaccaagacagggctaaaatcaagccttcatctgcctgcaaagttgaacacagcaaatcacaacatctccctgaattcagatag

SEQ ID NO: 125948 - DNA, 1133 bp, Homo sapiens
ggcagtagaaaagaaacgagtgaagcgtccctggtcacattactttgggagttggtaacagcaggccaaacacctccactggtgacacccaggcaaacagggtctggagtggacctccagcaaactccaacagacctgcagttgagggtcctgactattagaaggaaaactaacaaacagaaaggacatccaccaaaaccccatctgtatgtcaccatcatcaaagaccaaagaactctccaccccaaatcaacagaatatacattcttctcagcaccacatcccacttattctaaaattgaccacatagttggaagtaaagcactcctcagcaaatgtaaaagaacagaaattataacaaactgtctctcagaccatagtgcaatcaaattagaactcaggattaagaaactcactcaaaaccgctcaactacatggaaacttaacaatctgctcctgaatgactactgggtatataaagaaatgaaggcagaaataaagatgttctttgaaaccaatgagaacaaagacacaacataccagaatctctgggacacatttaaagcaatgtatagtgggaaatttatggcactaaatgcccacaagagaaagcagcaaagatctaaaattgacaccctaatatcacaattaacagaactagagaagcaagagcaaacacattcaaaagctagcagaaggcaagaaacaactaagatcagagcagaactgaaggagatagagacacaaaaaacccttcaaaaaatcaatgaatccaggagctggttttttgaaaagatcaacaaaattgatagaacactagcaagactaataaagaagaaaagagagaagaatcaaatagacacaataaaaaatgataaaggtgatatcaccaccgatcccacagaaatacaaactactgtttatattatttggtactggtacgcaaataaactagaaaatctagaagaaatggataaattcctggacacatataccctcccaatactaaaccaggaagaagttgaatccctgaatagaccaataacaggctctgaatttgaggcaataattaatagcctaccaaccaaaaaaagtccaggaccagatggattcacagctgaattctaccagag

SEQ ID NO: 125949 - DNA, 669 bp, Homo sapiens
atgccagtgacacttggtactagtatgaggtcagattccctaggagagccccagacagaggttgagcctccgctggtgatacccaggaaaacagggtctggagtggacctccagcaaactccaacagacctgcagctgagggtcctgactgttagaaggaaaactaacaaacaaaaaggacatccacatcaaaaccccatctgtacgtcaccatcatcaaagaccaaagcccaaaatctccttaagctgataagcaacttcagcaaagtctcaggatacaaaatcaatgtgcaaaaatcacaagcattcttatacaacaataacagacaaacagagagccaaatcatgagtgaactcccattcacaattgcttcaaagagagtaaaatacctaggaatccaacttacaagagatgttaaggacctcttcaaggagaactgcaaaccactgctcaaggaaataaaagaggacacaaacaaatggaagaacattccatactcatggataggaagaatcaatatcgtgaaaatggccatacagcccaaggtaatttatagattcaatgctatccccatcaagctacccataactttcttcacagagttggaaaaaactactttaaagttcatatggaaccaaaaagagcccgcattcccaagacaatcctaa

SEQ ID NO: 125950 - DNA, 1257 bp, Homo sapiens
atgccctattcccagtacaaatttactgtattaatctgttttcatgatgctgataaagacatatctgagactgggaagaaaaagaagtttaattggacttacaatttcacatggctgatgaggcatcagaatcatggtgcgaggcaaaacgcacttcttacatggcagcagcaagagaaaaatgaggaagaagcaaaagcagaaacccctgataaacccatcagatcttttatttccatgacaaacatgaagatccaagggactctcttctacaccaggatctattttgtttattatactgcggtcattcagtgtaattcctggtacatggtccccgggcggggcgtccagaaatcccgcagggatgtggacgggctgcgggaagcaaggagctgcttaagcggcgttcgggactcccggctctcggcccttggaggactgggcggacccagtgcttgggcttttgggggatcggggaggatgcctagcgcagggattcgagcgaaaaggatgcagaatcaggggtggcagccaagggacgtccccgacccgcagcccttcccgcttccgaagagaacaccttgctcacccgaccccagaggctgggcaggagcctgcgatgacggctctgcgggacccagggccaggggctgggctagaaaatggctgccaccccagcagcatgctgttcaggtctctgctgtcctagggaacacccagcagaggagcgacggctctgaacgcggcatgtatttgggtcacttttggcggggagaagggtcccggggaagcaatgggagcctcaggcgagaggggatttctttttgtctgcgcctgacttcaaagtcagtaatcggcccctgtcagcggcgtgacgagaaggattttggctgtttgttagggcgagtcgcggccgcgcacctcggcggacgctccgcagccctcggggcgacggaggcaaagctgaagcaggctcttgcggggatggggtttcctaattccccatctgagcctaagaccaagcgcaacccggaaccctggtttcggttttccagcttcagccaccgtccgaggcctttgcccctcgcactttgccctcgcactcgccacgtgcccctttccagcctaacccttcaggtttgcttcagcatatcaaagccagtgggaaaagcacgcaaattaaggaaaaccacgcgtgagcgcggcttttggggtgagactccaagaccaagggtggaaagcacccttcgattttga

SEQ ID NO: 125951 - DNA, 1068 bp, Homo sapiens
atgggcaaatattatacgcaaggcgacaaggtgctgatgccgctggcgattcaggttcatcatgccgtttgtgatggcttccatgtcggcagaatgcttaatgaattacaacagtactgcgatgagtggcagagggataaattggaagaaatcttgcggggattaactccaaggaaaaatgatattggagatgcaatggttttctgtcttaataatgctgaagctgctgaagaaatagtggattgcattactgagtcgttgtccatcttaaagacaccccttcctaaaaagatgaatgaagaaatgctgtgccaagaatttggaagatttggaccgttagccagtgtgaaaatcatgtggcctagaactgatgaagaaagagccagagagagaaattgcggctttgtggcctttatgaatagaagagatgctgaaagagctttaaaaaatttgaatgccactgccttcagacctgctctgtcacatttcccttctctgcccatggacacaacttcacaaatcccaaaacattccagtcaccgtcagttcaacaaacaagctcattctgatcatcaagactcactttcaggcccagtccagtctgaatcaaaatatccatcccatggatccatcccatgggattcaatactcagccttctcaccctcaacacccaacccatcccacccagccttgccctgacccacatggagatggagagtggtctgcacttccactgcccctttacagcatctccaccttcagccgtccctcctccagaattggaaaaaactactttaaagttcatatggaaccaaaaaagagcccgcatcgccaattcaatcctaagccaaaagaacaaagctggaggcatcacactacctgacttcaaactatactacaaggctacagtaaccaaaacagcatggactggaagtcctacagcaattaggcaagctagaacaactaggcaagaaaaagaaatgaaaggcattcaaattggaaaggaagaagtaaaattatctctgttcacagatgacgtaaacttacaggtgagagaaaataagtaa

SEQ ID NO: 125952 - DNA, 902 bp, Homo sapiens
aattgaagaacacagtatcatacagtgggaaaaggaaagggcccgattcgttgtctgatggacctgcttgcaaaaggccagctctgttgcattcccaatttttgacaccacctcaaacaccaacgcccggggagagcatggaagatgttcatctcaatgaacccaaacaggagagcagtgctgatctgcttcagaacattatcaacattaagaatgaatgcagccccgtttccctgaacacagttcaagttagctggctgaaccccgtggtggtccctcagagctcccccgcagagcagtgtcaggacttccatggagggcaggtcttttctccacctcagaaatgccaaccattccaagtcaggggctcccaacaaatgatagaccaggcttccctgtaccagtattctccacagaaccagcatgtagagcagcagccacactacacccacaaaccaactctggaatacagtccttttcccatacctccccagtcccccgcttatgaaccaaacctctttgatggtccagaatcacagttttgcccaaaccaaagcttagtttcccttcttggtgatcaaagggaatctgagaatattgctaatcccatgcagacttcctccagtggtcaagcagcaaaatgatgctcacttgcacagctttaacatgaagcccacaagcgcctgtgaaggcatggtggggcacgagatggcctctgactcttcaaacacttcactgccattctcaaacatgggaaatccaatgaacaccacacagttagggaaatcactttttcagtggcaggtggagcaggaagaaagcaaattggcagatatttcccaagaccagtttctttcaaaggatgcagatggtgacacgttccttcatattgctgttgccca

SEQ ID NO: 125953 - DNA, 3089 bp, Homo sapiens
ggcggacaaaacgccaggcggatctcagaaggccagttcaaagacgagatcatcagatgttcattcatctggatcttcagatgcacatatggatgcatctggaccctcagatagtgatatgccaagtcggacacgacctaagagcccaagaaaacataattataggaatgaaagtgcccgtgaaagcctttgtgattctcctcatcagaatctctcaagacctcttctggaaaacaaacttaaagcattcagtattggaaaaatgagtacagctaagcgaactttaagtaaaaaggaacaggaagaattaaagaaaaaggaggatgaaaaggcagctgctgagatttatgaggagtttcttgctgcttttgaaggaagtgatggtaataaagtgaaaacatttgtgcgagggggtgttgttaatgcagctaaagaagaacatgaaacagatgaaaaaagaggtaaaatctataagccatcttcaagatttgcagatcaaaaaaatcctccaaatcagtcttccaatgaaagaccaccatctcttcttgtgatagaaaccaaaaaacctccacttaaaaaaggagagaaagaaaagaaaaaaagcaatttggaactcttcaaagaagaattaaagcaaattcaagaggaacgtgatgagagacataaaacaaaaggcagattaagtcgatttgaacctcctcagtcagattctgatggtcagcgtcgttctatggacgcgccttcaagaagaaatagatcatctggtgttcttgatgattacgcacctggctcacatgatgtaggagatccaagcactactaatttataccttggaaacattaatccacagatgaatgaagaaatgctgtgccaagaatttggaagatttggaccgttagccagtgtgaaaatcatgtggcctagaactgatgaagaaagagccagagagagaaattgcggctttgtggcctttatgaatagaagagatgctgaaagagctttaaaaaatttgaatggaaaaatgattatgtcttttgaaatgaagttaggttggggtaaagctgtacctattcctccacatccaatatacattccgccttctatgatggaacatacgcttcccccacctccatccggactgccttttaatgcgcagcctagagagcggttaaaaaaccctaatgctcctatgttaccgccacctaaaaacaaagaggattttgagaagactctgtcgcaagccatagtcaaagtggttatcccaacagaaaggaatttgctcgccctgatacatcgaatgatagagtttgttgtacgtgaagggccaatgtttgaagctatgattatgaacagagaaatcaacaatcctatgttcaggttcttatttgaaaaccagacaccagcccatgtttactataggtggaagctttattctattctgcagggagattctccaactaaatggcggacggaagattttcgtatgttcaaaaatggatctttttggaggccaccaccattaaatccgtacttgcatggaatgtcagaagagcaagaaacagaagcttttgtagaggaacctagtaaaaagggagcacttaaggaagaacagagggataaattggaagaaatcttgcggggattaactccaaggaaaaatgatattggagatgcaatggttttctgtcttaataatgctgaagctgctgaagaaatagtggattgcattactgagtcgttgtccatcttaaagacaccccttcctaaaaagattgccagattatatttggtttctgatgttttgtacaactcttcaaccaaaggtggttaatgcttcatattatagaaaattttttgaaacaaagttatgtcagatattttcagacctcaatgccacctatcgtacaattcaaggccatttacaatctgaaaactttaagcaacgggtaatgacttgcttcagagcatgggaagattgggcaatttatccagaaccatttttgatcaaactacaaaatattttcttaggacttgtaaatattattgaagaaaaggaaacagaggatgttccagatgaccttgatggtgcccccatcgaggaagagcttgatggtgcacctctggaagatgtagatggaattcctattgatgctactcccatcgatgatcttgatggagtccctataaaaagtcttgatgatgatcttgatggagtgcctttggatgcaactgaagactcaaaaaagaatgagcctatatttaaagttgccccatcaaaatgggaagctgtggatgaatctgaattggaagcacaggctgttacaacttctaaatgggaattatttgaccagcatgaagaatcagaagaagaagaaaatcaaaatcaagaagaagaaagtgaagatgaagaagatactcaaagttccaaatctgaagaacatcatttgtactctaatccaatcaaagaagaaatgactgagtctaagttctctaagtactctgaaatgagtgaggaaaaacgagccaaacttcgtgaaattgagctcaaagttatgaagtttcaggatgaattggaatctgggaaaagacctaaaaaaccaggccagagttttcaggagcaagtagaacactacagagataaacttcttcaacgagagaaagagaaagagttagaaagagaacgagaaagagacaagaaagataaagaaaaattggaatctcgctccaaagacaagaaggaaaaagatgagtgtactccgacaaggaaggaaaggaagaggcgacacagtacatcccccagcccatctcgcagtagcagtggtagacgagtgaaatccccatcaccaaaatcggagcgatcagagcgttcagaaagatctcataaagagagctcacggtccaggtcatctcacaaagattctcctagagatgttagcaaaaaagccaaaagatcaccatctggttcaaggacacctaaaaggtctaggcgatcacggtctagatctcctaaaaaatcaggaaagaagtccagatcccagtccagatctccacacaggtctcataaaaagtcaaagaaaaacaaacactga

SEQ ID NO: 125954 - DNA, 823 bp, Homo sapiens
atgagaacaccaaagagcagcatcaaacccagtctaggggaggaaaaggaaaattatagaggttctttgaaagagacagcaccttccttgcaaaaagaatgggcagagcagtcaagcaaaagccaagagacagtgggagtgaagggaataaccagacacttccaggtctcaacactgttggaaagaagagaggataggaagagcaaagcagccaccgctgctgatacccaggcaaacagtgtctggagtggacctccagcaaactccaacagacctgcagctgagtgtcctgactgttagaaggaaaactaacaaacagaaaggacatccacaccaaaaacccatctgtacgtcaccatcatcaaagaccaaagcaaggcaggccaacattcaaattcaggaaatacagagaatgccacaaagatactcctcaagaagagcaactccaagatgcataattgtcagattcaccaaagttgaaatgaaggaaaaaatgttaagggcagccagagagaaaggtcaggttacccacaaagggaaccccatcagactaacagcagatctcttggtaaaaactctacaagccagaagagagtgggggccaatattcaacattctcaaagaaaagaattttcaacccagaatttcatatccagccaaactaagcttcataagtgaaggagaaataaaatcctttacagacaagcaaatgctgagagatttcggcaccaccaggcctgccctaaaagagctcctgaaggaagcactaaacatggaaaggaacaaccagtaccagccactgcaaaaacatgtcagattgtaa

SEQ ID NO: 125955 - DNA, 2590 bp, Homo sapiens
atgcaaaatgtcccagaggggcttggacttcctattacgtttattaatcatcttgatgaaaatggaaagtctacattgattaaattcactaatgatcctaaactgagcagaggagtaaattccagaaaggatggatttataaggggcagactgacacctcacacagccaggtacccctctgagacaaaacttccagaggaacgatcaggcagcaacatttgctgttcagcaatatttgctgttttgcagcctccgctgctgaaacccaggcaaacagggtctggagtggacctccagccaaactccagcagacctgcagctgagggtcctgactgttagaaggaacactaacaaacagaaaggacatccacaccaaaaccccatctgtacgtcaccatcatcaaagaccaaagaagttgaaaaccttgaaaaaaggttagacaaatggctaactagactaaccaatgtagagaagtccttaaatgacctgatggagctgaaaaccatggcacgagaactacatgacgaaggcacaagcttcagtagccaattcgatcagctggaagaaagggtacctgtgatggaagatcaaatgaatgaaatgaagcaagaagagaagtttagagaaaaaagaatgaaaagaaacgaacaaagcctccaagaaataagggactatgtgaaaagaccaaatctacgtctgattggtgtacctgaaagtgacggggagaatggaaccaagttggaaaacactctgcaggatattatccaggagaacttccccagcctagcaaggcaggccaacattcaaattcaggaaatacagagaatgccacaaagatactcctcaaggagagcaactccaagacacataattgtcagattcaccaaagttaaaatgaaggaaaaaatattaagggcagccagagagaaagaaatacagactaccatcagcgaatactataaacatctctacgcaaataaactagaaaatctagaagaaatgggtaaattactggacacatacaccctcccaagacaaaaccaggaagaagttgaatccctgaatagaccaatagcaggctctgaaattgaggcaataattaatagcctgccaaccaaaaaaagtccaggaccagacggattcacagccaaattctaccagaggcacaaagaggagctggtaccattccttctgaaacaattccaatcaatggaaaaagaggtaatcctcccaaactcattttatgaagccagcatcatcctgataccaaagcctggcagagacacaacagaaaaagagaattttacaccgatatccctgatgatcattgatgcaaaaatcctcaataaaatactggcaaaccgaatccagcagcacatcaaaaagcttatccaccaagatcaagttggcttcatctctgggatgcaaggctggttcaacgaacacaaatcagtaaacgtaattcatcatataaacagaaccaaagacagaaaccacatgattatctcagtagatgcagaaaaggccttcaacaaaattcagcagcccttcatgctaaaaactctcaataaactaggaatccaacttacaagggatgtgaaggaccccttcaaggagaactacaaaccactgctcaatgaaataaaagaggatacaaacaaatggaagaacattccatactcatggataggaagaatcaatatcgtggaaatagccatactgcccaaggtttccctagaaagagaacgacaacatgatcaaacacatgttcagagccaacttgaaaaattggatcttcttgaacaggagtataacaaacttaccacaatgcaggcccttgcagaaaaaaaaatgcaagagttggaagcaaaactccatgaagaagaacaggaaaggaaacgcatgcaagctaaggcagctgagcatccacgtttgtgtttgtatttggcagccatattttctgctcttaagaatcttcaagataagattcgacgcttggaacttgagaggattcaggcagaagaaagtgtgaaaaccttgtctagagaaacaattgaatataagaaagtactggatgaacagatacaagaaagggagaattcaaagaatgaggaatcaaagcacaatcaagaactgacatctcagttgttagctgcagaaaataaatgcaatctattagaaaaacaattggaatacatgcgaaatatgataaagcatgccgaaatggagaggacatctgtcttagagaaacaaactccgctgctgatacccaggcaaagagggtctagagtggacctccagcaaactccaacagacctgcagctgagggtcctgactgttagaaggaaaactaacaaacagaaaggacatccacaccaaaaccccatctgtatgtcaccatcatcaaagaccaaagaggaacgcagctcctcaccaacaacggaacgaagctggacagagaatgactttgacgagttgagagaagaaggcttcagacgatcaaactactctgagctaaaggaggaacttcaaacccatggcaaagaagttaaaaaccttgaaaaaaaaattagacgaatggctaactag

SEQ ID NO: 125956 - DNA, 2584 bp, Homo sapiens
atgaagcttccagaggaaggagcaggcagcaacatttgctgttctgcaatttttgctgttttgcagcctcctctggtgatacccaggcaaacagtgtctggagtggacctccagcaaactccaacagacctgcagctgagggtcctgactcttagaaggaaaactagcaagcagaaaggacatacacaccaaaaccccatctgtatgtcaccatcatcaaggaccaaaggtagacagagggataaattggaagaaatcttgcggggattaactccaaggaaaaatgatattggagatgcaatggttttctgtcttaataatgctgaagctgctgaagaaatagtggattgcattactgagtcgttgtccatcttaaagacaccccttcctaaaaaggcgtgcgcgccccgagtagtcagcggtgcggggccggcgggtacctggctggcgctcggcgcgggcgccgcctttcgaccgggactccacggcgccgcgggaggacacccgccaggcagaggagaagtcggaggagtccggacccggcgaacccggcccccgagggccccagaccgagcaactggcgtctcaagccccccggggccggcgtccgccggcaaccccccaaaaagttatagggtacatgtgcacaaggtgcaggtttgctacataggtatacatgtgccatgttggtttgctgcagccgtcaaattgtcatgtacattagatatttgtcctaatgctatggtgtcggcagcgcgccaggtcccaacaggagccggcacccccgtgaggagacaggaaggcagcattgaggtttatgaagatgctggctcccattacctctgcctgctgaaagcccggacccagggacagtgggacatacagctgcactgcttccaacgcccaaggccagctgtcctgtagctggaccctccaagtggaaacgcaccctagtttcctaattccccatctgagcctaagaccaagcgcaacccggaaccctgggtttcggttttccagcttcagccaccgtccgaggcctttgcccctcgcacttggccctcgcactcgccacgtgcccctttccagcctaacccttcaggtttgcttcaggtggggtcgtgggcgccaggttctttctccagctggggggctctgtgtgcccagggcgctcctgcgctgggatctgcgaggagatacccagagccctgaaaagctgtatatgccaaaaacaattaaagaaacttctctgagtacttaccatgtaccaggaattacactgaatgaccgcagtataataaacaaaatagatcctggtgtagaagagagtcccttggatcttcatgtttgtcatggaaataactatgtggatgaaaaaccagcactactgctgctgagcgggaagcttggatgcccctccctcacctcttgctacagcaactgcctcagctatggaaaccgctgtcgactattgcaggaacttgtagtcaaccagcatgtagagcagcagccacactacacccacaaaccaactctggaatacagtccttttcccatacctccccagtcccccgcttatgaaccaaacctctttgatggtccagaatcacagttttgcccaaaccaaagcttagtttcccttcttggtgatcaaagggaatctgagaatattgctaatcccatgcagacttcctccagtgttcagcagcaaaatgatgctcactcgcacagctcaagcatgatgcccagcagcgcctgtgaggccatggtggggcacgagatggcctctgactcttcaaacacttcactgccattctcaaacatgggaaatccaatgaacaccacacagttagggaaatcactttttcagtggcaggtggagcaggaagaaaacaaattggcaaatatttcccagacccagtttctttcaaaggatgcagatggtgacacgaagactgcagcacaggctggagtctggaggaaccaggtggcagagctaggatggagaagaaagattttcgacttggatctaaatgcagcaggggaccaggtcgctgcagagagagtggcagaaactaacagtctagaactatctcaaggctcaggaacttttccttctgggtattattataaagaccagtggaggcccagaaagtttaagatgcgtcagtttaatgaccctgacaacattacagagtgcttacaaagaaaagtggtgcatttatttggtgactcaacaatcagccaatggtttgaataccttactacatttgttccagagagggaggaagaaaggccacaaaaagagacaatacttcaaaactgcatcttcaattgcaaccaaactgttgttgctaagtcaccttataacaaagggatgaagtctcaaagatctgaccctttagtgattgtggaagattctggaaatctcatgttgccaggagataagaaattggatattccctatccactaggttcttctcagcaaagctgcagagtcttaccaggaaaaacaacaacaaaaagaattcccttcaaatttcaagtcaggaaaactcaggccttaatccgaagctcaggatag

SEQ ID NO: 125957 - DNA, 4164 bp, Homo sapiens
atgagcgacgcagaagacgaacgatttctgcagttccaactgaggtaccgggtgtatctcactggggattgtcggacagtgggtgcaggacagtgggtccagcgcaccgagcgtgagccgaagcagggcgaggcattgcctcacccaggaagtgcaaggggttggggagttccctttcctagggatgacggatggcacctggaaaatcgggtcactcccaccctaatactgcgcttttctcacagtcttagcaaacagcacaccaggagaccatattccgcgcctggctcagagggtcctacacccacggagccgtgctcattgctagcacagcagtctgagatcaaactgcaagatggcagcgaggctgggggagggcctctgctgctgatacccaggcaaacagggtctggagtggacctccggcaaactccaacagacatgcagctgagggtcctgactgttagaaggaaaactaacaaacagaaaggacagccacaccaaaaccccatctgtacgtcaccatcatcaaagaccaaagcaccacaccacacctattccaaaactgaccacatagttggaagtaaagcactcctcagcaaatgtaaaagatcagaaattataaccaactgcctctcagaccacagtgcaatcaaactagaactcaggattaagaaacgcattcaaaaccgctcaactacatggaaactgaacaacctgctcctgaatgactactgtgtacataacgaaataaaggcagaaataaagatgttctttgaaaccaacgagaacaaagacacaacataccagaatctctgggacacattcaaagcagtgtgtagagggaaatttagagcactaagggcccacaagagaaagcaggaaagatctaaaattgacaccctaacatcacaattaaaagaactagagaagcaagagcaaacacattcaaaagctagcagaaggcaagaagtaactaagatcagagcagaactgaaggaaacagagacacaaaaaaaaaccttcaaaaaatcaatgaatccaggagctgaaatacaaactaccatcagagaatactataaacacctctatgcaaataaactagaaaatctggaagaaatggataaattcctcgacatatacactctcccaagactaaaccaggaagaagttgaatctctgaatagtccaataacaggctctgaaattgaggcaataattaatagcttaacaaccaaaaagattccaggaccagatggattcacagccgaattctaccagaggtacaaggaggagcagcagcacatcaacaagcttatccaccatgatcaagtgggcttcatccctgggatgcaagactggttcaacatacgcaaatcaataaatgcaatccagcatataaacagaaccaatgacaaaaaccacatgattatctcaatagatgcagaaaaggcctttgacaaaattcaacaacccttcatgctaaaacctctcaataaattaggtattgatgggacgtatctcaaaataataagagctatttatgacaaacgcacagccaatatcatactgaatgggcaaaaactggaagcattccctttgaaaactggcacaagacagggatgccctctctcaccactcctattcaacatagtgttggaagttctggccagggcaattaggcaggagaaggaaataaagggtattcaattaggaaaagaggaagtcaaattgtccctgtttgcagacgacatgattgtatatctagaaaaccccactgtctcagcccaaaatctccttaagctgataagcaacttcagcaaagtctcaggatacaaaatcaatgtacaaaaatcacaagcattcttatacaccaacaacagacaaagagagagccaaatcatgagtgaactcccattcacaactgcttcaaagagaataaaatacttaggaatccaacttacaagggatgtgaaggacctcttcaaggcgaactacaaaccactgctcaaggaaataaaagaggatacaaacaaatggaagaacattccatgctcatgggtaggaagaatcaatattgtgaaaatggccatactgcccaaggtaatttatagattcagtgccatccccatcaagctaccaatgactttcttcacagaattggaaaaaactactttaaagttcatatggaaccaaaaaagagcccgcatcgccaagtcaatcctaagccaaaagaacaaagctggaggtgtcacactacctgacttcaaactatactacaaggctacagtaaccaaaacagcatggtactggtaccaaaacagagatacagaccaatggaacagaacagagccctcagaaataatgccacatatctacaactatctgatctttgacaaatctgacaaaaacaagcaatggggaaaggattccctatttaataaatggtgctgggaaaactggctagccatatgtagaaagctgaaactggatcccttccttacaccttatacaaaaatcaattcaagatggattaaagatttaaacgttagacctaaaaccataaaaatcctagaagaaaacctaggcaataccattcaggacatagtcgtgggcaaggacttcatgtctaaaacaccaaaagcaatggcagcaaaagccaaaattgacaaatgggatctaatgaaactaaagagcttctgcacagccaaagaaattaccatcagagtgaacaggcaacctacaaaatgggagaaaatttttgcaatctactcatctgacaaagggctaatatccagaatctacaatgaactcaaacaaatttacaagaaaaaagcaaacaaccctattaaaaagtgggcaaaggacatgaacagatacttctcaaaagcagacatacatgaggctgatgaacatatgaaaaaaagctcaacatcactgatcattagagaaatgcaaatcaaaatcacgctgagataccatctcacaccaccttcgctgctgatacccaggcaaacagggtctggagtggacctccagcaaactccaacagacctgcagctgaaggtcctgactgttagaaggaaaactaacaaacagaaagtacatccacaccaaaaccccatctgtacatcaccatcatcaaagaccaaagaactagaaaagcaagagcaaacacattcaaaagctagcagaaggcaagaaataactaagatcagagcagaactgaaggaaatagagacacaaaaaaaccttcaaaaaatcaatgaatccaggagctggtttttggaaaaggtcaacaaaattgatagactgctagcaagactaataaagaagaaaagagagaaggatcaaatagatgcaataaaaaatgataaaggggatatcaccaccgatcccacagaaatacaagctaccatcagagaacactataaacacctctacgcaaataaactagaaaatctagaagaaatggataaattcctggacacatacactctcccaagactaaaccaggaagaagttgaatctctgaatagaccaataacaggctctgaaattgaggcaataatcaatagcttaccaaccaaaaagagtccaggaccagatggattcacagccaaattctaccagaggtacaaggaggaactggtaccattccttctgaaactattccaatcaatagaaaaagagggaatcctccctaactcattttatgagtccagcatcatcctgataccaaagccgggaagagacacaaccaaaaaagagaattttagaccaatatccttgatgaacattgatgcaaaaatcctcagtaaaatactggcaaaccgaatccagcagcacatcaaaaagcttatccaccatgatcaagtgggctacatccctgggatgcaaggctggttcaacatatgcaaatcaataaatgtaatccagcatataaacagaaccaaagacaaaaaccacatgattatctcaatagatgcagaaaaggcctttgacaaaattcagcaacgtttcatcctgaaaactcttaatgaattaggtattgatgggacatatctcaaaataataagagctatctatgacaaacccacagccaatatcatactgaatagggaaaaactggaagcattccctttgaaaactggcaaaagatag

SEQ ID NO: 125958 - DNA, 444 bp, Homo sapiens
atgaaagccccgtggacaggacagtatagatatatcagtccaaaagaccttaaagtcaccattgggaagatcaattaccagtttgcaggatacagtcaagattcacaagaattttttctgttcctaatggatggtctccgtgaagatctaaataaaactgataatcggaagacatataaagaagaaaataatgatcatctcaatgactttaaagctgcagaacatgcctggcagaaacacaagcggctctatgagtctattattgttgcactttttcaggatcactgcggtgggctggatggaggccattacacagcctactgtaaaaatgcagcaaaacagcggtggtttaagtttgatgatcatgaagtttctgatatctctgtttcttctgtgaaatcttcagcagcttatatcctcttttatacttctttgggaccatga

SEQ ID NO: 125959 - DNA, 4391 bp, Homo sapiens
gtgagctgggctggcttccgtcctggtagccaaggctaattctccctcgagttcttgggagatgggcatttggcgagaaggctggcgttagtgaagcgcgcccggcgtcacggtgagtgcgggtcttgggccctagcacctgttctctgggaagtcgtccgctgtgaacgatgaacgcctttccttccaccagctgctggttaccccggagacaagctctgtccgcggagaggagtgggacaactcctaaaggaaagaagcacttgtaaggaaatatagcatccattgtgaaagtggaaaagtaaagataattcatcatgcctgctgtggcttcagttcctaaagaactctacctcagttcttcactaaaagaccttaataagaagacagaagttaaaccagagaaaataagcactaagagttatgtgcacagtgccctgaagatctttaagacagcagaagaatgcagattagatcgtgatgaggaaagggcctatgtactatatatgaaatacgtgactgtttataatcttatcaaaaaaagacctgatttcaagcaacagcaggattatttccattcaatacttggacctggaaacatcaaaaaagctgtcgaagaagctgaaagactctctgaaagccttaaattaagatatgaagaagctgaagtccggaaaaaacttgaggaaaaagacaggcaggaggaagcacagcggctacaacaaaaaaggcaggaaacaggaagagaggatggtggcacattggctaaaggctctttggagaatgttttggattccaaagacaaaacccaaaagagcaatggtgaaaagaatgaaaaatgtgagaccaaagagaaaggagcaatcacagcaaaggaactatacacaatgatgacggataaaaacatcagcttgattataatggatgctcgaagaatgcaggattatcaggattcctgtattttacattctctcagtgttcctgaagaagccatcagtccaggagtcactgctagttggattgaagcacacctgccagatgattctaaagacacatggaagaagagggggaatgtggagtatgtggtacttcttgactggtttagttctgccaaagatttacagattggaacaactctccggagtctgaaagatgcacttttcaagtgggaaagtaaaactgtcctgcgcaatgagcctttggttttagagggaggctatgaaaactggctcctttgttatccccagtatacaacaaatgctaaggtcactccacccccacgacgccagaatgaagaggtgtctatctcattggattttacttatccctcattggaagaatcaattccttctaaacctgctgcccagacgccacctgcatctatagaagtagatgaaaatatagaattgataagtggtcaaaatgagagaatgggaccactgaatatatcaactccagttgaaccagttgctgcttctaaatctgatgtttcacccataattcagccagtgcctagtataaagaatgttccacagattgatcgtactaaaaaaccagcagtcaaattgcctgaagagcatagaataaaatctgaaagtacaaaccatgagcaacaatctcctcagagtggaaaagttattcctgatcgttccaccaagccagtagttttttctccaactctcatgttaacagatgaagaaaaggctcgtattcatgcagaaactgctcttctaatggaaaaaaacaaacaagaaaaagaacttcgggaaaggcagcaagaggaacagaaagagaaactgaggaaggaagaacaagaacaaaaagccaaaaagaaacaagaagctgaagaaaatgaaattacagagaagcaacaaaaagcaaaagaagaaatggagaagaaagaaagtgaacaggccaagaaagaagataaagaaacctcagcaaagaggggcaaagaaataacaggagtaaaaagacaaagtaaaagtgaacatgaaacttctgatgccaagaaatctgtagaagatagggggaaaaggtgtccaaccccagaaatacagaaaaagtcaacaggagatgtgccccatacatctgtgacaggggattcaggttcaggcaagccatttaagattaaaggacaaccagaaagtggaattctaaggacaggaacttttagagaggatacagacgataccgaaagaaataaagctcaacgagaacctttgacaagagcacgaagtgaagaaatggggaggatcgtaccaggactgccttcaggctgggccaagtttcttgacccaatcactggaacctttcgttattatcattcacccaccaacactgttcatatgtacccaccggaaatggctccttcatctgcacctccttccacccctccaactcataaagccaagccacagattcctgctgagcgggatagggaaccttccaaactgaagcgctcctactcctccccagatataacccaggctattcaagaggaagagaagaggaagccaacagtaactccaacagttaatcgggaaaacaagccaacatgttatcctaaagctgagatctcaaggctttccgccttcctcagattcggaaccctcaatccctgtttttgggaggttcctggacccagctccttacctggaccctcccgaccctagggaaataccttggttatatgaaccctcaatattgcaagtcccccatgtaaccggcccccacatttggctgattatttccaacccgaaactgttatccaggatgatattaacaggtcaaatttgttggggcataaaggtgaagtggcagaagaatttggtataatcatgaaagccctgtggacaggacagtatagatatatccagcccaaaggactttaaaatcacccattgggaagatcaatgacccagtttgcaggatacagtcagcaagattcacaagaattgcttctgttccctaatggatggtctccatgaagatctaaataaaagctgataatcggaagagatataaagaagaaaataatgatcatctcgatgactttaaagctgcagaacatgcctggcagaaaacacaagcagctcaatgagtctattatttgttgcactttttcagggtcaattcaaatctacagtacagtgcctcacatgtcacaaaaagtctaggacatttgaggccttcatgtatttgtctctaccactagcatccacaagtaaatgtacattacaggattgccttagattattttccaaagaagaaaaactcacagataacaacagattttactgcagtcattgcagagctcgacgggattctctaaaaaagatagaaatctggaagttaccacctgtgcttttagtgcatctgaaacgtttttcctacgatggcaggtggaaacaaaaattacagacatctgtggacttcccgttagaaaatcttgacttgtcacagtatgttattggtccaaagaacaatttgaagaaatataatttgttttctgtttcaaatcactacggtgggctggatggaggctttttacacagcctattgtaaaaatgcagcaggacaacggtggtttaagtttgatgatcatgaagtttctgatatctccgtttcttctgtgaaatcttcagcagcttatatcctcttttatacttcattgggaccacgagtaactgatgtagccacataaggagacataggttataaactagttatcttttaaaaggctcagcaacacaactcttgaaatgcttatcaggataatggtagctatagctggccatttagaggaattctaggacagtgggagctgtgttactagcactatataattccggtcagtgctgacaaataacatttaacaagtattgcagtaatcatcacttacaggtaccatttatttcaaaacaacttttttagtctgctccaaagttaaaataattaactagctaagcattattattcaactggtctaaaaactattgttatctttttttttccttttcactgttatggccttttcacatttctaaatcccatcttgatatactatgaatactctagaatgatgtaaagcagataggaatgtatgtgtacatatttattgcatacttgcacatcaaatcgatgtacatagtttaacacgtggtccttttgtgaaacctagaactcagaggattgctttttttctttcagcctattttgagttaacttcagtcctttcttagggaaatgacagggcaaagcaatttttctgttggctttgggctgtatttgtgcactaaatctttattctaaaaaaaaaaatggaaactttaatttttttaaaacgggaatttcatttacagctacattaaaatcttaatgagaaaaat

SEQ ID NO: 125960 - DNA, 612 bp, Homo sapiens
atggcgcccagccggaatggcatgatcttgaagccccactttcacaaggactggcagcggcgcgtggccacgtggttcaaccagccgacgcggaagatccgcagactcagggccttgcaagccaaggcgcaccgcatcggcccgcgtcacgcatcggggcccatccggcccatcgtgcgctgcacaccaccctccctccccgcccccgtggttccgtaccacacggaggcgcccgtcggccgcggcttcagcctggaggagctcagggtggccggcattcacaagaaggtggcccagatcgttggcattgctgtggatccgaggaggcggaacaagtccattgctgtccctgcaggccaacgaagccctcggacccccaagaagggagacagttctgctgaagaactgaaactggccactcagctgacaggaccggtcatgcccacccggaatgtctataagaaggagaaagctcgaatcgtcactgaggaggagaagaatgtcaaagcctttgctagtctctgcatggcccgtgccaacgcccggcttttcggcatacgggcaaaaagagccaaggaagctgcagaacagaatgttgaaaagaaaaaataa

SEQ ID NO: 125961 - DNA, 1047 bp, Homo sapiens
gccttcgtgtagacaacgcgcccgcccacgcgtccgggctgtttttctgcgcaggagccgcagggaccgtattgtttgccatggcgcccagccggaatggcatggtcttgaagccccacttccacaaggactggcagcgggcgcgtggccacgtggttcaaccagccggcccgggaagatccgcagaacgtaggccccggcaagccaaggcgcgccgcatcggccccgcgccccgcggtgggggtcccatccggcccatcgtgcgctgccccacgggtcgggtccacaacggaagttggcgccccggccgcgggtttcagcctggaagaagctcaagggtggccggccattcaccaagaaaggtggccccggacccatccggcatttctgtggatccgaaagaggcgggaaacaagttcccacgggagtcccctgcaggcccaacgtgcaagcgggctgaaggaattaccgctcccaaactcaatcctcttccccaaggaagccctcggcctctcattatagggagacagttctgctgaagaactgaaactgggccacccagcctgaccggaccggtcatgcccgtccggaacgtctataagaaggagaaagctcgagtcatcgactgaggaagttatagaatttcaaagccttcgctagtctccgtatggcccgtgccaaacgcccggctcttcggcatacgggcaaaaagagccaaggaagccgcagaacaggatgttgaaaagaaaaaataaagccctcctggggacttggaatcagtcggcagtcatgctgggtctccacgtggtgtgtttcgtgggaacaactgggcctgggatggggcttcactgctgtgacttcctcctgccaggggatttggggctttcttgaaagacagtccaagccctggataatgctttactttctgtgttgaagcactgttggttgtttggttagtgactgatgtaaaacggttttcttgtggggaggttacagaggctgacttcagagtggacttgtgttttttctttttaaagaggtgaggat

SEQ ID NO: 125962 - DNA, 330 bp, Homo sapiens
atggatgtctttgcagggggtctgcttagacatggatcaggctcgcagaacggaataaataaggcggtgactgacttcaagacattgagaacaaaagcccatggcacacaacaggagctacacactgctggcatcatcataggcatgcaagccatttgcagcccagctgtgtgtaacagcatctcaaaccctgtcaccaaggagatgctgtttgagttcatcgacagatgtactgcagcttctcaaggacagaagcgaaaacatcatttggaccctgacacggagctcatgccaccaccacctcccaaaagaccacgccctttaacctaa

SEQ ID NO: 125963 - DNA, 759 bp, Homo sapiens
atggcgcgatctcagctcaccgcaacctccgcttcctgggttcaagtgattctcctgcctcagcctcccaagaacactggggcacagaaacactggcccactgaaggggaagcaaaggaacactgtgtaagtgatgactctgagagcactttgaaagctggagggcagcacagaataaaacagggtggaaatagttcttcaggagcaagagagcctgcaccaaatattctgaatagtagaaggtcttggtggactttggttgctaaggcagcagctgtcacagtgattataagggtcattctcatggcagcaattcttaggggcactttggcaaaggaagtgaattggtgggttcttgatctcactgacttcaagaatgaagccgcggaccctcgcgctagacataaagattctccaagtccccaccagactcaggagcccagctggcttcactcagtggatcccacaccggggccacaggtggagctgcctgccagtcccacgatgtgcgccggcacttctcagcccttggtcagtcgatgggactggtcgccgtggagcaggaagcggcacatcatatttgctccaagtagccacaacaaatatgctggagaatcatttcctggaatctatgatgctatctttgatattgaaaataaagccaactctcgtttggcctggaaagaagtaaagaaacatatttctattgcagcttttacaattcaagcagcagcaggaactctgaaagaagtattatag

SEQ ID NO: 125964 - DNA, 222 bp, Homo sapiens
atgcccgatcgcctcagaagcccgatagaccatcatggatgccgagctttaggtaactctcacagtggaggcctcagttctcctacttgtgatggctggcaaacgctgatgcctatggggccagcagttctttctctcaccctgtttattaccacaattaatcaccagcagcacaacctcaccttcgccgacctctccacaggaaagaaaataaaatattga

SEQ ID NO: 125965 - DNA, 229 bp, Homo sapiens
ctttgcctctggctgtgtggcgctgcctgtgttgatgaacatcaaggctgtgattgagcagcggcagtgcactggggtctggaatcacaaggacgagttaccggacctgggtgcagccgcaggctccaagcgccccacctgtgtgataatggtcaagccccatgaggagtaccaggaggcttacgatgagtgcctggaggaggtgcagtccctgcccctacccctatga

SEQ ID NO: 125966 - DNA, 570 bp, Homo sapiens
atgggtgcatacaagtacatccacgagctgtggaggaagaagcagtctgatgtcatgagctttcttctgagggtccgctgctggcagtaccgccagctctctgctctccacagggctccccgccccacccggcccgataaagtgcaccaactgggctacaagatcaagcaaggttatgttatctacgggattcgtattctccgtgatggccgaaaatgctcagttcctaagggtgcaacttacggcaagcctgtccatcatgctattggaagaaatcctgacacccagtggatcaccaaaccagtccacaagcacaaggagatgcgtgggctggcatgtgcaggccaaaagagccatggccttggaaagggccggcctccccaattaggcaacgataaagccattggtgtggtcagatccctcctgggacaggatgttaaccctcagcagctcctgaaccatgggagctggtccctgtcaatgtcacggaaacagaacaagaggaggcttcaaagaaatcagttgcccgcactccctgattgcaaccaggccttatctagtgccttttaa

SEQ ID NO: 125967 - DNA, 1042 bp, Homo sapiens
ggaattcggcggcagccatcaggtaggctgcgttgaggatctttgctcttccatccgcctttgatcgtcttcctcttcagccatccaggtaagccaagatgggtgcatacaagtacatccaggagctatggagaaagaagcagtctgatgtcatgcgctttcttctgagggtccgctgctggcagtaccgccagctctctgctctccacagggctccccgccccacccgggcctgataaagcgcgccgactgggctacaaggccaagcaaggttacgttatatataggattcgtgttcgccgtggtggccgaaaacgcccagtttcctaagggtgcaactttacggcaagcctgtccattcatgggtgtttaaccagctaaaagttttgcttcgaagcctttcagttccgttggcaggagggagcgagcttgggacggcacttgtggggggcttcttgaggagttcctgaatttttttaattgggtttgggttgaaggatttccacattacaaattttttttgaggttatcctcatttgatcccattccataaaagctatcagaagaaattcctggacacccagtgggatcaaccaaaccagtcccacaagcacaggggagatgcgtggggctgacatctgcaaggcccgaaaagagccgtggccttggaaagggccacaagtttccaccacactattggtgggctctccgccgggcaacttggagaaggcgcaatactctccaagctccaccgttaccgctaatataagtaaagtttgtaaaattcatacttaataaacaatttaggacagtcatgtctgcttacaggtgttatttgtctgttaaaactagtctgcagatgtttcttgaatgctttgtcaaattaagaaagttaaagtgcaataatgtttgaagacaataagtggtggggtatcttggttctaataagaataaacttttttgtctttgctttatcttattagggagttgaatgcagtgtataaaacatactgtgtggtataacaggcttaataaattcttt

SEQ ID NO: 125968 - DNA, 447 bp, Homo sapiens
gcgggcgcctcccccagcctcgctgccgccttgcagtttgatctcagactgctgtgctagcaatcagcgagactctgtgggtgtaggaccctccgagccagtgagatgaacccggtacctcagatggaaatgcagaaatcacccgtcttctgcgttgctcacgctgggagctgtggaccagagctgttcctattcggccatcttggctcctcccccgggtgttggtgtccctctgttgcccaggctggagtgcagtggcaagactggctcactgcaacctccacctcctgggatcaagcgatcctcccatctcatcctccaggagctgggactaaagacagttgaccattaaacaacacaggtttgaactgagtggatccacttatatgcatacgtgcattttctcctgactcggccacccctgagacagcaagaccaatcactcct

SEQ ID NO: 125969 - DNA, 945 bp, Homo sapiens
atggcgggcgcccctcccccagcctcgctgccgccttgcagtttgatctcagactgctgtgccagcagtcagcgagactccgtgggctcgtcggaaaagcgcggtattcgggtgggagtgacccgattttccaggtgccctccgtcacccctttctttgactcggaaagggaactccctgaccccttgcgcttccccaatttgtctttcatggtcacatgatggctgtagcaactccagaagttatatttacataactccaagttacttgaccacagcacgaacttctttcccagcgttggaaattctggccagggcaatcaggcaggagaaagaaataaagggtattcaattaggaaaagaggaagtcaaattgtccctgtttgcagatgacatgattgtacatttagaaaaccccatcatctcagcccaaaatctgggacaaacagagagccaaatcatgagtggactcccattcaaaattgctacaaagagaataaaatacctaggaatccaacttacaagggatgtgagggatctcttcaagaactacaaaccactgctcaacgaattaaaagagggcacaaacaaatggaagaagaacatcctgtcctcatggataggaagaatcaatatcgtgaaaatggccatactgcccaagaagtggaattttaagcccaagggtggaaacttagaatttgaaggaacctcaagatatcatctggctgaagcctttgccttagtccctaagtgtcattcgcacatcctctgtgcttcacctaactacaacttggccaaagctgttgctactaatttcagtttacttagaattagttcaattgttcaattcccacttatgagtgagaacacatggacacaaggagaacaaggagaaaacatggacacagggaggggaacatcacccatggggcctgttgggggatga

SEQ ID NO: 125970 - DNA, 465 bp, Homo sapiens
atggcgggcgcccctcctgcagcctcgctgccgccttgcagtttgatctcagactgctgtgctagcaatcagcaagactccatgggcgtaggaccctccaagccagaagctaaaaaccttgagaaaagattagacgaatggctaactacaataaccaatgaagagaagtccttaaatgacctgatggagctgaaaaccatgacacgagaactacgtgacgcatgcacaagcttcagtacccgattcgatcaactggaagaaagggtatcagtgattgaagatcaaatgaatgaaatgaagcaagaagagaagtttggagaaaaaagagtaaaaagaaacgaacaaagcctccaagaaatatgggactatgtgaaaagaccaaatctgcgtctcattggtgtacctgaaagtgacggggagaatggaaccaagttggaaaacactcttcaggatatcatccagtag

SEQ ID NO: 125971 - DNA, 441 bp, Homo sapiens
atggcgggcgcccttcccccagcctcgctgccgccttgcagtttgatctcagactgctgtgctagcaatgagcgtagctccatgggcataggaccctctgagccatgtgcaggatataatctcctggtgtgccgtttgacaaagaaaaaaagaataagaagtacgaacaaagtctgggattatgttaaacgaccaaatctaaggataattggtgttcctgaggaagaagagaattctaaaagttgtgaaaacatacttggggaaataattgaggaaaacttccccagccttgctacagacctagacatccaaatacaagaagcacaaagaacaccccagaaattcatcacagaaagatctttgcctaggtacattgtcatcagattatccaaagttaagacaaaggaaagaatcttaagagctgtgagacagaagcaccag

SEQ ID NO: 125972 - DNA, 268 bp, Homo sapiens
atggtgggcgcccctaccccagcctcactgctgccttgcagtttgatctcagactgctgtgctagcaatgagcgaggctccgtgggcgtaggaccttccaagccaggtgcaggatataatctcctgccctacttcttgcttcccaaggtctaccaggactcagggctggggtcggaaggaagaaagttggagtacgtggcttttgcaactctccctgggccatatgacattcttctctctttgggttcattgaacagggaatatacag

SEQ ID NO: 125973 - DNA, 708 bp, Homo sapiens
atggcgggcgcccctcccccagcctcgctgccgccttgcagtttgatctcagactgctgtgctagcagtcagcgagactccgtgggcgtaggaccctctgagccaggtgcgagatataatctcgtggtgtgccgttttttaagccggttggaaaagcgcggtattcgggtgggagtgacccgattttccaggtgccgttcgtcacccctttctttgactaggaaagggaactccctgaccccttgcgcttcccaagctgggagctgtggaccggagctgttcctattcggccatcttggctcctcgcagttcattctttgtggggttaattggaagcagctgcagcaggagtattcacaagaaaacaggacacacccacagccaagctataggaagcctgtcggaaaagtgcagtattcgggtgggagtgacccgattttccaggtgccatctgtcacccctttctttgactcagaaagggaactccctgaccccttgcacttcccaaacaaaggtggacaggctgatggcaacatgggtcagggagaggatattgccactactggggatggggaagctgtttcttttggcaaaaaaacttcatcagagtttacaaactcagtgtcctcagcttcatcagggtcctccaacacatccccattccaagtttcagggtcccatgcttttccaatcaatgccttcatttaa

SEQ ID NO: 125974 - DNA, 834 bp, Homo sapiens; identical to SEQ ID NO: 121693

SEQ ID NO: 125975 - DNA, 1305 bp, Homo sapiens
atgctgattatgcaccaagttgtctgtgcgaccaccaatcccgctaaaattcaggccattctgcaggcatttcacgagatcttcggcgaaggatcctgccatattgcatccgttgccgtcgagagcggtgtaccggaacagccctttggcagtgaggaaacgcgcgctggcgcacgaaatcgggtagccaatgcccgccgtttacttccagaggctgatttttgggtggcgattgaagctggcatcgatggtgacagcactttcagttgggtggtgattgaaaacgccagccagcgcggcgaggcgcgttcggctactttgccgttgcctgcggtgattctggaaaaagtgcgtgaaggtgaggcgcttggtcccgtgatgtcgcgttataccggtattgatgagattggtcgtaaggaaggggcgatcggcgtgtttaccgccgggaaactcactcgcgccagcgtctatcaccaggcgacaggactgtcagctgtaggtctgttggagtttgctagaggtccactccagaccctgtttgcctgggtatcagcagcagtggctgcagaacagcggattttcgtgaactgtgaatgctgctgtccagtcgttcctctggaagttttgtctcagaggagtacctggccgtcctcgctgctgccttgcagtttgatctcagactgctgtgctagcaatcagcaagactccgtgggcataggaccctccgagccaggtgcgggatataatctcccggtgcgccgttttttaagcccgtcggaaaagcgcagtattcgggtgggagtgacccgattttccagcagtggctgcatgacactgagcaagaatttgtgtgcgttgaggagggaaagtgcagtgattgtgggcctgtgcattggaactcagtgctgctctgccatagcagaaagcaaccctgggcagaactcagccaacacccatggaggagcatttaaactggccctagccagagtcagttttcacgctgctgataaagacatacccgagactgggaagaaaaagaggtttaattggacttacagtttcacatggctgaggaggcctcagaatcatggtgggaggcgaaagccacttcttatctggcagcggcaagagaaaatgaggaagacgcaaaagcggaaacccctgataaacccatcagatctcgtgagacttattcactaccacgagaacaatatgggggaaactgcccccatgattcaaattatctcccacctggtccctcccacaacaacacgtgggaattatgggagctacaattcaaattga

SEQ ID NO: 125976 - DNA, 1370 bp, Homo sapiens
atgtcggaaggaaacgccgccggacgcccagcacggcagggcccggaccttctcctgactggggcccgggggtcatcgggcggcggcggcctcccctcacccccggccgttccctccatccgttccagggacctaaccctcgggggagtcaagaagaaaaccttcaccccaaatatcatcagtcggaagatcaaggaagagcccaaggaagaagtaactgtcaagaaggagaagcgtgaaagggacagagaccgacaacgagaggggcatggacgagggcgacgccgtccagaagtgatccagtctcactccatctttgagcagggcccagctgaaatgatgaagaaaaaagggaactgggataagacagtggatgtgtcagacatgggaccttctcatatcatcaacatcaaaaaagagaagagagagacagacgaagaaactaaacagatcttgcgtatgctggagaaggacgatttcctcgatgaccccggcctgaggaacgacactcgaaatatgcctgtgcagctgccgctggctcactcaggatggctttttaaggaagaaaatgacgaaccagatgttaaaccttggctggctggccccaaggaagaggacatggaggtggacatacctgctgtgaaagtgaaagaggagccacgagatgaggaggaagaggccaagatgaaggctcctcccaaagcagccaggaagactccaggcctcccgaaggatgtatctgtggcagagctgctgagggagctgagcctcaccaaggaagaggaactgctgtttctgcagctgccagacaccctccctggccagccacccacccaggacatcaagcctatcaagacagaggtgcagggcgaggacggacaggtggtgctcatcaagcaggagaaagaccgagaagccaaattggcagagaatgcttgtaccctggctgacctgacagagggtcaggttggcaagctactcatccgcaagtctggaagggtgcaactcctcttgggcaaggtgactctggacgtgaccatgggaactgcctgctccttcctgcaggagctggtgtccgtgggccttggagacagtaggacaggggagatgacagtcctgggacacgtgaagcacaaacttgtatgttcccctgattttgaatccctcttggatcacaaacaccggtaaaatgagcaggtggaggaggacggcgcctgtgcccacggctgctgcctgctccagacattttgttcttgaatctgtgagacccagaaggggcccactgagcccactcactccagcctttggcaaccattgttccaggtcccccagggcttcctcccacagcagctgtgaatggcacagtgacc

SEQ ID NO: 125977 - DNA, 872 bp, Homo sapiens
tctgtagacagcttaagcattaacagctcagttgagtgaccctccattgtcaccaatgtgacagccctttgcacccacactcatggcacccgagttcttgtccggcatccaggataaatgaggtcacacaaacgagttggagatggtaaatgcaggggattttattgccgatgaaagtggctctcaacaggaaggggagctgaaagggggatgaagcaggaagataatcccctgggagtccggtcatccccagccagactcctctccaaagctatgccattcaagctgtccctcttgaagttcaagccgcttcttcttccgatgtccaaccgtggtcttacaacatccagctgcttctcctcttctttctctgttggctgagcctgacagagggtcaggttggcaagctgcccatctgcaagtccgaaagggtgcaactcctcctgggcaaggtgactctggacgtgaccatgggaaccgcctgctctttcctgcaggagctggtgtctgtgggccttggagagagtaggactggggagatgatagacctgggacatgtgaagcacaaacttctgtgttcccccgattttgaatccctcttggatcacaaacactggtaaaatgatcagatggaggaggatggcggctgctgtctgctccagacattttgttctcgaatctctggaagatcgggtcattcccacctcaatactgcgcttttccaacaggcttaaaaaatggcgcaccaggagattatatcccgcacctggctcggagggtcctacgcccatggagtctcgctgattgctagcacagcagtctgagatcaaactgcaaggcagcagcgaggctgggggaggggcgcccgccat

SEQ ID NO: 125978 - DNA, 2241 bp, Homo sapiens
atggcgggcgcccctcccccagcctcgctgccgccttgcagtttgatctcagactgctgtgctattaatcagcgagactccgtgggcgtaagaccctccaagccaggtgcgggatataatctcgtggtgcgccgttttttaagcctgttggaaaagcgcagtattccggtgggagtgacccgattttccaggtgccgtccgtcacccctttctttgactcggaaagggaactccctgaccccttgtgcttcccgaataatcaatatgcatttccaagccttttggctatgtttgggtcttctgttcatctcaattaatgcagaatttatggatgatgatgttgagacggaagactttgaagaaaattcagaagaaattgatgttaatgaaagtgaactttcctcagagattaaatataagacacctcaacctataggagaagtatattttgcagaaacttttgatagtggaaggttggctggatgggtcttatcaaaagcaaagaaagatgacatggatgaggaaatttcaatatacgatggaagatgggaaattgaagagttgaaagaaaaccaggtacctggtgacagaggactggtattaaaatctagagcaaagcatcatgcaatatctgctgtattagcaaaaccattcatttttgctgataaacccttgatagttcaatatgaagtaaattttcaagatggtattgattgtggaggtgcatacattaaactcctagcagacactgatgatttgattctggaaaacttttatgataaaacatcctatatcattatgtttggaccagataaatgtggagaagattataaacttcattttatcttcagacataaacatcccaaaactggagttttcgaagagaaacatgccaaacctccagatgtagaccttaaaaagttctttacagacaggaagactcatctttatacccttgtgatgaatccagatgacacatttgaggtgttagttgatcaaacagttgtaaacaaaggaagcctcctagaggatgtggttcctcctatcaaacctcccaaagaaattgaagatcccaatgataaaaaacctgaggaatgggatgaaagagcaaaaattcctgatccttctgccgtcaaaccagaagactgtgctcttggtttagagctttggtctatgacctctgatatctactttgataattttattatctgttcggaaaaggaagtagcagatcactgggctgcagatggttggagatggaaaataatgatagcaaatgctaataagaaaaaacataaagatacagagtataaaaaaaccgacatatgtataccacaaacaaaaggagtactagagcaagaagaaaaggaagagaaagcagccctggaaaaaccaatggacctggaagaggaaaaaaagcaaaatgatggtgaaatgcttgaaaaagaagaggaaagtgaacctgaggaaaagagtgaagaagaaattgaaatcatagaagggcaagaagaaagtaatcaatcaaataagtctgggtcagaggatgaggctctcgcagagcagccacgggaaggtccaggcgtgccaggtcccattccacccaaacgcccctcccgcagtccaattccagagccgagagctgcaaagcggctcccgacccaggagctgcggggagaaagctacacgatgtctgcgtcagggaccgcgagaggtccctctcccaaagaacgcctgggcctgacaacgaaaacaggagaaaaagaggtcgcgcaagggttctgccgggagccaggcctccgccgcccaccaaatgcccaggcccgagaccgctcctcccgggcccccgcaacccacagaaaggaactgaagcctgagcgtgaacacatttcttgctcaaggtcacatatacggtatcaagagtggagtgttcttcgtgacaccgttcatcgtaatctagtacttgacacaaagcggcatcctgctttaatactcgttgagtacaaggaacgcacctcctcaccagcaacagaacaaagctgcatggagaatgactttgatgagttgagagaagaaggcttcagacgatcggtaataacaaacttctccgagctaaaggaggatgttcaaacccatcacaaagaagctaaaaaccttgaaaaaagattagacaaatggctaactagaataaacagtgtagagaagtccttaaatgactggatggagctgaaaaccatggcatga

SEQ ID NO: 125979 - DNA, 2288 bp, Homo sapiens
tcactgcccgctttccagtcgggaaacctgtcgtgccagctgcattaatgaatcggccaacgcgcggggagaggcggtttgcgtattgggcgccagggtggtttttcttttcaccagtgagacgggcaacagctgattgcccttcaccgcctggccctgagagagttgcagcaagcggtccacgctggtttgccccagcaggcgaaagtcctgtttgatggtggttccgaaatcggcaaaatcctgcccgctttccagtcgggaaacctgtcgtgccagctgcattaatgaatcggccaacgcgcggggagaggcggtttgcgtattgggcgccagggtggtttttcttttcaccagtgagacgggcaacagctgattgcccttcaccgcctggccctgagagagttgcagcaagcggtccacgctggtttgccccagcaggcgaaaatcctgtttgatggtggttccgaaatcggcaaaatcctgcccgctttccagtcgggaaacctgtcgtgccagctgcattaatgaatcggccaacgcgcggggagaggcggtttgcgtattgggcgccagggtggtttttcttttcaccagtgagacgggcaacagctgattgcccttcaccgcctggccctgagagagttgcagcaagcggtccacgctggtttgccccagcaggcgaaaatcctgtttgatggtggttccgaaatcggcaaaatcctgcatgcggcttttcggtgagagatccacaactagttttttccaattctgtgaagaaagtattggtagcttgatggggatggcattgaatctgtaaattaccttgggcagtatggccattttcacgatattgattcttcctacccatgagcatggaatgttcttccatttgtttgtatcctctttcatttccttgagcagtggtttgtagttctccttgaagaggtccttcacatctcttgtaagttggattcctaggtattttattctctttgaagcaattgtgaatgggagttcactcatgatgtggttctctgtttgtctgttgttggtgtataagaatgcttgtgatttttgtgcattgattttgtatcctgagactttgctgaagttgcttatcagcttaaggagattttgggctgagacaatggggttttctagatatacaatcatgtcgtctgcaaacagggacaatttgacttcctcttttcctaactgaataccctttatttccttctcctgcctaattgccctggccagaacttccaacacattttgggctcccacatactcgcagtcttcgcttttgctgacgcatttgcttttgccagtgttggcagcatgtgcagttaatgcatattgcccgctttccagtcgggaaacctgtcgtgccagctgcattaatgaatcggccaacgcgcggggagaggcggtttgcgtattgggcgccagggtggtttttcttttcaccagtgagacgggcaacagctgattgcccttcaccgcctggccctgagagagttgcagcaagcggtccacgctggtttgccccagcaggcgaaaatcctgtttgatggtggttccgaaatcggcaaaatcctgcccgctttccagtcgggaaacctgtcgtgccagctgcattaatgaatcggccaacgcgcggggagaggcggtttgcgtattgggcgccagggtggtttttcttttcaccagtgagacgggcaacagctgattgcccttcaccgcctggccctgagagagttgcagcaagcggtccacgctggtttgccccagcaggcgaaaatcctgtttgatggtggttccgaaatcggcaaaatccctggaaaatcgggtcactcccacccgaatactgtgcttttccgactggcttaaaaaacggcacaacaggagattatatcccgcacctggttcagagggtcctatgcccacggagtcccgctgattgctggcacagcagcctgagatcaaactgcaaggcggcagcgaggctgcgggaggggcgcccgccattgcccaggcttgcttaggtaaacaaagcagccaggaagctcaaactgggtggagcccaccacagctcaaggaggtctgcctgcctctgtaggctccacctctgggggcagggcacagacaaacaaaaagacagcagtaacctctgcagacttaagtgtccctgtctgacagctttgaagagagcagtgtttcccccagcacgcagctggaagatcttgagaacgggcagactgctcctcaagtgggtcccttga

SEQ ID NO: 125980 - DNA, 1296 bp, Homo sapiens
atggcctttaaagtcatatttggtctaacagagtcatctgaagaaacaagcaacaggaaccagaaaagtttaagtgattttatggtcctcattcaggaaatggccttaaaaattgatcaagggtttctaggagctattattgcactgtttaccccaacaacagaccctgaagctgaaagaagacgggaagtgccctggaaaagtacggcccccacagggccaaactaccttgaggagttcacaatatgtgggatgacaaaaggaacagggtctgttccacaaaaaagaccagtgccaattcaaggctgtgttcgaaaagtttacctgaaggacaccgcacaggcagagagcatgtggccggcatctccactaagacgaatcacagcagggcaggttagttcttcaccagtgtcctcatttgcatcgaattttgccgatttcggaaccaccatcaaacagtattttcgcctgctgggccaaaccagcgtggaccgcttgctgcaactctctcagggccaggcggtgaagggcaatcagctgttgcccgtctcactggtgaaaagaaaaaccaccctggcgcccaatacgcaaaccgcctctccccgcgcgttggccgattcattaatgcagctggcacgacaggtttcccgactggaaagcgggcagagaagaggttgccgctctttagagttaccagttatcctgctctgctttttccccaatccttgcgctcccaccaactattgcttctctgatgatggtgaatgtacagatggctttttgggtgtggatgtcccttctgctcgtcagttctcccttttaacagaacaggaccactcagctgcgagtttgatctcagactgctgtgctagcaatcagcgagactccgtgggcgtaggaccctccgagccaggtgcgggatataatctcgtggtgcgccgttttccaagcccgtcggaaaagcgcagtattcaggtgggagtgacccgattttccaggtcccgtccgtcacccctttctttgagtaggaaagggaactccctgaccccttgcgcttcccgagtgagggcaatgcctcggccctgctttcggcttcgcgcacggtgcgcgcatccactgacctgcgcccactgtctggcactccctagagagatgaacccggtacctcagatggaaatgcagaaatcacccgtcttctgcgtcgctcaggctgggagctgtagaccagagcttgttcctattcggccatcttggctccttattctcattaccttcttgagttgtggctcagacact

SEQ ID NO: 125981 - DNA, 1598 bp, Homo sapiens
gatctagtcttactaaagacgtgggaggaagttctccagctgagcagctttccccaacgtggaagggaccatagcaaggacccctgagttctccaacagacgttcaacgccaggggattcacaggtgggtgcacctgtgtggaagtaaagctgttgcttattctgggagcccaatcctaggctgagggaggtgggcgcggggctgtttaagcgttggcggaggccgggctgggtcgctgcgcgtctgctcctccttctcgcgcttctgctgccgccctaatcctgccttggccatgagggaaatcgtgctcacgcagaccgggcagtgcgggaaccagatcggggccaagttctgggaggtgatctctgatgaacatgccatcgactccgctggcacctaccacggggacagccacctgcagctggagcgcatcaacgtgcaccaccacgaggccagcggtggcaggtacgtgccccgcgctgtgctcgtggatctggagccgggcaccatggactctgtgcgctcggggcccttcgcggaggtcttcaggccagacaacttcatttcccgtcagtgtggggccggaaacaactgggccaagggacgctacaccgaaggcgcggagctgatggagtcagtgatggacgttgtcagaaaggaggctgagagctgtgactgcctgcagggtttccagctgacccactccctgggtggggggactgggtctgggatgggtacccttctgctcagtaagatccgggaggagtacccagacaggatcataaacacattcagcatcctgccctcgcccaaggtgtcggacaccgtggtggagccctacaacgccaccctctcagtccaccagctcatagaaaacgcagatgagaccttttgcatagataacgaagcgctatatgacatatgttccaggaccctaaaactgcccacacccacctatggtgacctgaaccacctggtgtctgctaccgtgagtggggtcaccacgtgcctgcgcttcccaggccagctgaatgctgacctgcggaagctggccgtgaacatggtcccgtttccccggctgcatttcttcatgcccggctttgccccactgaccagccagggcagccagcagtaccgggccttgactgtggctgagctcacccagcagatgtttgatgctaagaacatgatggctgcccgtgacccccgtcacggctgctacctaacggcggctgccattttcaggggtcgcatgcccatgagggaggtggatgaacagatgttcaacattcaagataagaacagcagctactttgctgactggctccccaacaacataaaaacagccgtctgtgacatcccaccctgggggctaaaaatgtcagtcaccttcactgggaacaacacagccgtccaggaactcaagcgggtctcagagcagtttacagcaacgttcaggcgcaaggccttcctccactggtacacgggcgagggcatggatgagatggaattcactgaggccgagagcaacatgaacgacttggtgtctgaatatcagcaatatcaggatgccacggccgagggagaaggagtatga

SEQ ID NO: 125982 - DNA, 1203 bp, Homo sapiens
atgcttcatgggagagccagactcttactggcagtgacgctacacggtagagctctgttcctcctgcccatgtctgtggttggggctgaggtagtgcacaaacatgacgctgatgaggcccaagcattgttggaaaagaaatcagcagctgccacaagaatcttgaatccgtggctgaagaccttgactttctctgggaccaatgtggtcaagaacaaatggatccgggaggagtacccagagtggatcataaacacattgagcatcctgctcttgcccaaggtgtcagacacggtggtggagccctacaacgccaccctctcagtccaccagctcatagaaaacgcggatgagaccttctgcatagataacgaagcgctatatgacatatgttccaggaccctaaaactgcccacacccacctatggtgacctgaaccacctggtgtctgctaccatgagtggggtcaccacatgcctgcgcttcccaggccagctgaatgctgacctgaggaagctggccgtgaacatggtcccgtttccccggctgcatttcttcatgcccggctttgccccactgaccagccggggcagccagcagtaccgggccttgactgtggctgagctcacccagcagatgtttgatgctaagaacatgatggctgcctgtgaaccccgtcacggccgctacctaacggtggctgccattttcacgggtcgcatgcccatgaaggaagtggatgaacaaatgttcaacattcaagataagaacagcagctactttgctgaatggctccccaacaacggattggttagtggaaaccaggcagccattaccgttttcacgtccttttggaggagtcaatcacgaatcaatcggttcggcgctatcggaaaggcaatagccacggccccagttcagttcccggcagggacatcagtagctcctcaccttgagaagacacccgggctttcgtcccgaagcccgtttaagagaggcagattgagcgactcgactcggcagataggagggtgttcaggggccctggcgccacagttcccacaggatgaccttggagcgttcttggattttgagctgccctggataaggagccgcaccccagacttcgcccgcagcttatgggaaatgaagttgtctggcctgaagacctgcccgaagggccccgagcgcatgcagaagtga

SEQ ID NO: 125983 - DNA, 603 bp, Homo sapiens
atgaagaccctgttcctgggtgtcacgctcggcctggccgctgccctgtccttcaccctggaggaggaggatatcacagggacctggtacgtgaaggccatggtggtcgataaggactttccggaggacaggaggcccaggaaggtgtccccagtgaaggtgacagccctgggcggtgggaagttggaagccacgttcaccttcatgagggaggatcggtgcatccagaagaaaatcctgatgcggaagacggaggagcctggcaaatacagcgcctatgggggcaggaagctcatgtacctgcaggagctgcccaggagggaccactacatcttttactgcaaagaccagcaccatgggggcctgctccacatgggaaagcttgtgggtaggaattctgataccaaccgggaggccctggaagaatttaagaaattggtgcagcgcaagggactctcggaggaggacattttcacgcccctgcagacggcacagcagcccccgggtctgcacctccagagcccaccctaccaccagacacagagcccggaccacctggacctaccctccagccatgacccttccctgctcccacccacctga

SEQ ID NO: 125984 - DNA, 666 bp, Homo sapiens
atgaagaccctgttcctgggtgtcacgctcggcctggccgctgccctgtccttcaccctggaggaggaggatatcacagggacctggtacgtgaaggccatggtggtcgataaggactttccggaggacaggaggcccaggaaggtgtccccagtgaaggtgacagccctgggcggtgggaacttggaagccacgttcaccttcatgagggaggatcggtgcatccagaagaaaatcctgatgcggaagacggaggagcctggcaaatacagcgcctgtgagcccctccccgaccccccactccccatgcccaaccccggatgcaccagccccactgcagatgggggcaggaagctcatatacctgcaggagctgcccgggacggacgactacgtcttttactgcaaagaccagcgccgtgggggcctgcgctacatgggaaagcttgtgggtaggaatcctaataccaacctggaggccctggaagaatttaagaaattggtgcagcacaagggactctcggaggaggacattttcatgcccctgcagacggcacagcagcccccgggtctgcacctccagagcccaccctaccaccagacacagagcccggaccacctggacctaccctccagccatgacccttccctgctcccacccacctga

SEQ ID NO: 125985 - DNA, 1896 bp, Homo sapiens
ttatctgagcaagaaatcactaaaatattctgtgaatttttcccgcccctcaactagcaggtttgaggatactatgcccaaggcaggtgtgatgtgcctgggccagacgcagaaccacactcctgcgtggcccctgagctcctgcattccactgttctgggtccctttcttcttctgcttcctgcttccccttccagcatcactcttggctctgtcaagaagtggtgtaggtgatgtggccttgggaatcctagggcatcctggaggtggccgactattatcattagtgtgatggcagatgggaaaggaaaggcattcccagaaggctgcaggacttgggagccctagagcactgatgggtactggttctcccagaactgcagaggccctgggagtttgtgtggagctgtgggaaatgaaccggcacactttcgttagctgagtgtgtgctaaagccccctccgccttttcctcaaggctcgtcaaagtggtcacttggtagctagttcgtgaggttgataattttagtgaagttggaagttgagctacgtcttgacacatgagcaggcatagagtccacgactcggagagaaaataaggagcattcatggagtggataggcaaaacaatttggttgataaggcgcagattctgaactaacttgtaagccttgtctggttttaggacaggtaaaatgggggaatggtaaggagagtttataggttttagaagcccatgctgtagcaggcgagtgataacaggctttaatccttttaaagcgtgctgagggattggatattggcgttgagtggggtaagggtgattaggttttaatgggatggtaatgggcatgtgatcagttgccagggaaggagtagagatgtcccatacttgtgggttaaggtagggggatatgagaggaagacgcgaaggaggctttgggttggggagaaggacggcaatgagatgtggctgtagtccaggaatcgtcagggaagcagataatttagttaaactgtctcggccttccactgtgagagttacccgaagctcggcgtctgtgatggtcttgactatgcctttggctccagccacctttttaagagtaaattgctgggcaggtgggggagggctagtcacagaacgaaactgtaagccggaccaggtgtgaggaggggaggtgataaaaagattatagggtggaggagcagaggctgaggaagaattgggacctagctcggcctggcgaggagcagcttgccccttccccagaaaagcgggacttgccgctaagggtgaaggaccaaggcaggcatccctgcgtggtctgacacccttgaaacgtgggtgtataatcagagaggtgtccctgcagttattaaacaccaagggaaggctgccttcccagtccgtgaccggcactggagttttgggtccacggataaaacatgtctcctttgtctgatttaaaattggtgagatgttccttgggctggtgggtctgaggacctgaggtcgtaggtggatctttctcacggagcaaagaacaggaggacaggggattgatctcccaagggaggtcccccgatccgagtcacggcaccaaatttcatacgcgtccgtgtgaagagaccaccaaacaggctttgtgtgagcaacatggctgtttatttcattgggtgcaggcgggctgagtccgaaaagagagtcagcaaagggagataggggtggggccgttttataggatttgggaaggtaatggaaaattacagtcaaagggggttgttctttggtgggcaggggcaggggtctcaaggtgctcagtgggggagcttctgtggttttaacagggcgagccccaaaagcagatgcaggaatgtaaggatcattattcat

SEQ ID NO: 125986 - DNA, 1710 bp, Homo sapiens
atggggaaaaaacagaacagaaaaactggaaactctaaaaagcagagcacctctcctcctccaaaggaacgcagttcctcaccagcaacggaaaaaagctggatggagaatgactttgacgagctgagagaagaaggcttcagacgatcaaattactctgagctacgggaggacattcaaaccaaaggcaaagaagttgaaaactttgaaagaaatttagaagaatgtataactagaataaccaatacagagaagtgcttaaaggagctgatggagctgaaaaccaaggctcgagaactatgtgaagaatgcagaagcctcaggagccgatgcgatcaactggaagattgcttattaaaaaaactccattctcatcaggctaatccagaatttgatttaataactgagcatctaactctttgtattagaatatcaattcaaataaaagcttaccttagcctctcaaaggcccaatcctctctaagccatcggcctccaacataccttgcatatctcttcaatgggttcaggcttttcaaaaatctgaaagcctacctgcacccaggtgaaataaacagctttattgctcacacaaagcctgtttggtggtctcttcacacagacgcacatgaaatttggtgccgtgactcggatttgaaattggttcccacgctgcccctaatcccgcttgaagcagccctgagaaacatcacccattctctctccataccaccgcccaaaaattttcgccgccccaacacttcaacactattttgtgttatttttcttattaatataagaaggcaggaatatcaggcctctgagcccaagccaagccatcgcatcccctgtgacttgcagagaataaaatacctaggaatccaacttacaagggatgtgaaggacctcttcaaggagaactacaaaccactgcgcaatgaaataaaagaggatacaaacaaatggaagaacattccatgctcatgggtaggaagaatcaatatcgtgaaaatggccatactgcccaagcctctgctggtgatacccaggcaaacagggtctggaatggacccccagcaaacttcaggagacctgcagaagtgcctgactgttctaaggaaaactaacaaacagaaagcaatagcatcaacatcaagaaaaaggatgaccatgcaaaaactccatctgaaggaaaaactcatcaacagcaaagaccaaagaaccaacgacaaaaaccacatgattatctcaatagatgcagaaaaggccttcaataaaactgaacatcgcttcatgctaaaaacactcaataaactagaaattaactcaagatggattaaagatttaaatgtaaaacctaaaaccataaaaaccctagaagaaaacctaggtaataccattcaggacatagtcatggacaaagacttcatgactaaaacaccaaaagcaatggcaacaaaagccaaaattgacaaatgggatctaattaaactaaagagcttctgcacagcaaaagaaactatcatcagagtgtacaggcaacctacagaacgggagagcatttttgtaatctatccatctgacaaaggtctaatatccagaatctacaaggaattagctattccagggaagggcaattcctccaatgtcagcaaggacagtaagatgtcaaagcatcagaaaatgcaaggggaaaacaagcacgattaa

SEQ ID NO: 125987 - DNA, 2709 bp, Homo sapiens; identical to SEQ ID NO: 121954

SEQ ID NO: 125988 - DNA, 1788 bp, Homo sapiens
atggatgacactggaagccataattctcagcaaactaacacaggaacagaaaaccatacaccacgttttttcacacataagtgggagctgagcaatgagaacacatggacacagggaggagaatatcacacactggggcctgtcagggggcccagaggcttggagaaagaatatttcagggacccgccaaggacactgttgcctgctcagcttggaaggttactccctgcaaccagggtgctccagctccagatgtggctcaaaggccccagggattttgccgatttgggaaccacccatcaaacaggattttcgcctgctggggcaaaccagcgtggaccgcttgctgcaactttctcagggccaggcggtgaagggcaatcagctgttgcccgtctcactggtgaaaagaaaaaccaccctggcgcccaatacgcaaaccgcctctccccgcgcgttggccgattcattaatgcagctggcacgacaggtttcccgactggaaagcgggcagtgagcgcaacgcaattaataccagtacgcgggaaccggccccagaatcaatattttcccactgggtccttcccccatgggaataagggaagtccaattcaagatgagattggggtgaggcccaagaacccaaacccatatcagtcagtaaaagatattagaagatccagcttcatggtgattgagtgtgacaatctaaaaacttgtcacacttcacatggatctgtcatggcggaaacagcggttatcaatcacaagaaacgtaaaaatagcccgcgaatcgtccagtcaaacgacctcactgaggcggcatatagtctctcccgggatcaaaaacgtatgctgtatctgttcgttgaccagatcagaaaatctgatggcaccctacaggaacatgacggtatctgcgagatccatgttgctaaatatgctgaaatattcggattgacctctgcggaagccagtaaggatatacggcaggcattgaagagtttcgcggggaaggaagtggttttttatcgccctgaagaggatgccggcgatgaaaaaggctatgaatcttttccttggtttatcaaacgtgcgcacagtccatccagagggctttacagtgtacatatcaacccatatctcattcccttctttatcgggttacagaaccggtttacgcagtttcggcttagtgaaacaaaagaaatcaccaatccgtatgccatgcgtttatacgggggatcctctagagtcgaaaagcgactgttggtggtctttcacaggaacgtgcatgaaattggtgctgtgacaggatcgggggacttccctgggagatcaatcccccgtcctcttgctcttggctccgtgagaaagatccacctacgacctcaggtcctcagacctaccagcccaagaaacatctcaccaatttcaaatccgggatgcctctctgattatacacccacgtttcaagggtgtcagaccatgcagggacgcctgccttggtccttcacccttagcggcaagtcccgcttttctggggaaggagcaaagacaaaagagacacgttttatctgtggaccccaaactccggcgccggtcacggactgggaaggcagccttcccttggtgtttaatcattgcagggatgcctctctgattatacacccacgttcaaggggtcagaccatgcagggacgcctgcttggtcggggatctctagagtcgaaaagcgggtatgcaagccaagttgtctctgtttccaggaagaaccagggtttttag

SEQ ID NO: 125989 - DNA, 1134 bp, Homo sapiens
ctaagccaagaagatctgggaagcagtcagagagccttgggccagagttccaggggctctgggagtggatgccaggtgagttggacagtccaatttccagtggggtcccgcacagatgggacgtggcttaggaggaatcctgggctgcaggcattccttggcctggtggccggatttctggcacttgtagcaagctcctgggggaggaggttctggaggaatgcctggccgctgaggttcaggcgtttggaagttcttgtgtgctggagacatggctgaggtttgtctcacagtgaaggcaaggaattgcaacttttttctattattgtacaccttgaaggtgaggttaattaaattcgctaagggtgaaggactaaggcaggcgtccctgcgtggtctgacacctctaaaacctgggtgaataatcagagaggcgtccctgcaatgattaaacaccaagggaaggctgccttcccagtccgtgaccggcgccggagttttgggtccacggataaaacgtgtctcctttgtcagatttgaaattggtgagatgtttcttgggctggtcggtctgaggaccataggtggatctttctcaaggagcaaagaacaggaggacctcccaagggaggtcacgatctgagtcacggcaccaaatttcatgcatgtgtgcagcttccacttggatggaaaggacagcatatggaggttcacatcgtgaacttttgctccaacaactgccacaggaacataccaggaaaaccctgcccctgcagcaaacttctgcctggacatacaggcttttccatacatcctgcgaaatataggcaaaggttcccaaacctcaattcttgatttctgagcacccacgggcccaacacctcctggaagctgccaatgctttggccttgcaccctctgaagccatggtctgagctgtatcttgtccccttttagtcaaggctagagtggctaggatgcagggcaccaagtctctaggcttattccagttcccaacaaattcctcatctccatctgagatgacctcagcctgaatttcatcgtccatatcattatcagcattttggtcaaagccattgaaaatgtttccaggaagttccaaactttcccacat

SEQ ID NO: 125990 - DNA, 1200 bp, Homo sapiens
atgagtgaactcccattcacaattgcttcaaagagaataaaatacctaggaatccaacttacaagggatgtgaaggacctcttcaaggagaactacaaaccactgctcaaggaaataaaagaggatacaaacaaatggaagaacattccatgctcatgggtaggaagaatcgatatcgtgaaaatggccatactgcccaaggtaatttatagattcaatgccatccccatcaagctaccaatgactttcttcacagaattggaaaaaactactttaaagttcatatggaaccaaaaaagagcctgcatcgccaagtcaatcctaagccaaaagaacaaagctggaggcatcacgctacctgacttcaaactatactacaaggctacagtaaccaaaacagcatggtactggtaccaaaacagacacatagaccaatggaacagaacagagccctcagaaataatgctgcatatctacaactatctgatctttgacaaacctgacagaaacaagcaatggggaaaggattccctatttaataaatggtgctgggaaaactggctagccatatgtagaaagctgaaactggatcccttccttacaccttacacaaaaattaattcaagatggattaaagacttaaatgttagacctaaaaccataaaaaccctagaagaaaacctaggcaataccattcaggacataggcatgggcaaggacttcatgtctaaaacaccaaaagcaatggcaacaaaagccaaaattgacaaatgggatctaattaaactaaagagtttctgcacagcaaaagaaactaccatcagcatgaacaggcaacctacagaatgggagaaaatttttgcaacctactcatctgacaaagggctaatatccagaatctacaatgaactcaaacaaatttacaagaaaaaaacaaacaaccccatcaaaaagtgggcaaaggacatgaacagacacttctcaaaaaaagacatttatgcagccaaaagacacatgaaaaaatgctcatcatcactggccatcagagaaatgcaaatcaaaaccacaatgagatgccatttcacaccagttagaatggtgatcattaaaaagtcaggaaacaacaggtgggaactgaacaatgacaacacatggacacgggaaggggaacatcacacaccggggactattgtggggtag

SEQ ID NO: 125991 - DNA, 1044 bp, Homo sapiens
atgggagaatttaacaccccactgtcaacattagacagatcaacaagacagaaagttaacaaggatatccaggaattgaactcagctctgcaccaagcggacctaatagacatctacagaactctccaccccaaatcaacagaatatacattcttttcagcaccacaccacacctattccaaaattgaccacatagttggaagtaaagcactcctcagcaaatgtaaaagaacagaaatgataacaaactgtctctcagaccacagtgcaatcaaactagaactcagggttaagaaactcactgaaaaccactcaactacacggaaactgaacaacctgctcctgaatgactactgggtacataacaaaatgaaggcagaaatgatgttggaagttctggccagggcaatcaggcaggagaaggaaataaaaggcattcaattaggaaaagaggaagtcaaattgtccctgtttgcagatgacatgattgtatatctagaaaactccatcatctcagccctaaatctccttaagctgataggcaacttcagcaaagtttcagcatacaaaatcagtgtgcaaaaaccacaagcattcctatacgccaataatagacaaacagagagccaaattgtgagtgaactcccattcacaatttcttcaaagagaataaaacacctaggaatccaacttacaagggatgtgaaggacctcttcatggagaactacaaaccactgctcaatgaaataaaagaggatacaaacaaatggaagaacattccatgctcatgggtaggaagaatcaatatcgtgaaaatggccatactgcccaaggtaatttgtagattcaatgccatccccatcaagctaccgatgagtttcttcacagaattggaaaaaactactttaaagttcatatggaaccaaacaagagcccacattgccaagtcaatcctaagccaaaagaacaaagctagaggcatcacactacctgacttcaaactatactacaaggctacagtaaccaaaacagcatggtactga

SEQ ID NO: 125992 - DNA, 1096 bp, Homo sapiens
aaatacaaactaccatcagagaatactataaacacctctatgcaaataaactagaaaatccagaagaaatggataaattcctggacacatacaccctcccaagactaaaccaggaagaagttgaatctctgaatagaccaataataggctctgaaattgaggcaataatcaatagcttaccaaccaaaaaaagtccaggaccagatggattcacagccaaattctatcagaggtacaaagaggagctgacaaacagccaaatcgtgagtgaactcccattcacaattgcttcaaagagaataaaatacctaggaatccaacgtacaagggatgtgaaggacctcttcaaggagaactacaaaccactgctcaatgaaataaaagaggatacaaacaaatggaagaacattccatgctcatgggtaggaagaatcaatatcatgaaaatggccatactgcccaaggtaatttatagattcaatgccatctccatcaacctaccaatgactttcttcacagaactggaaaaaactactttaaagttcatatggaaccaaaaaagagcccgcattgccaagtcaatcctaagccaaaagaacaaatctggaggcatcatgctacctgacttcaaactatactacaaggctacagtaaccaaaacagcatggtactggtaccaaaacagagatatagaccaatggaacagaacagagccctcagaaataatgccacctatctacaactatctgatctttgacaaacctgagaaaaacaagcaatggggaaaggattccctatttaataaatggtgctgggaaaactggctagccatatgtagaaagctgaaactggatcccttccttacaccttatataaaaattaattcaagatggattaaagacttaaatgttagacctaaaaccataaaaaccctagaagaaaacctaggcattaccattcaggacataggcatgggcaaggacttcatgtctaaaacaccaaaagcaatggcaatgaaagccaaaattgacaaatgggatctaattaaactaaagagcttctgcacagcaaaagaaactaccatcagagtgaacag

SEQ ID NO: 125993 - DNA, 1843 bp, Homo sapiens
atggataaattcctcaacacatacactctcccaagactaaaccaggaagaagttgaaactctgaagagaccaataacaggagctgaaattgaggcaataatcaataacttaccaaccaaaaacagtccaggaccagatggattcacagccgaattctaccagaggtacaaggaggaaatggtaccattccttctgaaattattccaatcaatagaaaaagagggaatcctccctatctcattttatgaggccagcatcattctgataccaaagcctggcagagacacaaccaaaaaagagaattttagaccaatatccttgatgaacactgatgcaaaaatcctcaataaaatactggccaaccaaatccagcagcacatcaaaaagcttatccactgcgatcaagtgggcttcatccctgggatgcaaggctggttcaatatacacaaatcaataaatgtaatccagcatataaacagagcaaaagacaaaaaccacatgattttttccatagatgcagaaaaggcctttgacaaaattccacaacccttcatgctaaaaactctcaataaattagagaataaaatacctaggaatccaacttacaagggatgtgaaggacctcttcaaggagaactacaaaccactgctcaaggaaataaaagaggatacaaagaaatggaagaacattccatgctcatgggtaggaagaatcaatatcgtgaaaatggccatactgccgaaggtaatttacagattcagtgccatccccatcaagctaccaatgactttcttcacagaattggaaaaaactactttaaagttcatatggaaccaaaaaagagcccgcatcgccaagtcaatcctaagccaaaagaacaaagctggaggcatcacactacctgacttcaaactatactacaaggctacagtaaccaaaacagcatggtactggtaccaaaacagagatatagatcaatggaacagaacagagccctcagaaataacaccgcatacctacaactatctgatctttgacaaacctgagaaaaacaagcaatggggaaaggattccctatttaataaatggtgctgggaaaactggctagccatatgtagaaagctgaaactggatcccttccttacaccttatacaaaaatcaattcaaggtggattaaagatttaaacgttaaacctaaaaccataaaaaccctagaagaaaacctaggcattaccattcaggacataggcgtgggcaaggacttcatgtccaaaacaccaaaagcaatggcaacaaaagccaaaattgacaaatgggatctaattaaactaaagagcttctgcacagcaaaagaaactaccatcagagtgaacaggcaacctacaacatgggagaaaattttcgcaacctactcatctgacaaagggctaatatccagaatctacaatgaactcaaacaaatttacaagaaaaaaacaaacaaccccatcaaaaagtgggcgaaggacatgaacagacacttctcaaaagaagacatttatgcagccaaaaaacacatgaaaaaatgctcatcatcactggccatcagaaaaattctttttaaaaaaataagttctacctttattttagattctggggttacattgcagcgtttggatttcaacattctcttgaatcttgttgatcttctttgtcaccctgattctgaattttatgtctgtcatttcagacatttcaatctggttaggatccaccagggagctaatgcaatttttgcagacttctcttgccagatggctgtgctcttccaggtgttcagagccatggggctgtctgggtaa

SEQ ID NO: 125994 - DNA, 4254 bp, Homo sapiens
atgggctgcctggggacccagagagctcccagggcctttctgctgcttcctctacccctgcactttgctcagctctctaacctgactcagctccaggcagcggcttccctttccatggtgacccaccggagctctggaggtggtggggagcgaggagcgacagcagcaggaaccgaacagggcggcgcctgcctggcagcgtcactcttgcggggcctgtgggacgcaggtgaagttactcccattagggttagggttaggccatatgatcctttcaccctggctccgcttcacgagcacagtgaagcccagtgtgtcgcatcaccctctctgactgtgactaaggagaaatcgctgcttcccaagagcctgctggcgggttctcgggaagtagcgcgcagccgtgccctttgccatggacaggcccgcccaccacccaggccccaggtcacgcaacagcgcacccagctccagggacaacgcatcctccaatggaggccggcgacagagggtccccacagtcccaggagggggtctgattctgcaaagggaacacatcctcctaccactgggacctgccctccgcgccgcaggcaaggagccggctacagccgctacaattccggagagtcccggaggcgactcggacgacagcaggacctagtagcgcgcagcgacgagcagcgagatccagcgcctgcgacaaggagagaagacaaaatgatagaagagctgcagccctttggggagcacagacctaggagatccccaagccagggctgtgacaccctctttcaggctctgtggttcctggcatctccaagcttccagcggggagggcagctccaggtgctggccctctgcaaggctgcggctggaccaggtgcaccacaggcagcttctacagctggcaccagggaacatgggtatgcctggaagcttggagacaccaggaaccacagagctctgaagaggaagtcacagacctggctcagacggttcccagctggttgtcctgatgtctgctctgctctggctgatctcagggcttttatgggcctcagaggggaggaagtgtgtgccgattggtccatgggtggccatgggagtggggagtgcaggagggggactggtgggcagagggctgtggttcctaaatctccagttcaagaaaaaggcaaagagcccttgagtcttctacagtatttcatggtggatgaaaaagaaagatttctcagaattacctcagaacatgaagacaatgataatagcaacaatagtagtaatcatagcagtatcaatgagacaaaagagacatgttttatccatgaacccaaaactccggcgccggtcacggactgggaaggcagccttcccttggtgtttaatcattgcagggatgcctctctgattatacactcatgtttcaagggtgtcagaccacacagggacgcctgccttggtccttcacccttagtggcaagtcccgctttcctggggcaggggcaagtacccctcaaccccttctccttcacccttagcggcaagtcccactttcctgggacaggggcaagaacttgttacaagtgccagaaatctgaccaccaggccaaggaatgcctgcggcccaggattcctcctaagccatgtcccatctgtgcgggaccccactggaaatcggactgttcaactcacctggcagccactcccagagcccctggaactctggcccaaggctgactgactccttcccagatcttctcggcttagcggctgaagactgacactgcttgatcgcctcggaagtcccctggaccatcacagaagccgagcttcgggtaactctcacagtggagggtaagtccatcccctgtttaatcgatacgggggctacccactccacgttgccttcttttcaagggcctgtttcccttgcccccataactgttgtgggtattgacggccaagcttcaaaacccctgaaaactcccccactctggtgccaacttggacaacactcttttatgcactcttttttagttatccccacctgcccacttcccttattaggccgaaatattttaaccaaattatctgcttccctgactattcctggagtacagctacatctcattgctgcccttcttcccaatccaaagcctcctttgtgtcctctaacatccccacaatatcagcccttaccacaagacctcccttcagcttaatctctcccactctaggttcccacgccgcccctaatcccacttgaagcagccctgagaaacatcgcccattctctctccataccaccccccaaaaattttcgccgctccaacacttcaacactattttgttttatttgtcttattaatatcagaaggcaggaatgtcaggcctctgagcccaggccaggccatcgcatcccctgtgacttgcacgtatacatccagatggcctgaagtaactgaagatccacaaaagaagtgaatatgccttgccccaccttaactgatgacattccaccacaaaagaagtgtaaatggccggtccttgccttaactgatgacattaccttgtgaaagtcctcttcctggctcatcctggctcaaaaagcacccccactgagcaccttgagacccccactcctgcccgccagagaacaaaccccctttgactgtaattttcctttacctacccaaatcctataaaacggccccacccttatctcccttcactgactctcttttcggactcagcccgcctgcacccaggtgaaataaacagctttattgctcacacaaagcctgtttggtggtctcttcacacggacgcacatgaaatttagttgtatccataaggcatatggaggagactaattcctcttccaaagacatgtaccagagtcctggagaggctgagggctggaggtggaagaaaggctctgacaggggtcagaatctgttcaggaaacatagcaaatgcctgatacttttaattagagaaaggtttgaatctccacattcatatatttgcagtccagtgacctttcagtttttttatgcccaaagtgtcaagcatgttaatgttaccattgactgcctccctgaaggtgcagctaccaggggaactgccaggacttcaaagcccacaaccaaaagccagaaaacactaccaagtacaagccccggacactggacccagagcacaccctgggcatctgctctgagatcctctccctggacagagacagctgctccttcagaaacagaggagaccctgaacacaggcaggcctcctgagcttccagccagggccacagccacatggttcagtgcctcccacactctcccagccttggctaccaggagggtggccagaactcagtggttgacagctgacagacagacgtgggcttccatatcgtccgtgccctgggctcagaccatcagtgagaaaaaacctggagggtctctctgggaaactcgttcttccccaccgactactgcagggaccgaggaagccatgaacactacaagccttttggcgcctgctgctgagataatggccacacctggcagcccatcccaggccagccctacctcgggagcattcacccatggcacacagactccgagtccaaccaaggcaacagcccccagatatccacaaacaggtgatctctctgcagagtggccattcactgctggtgaagagccagtcctggtcccaagaccccatcaagtttcaaggtgtcctcagccactcttcaaggtgggagctatggcagctgctcctctcaccctggctattcagaggctcaacccatgcctgatggagctgtgccaattcttccagcaatgcctctgcatgagccagaggagtcccaggacagaggacatgagatactgtcttgaatactattcctggtttctgaagaatgcaacatatatctgtcagagggtgaaaagggtgtcccactcgcacaccttaaagcaaaagtgccttgagaatatctgcaagtctgtgtgaggccttgaaaataacactagggcataacaattacttcaggggatacgccatccaccctggctcttgtcccaagtgggctacatttgaagaattcacccaggctccagctagatcatcagttaatttaaagtggttattcttggaagtagcattttttttccctctcctgtgaatctgtgcaaaacattgaaggtagaagttttcttgttaaaaaaaaaggaattc

SEQ ID NO: 125995 - DNA, 1479 bp, Homo sapiens
atgactgacgagctgagagaagaaggcttcagacgatcaaattactctgagctacgggaggacattcaaaccaaaggcaaagaagttgaaaactttgaaaaaaatttagaagaatgtataactagaataaccaatacagagaagtgcttaaaggagctgatggagctgaaaaccaaggctcgagaactacccaggaagctgctggtctgtcctgcgagcttccctggggtcttctccatgcgagcgcagcagtgcccctcccgtgctccgactgttgtcatcactgcaagcctcgtgtttagctttcataaagccatcctgacaaatccgttccgctctttccttaatcattcctgctgcgattctctaaacaacgcccgatttgttgacatctccagggatgttcagctaagagctgtacatagaatccaggactcttttggagtcttcttggaggcgacaaccaaagataaagccacctcttacatttggtcatctttgcagacaggtaaagtggagtcaaaaggcaagagagcaaggactgcccttgagttttttggtgtcagaagagggtcagacattaaggattgtggcacattgcctaggtatgcaagtgccctgagctccctggtgttgaaaggcagctgcgcctatcaggactgtgagaccaagaggaggaatcttgcctctgtcatcatcaggatgagagtgtccattgcccatccacctatgacctcaggtcctcagaccgaccagcccaagaaacatctcaccaatttcaaatccgagacaaaagagacatgttttatccatgaacccaaaactctggcgccggtcacggactgggaaggcagccttcccttggtgtttaatcattgcagggacggcctctctgatcattcagccacatttcaagggtgtcagaccatgcagggatgcctgccttggtccttcacccttagcggcaagtcccgctttcctggggcaggggcagcggcaagtcccgctttcctggggcaggggcaggtgcccctcgaccccttctccttcaccctcagcggcaagtcccgctttcctggggcaggggcagcggcaagtcccgctttcctggggcaggggcaggtgcccctcgaccccttctccttcaccctcagcggcaagtcccgctttcctggggcaggggcagcggcaagtcccgctttcctggggcaggggcaggtacccctcaaccccttctccttcaccctcagcggcaagtcccgctttcctggggcaggggcagcggcaagtcccgctttcctggggcaggggcaggtgcccctcaaccccttctccttcaccctcagcggcaagtcccgctttcctggggcagcggcaagtcccgctttcctggggcaggtacccctcgaccccttctccttcaccctcagcggcaagtcccactttcctggggcaggacttgccgctttcctggggtag

SEQ ID NO: 125996 - DNA, 2785 bp, Homo sapiens
atgcacacagccccgtttatttttccagtgaagcgcactgtccctgaccccggtgaatactgggatggtagtcctgtagccacgggaccggaaagtctgggagtctttatgaaactacatctcccagcaaccctggcgacctggggctccagtcccaccgcagactctggtgggacgtgggtggcgcaagcacatcttggccctgcgactcagcttgagggggcccaagctgtcccactgagcaagcgcccagcaggccgccgtgctgtgggtcctggtcctcctggcatttgttggggtgcggaggccaccgaggagtctgaggtgttggaagttctggccagggcaatcaggcaggagaaggaaataaagggtattcaattaggaaaagaggaagtcaaattgtccctgtttgcagacgacatgattgtttatctagaaaaccccatcgtctcagccgaaaatctccttaagctgataagcaacttcagcaaagtctcaggatacaaaatcaatgtacaaaaatcacaagcattcttatacaccaacaacagacaaacagagagccaaatcatgggtgaactcccattcacaattgcttcaaagagaataaaatacctaggaatccaacttacaagggatgtgaaggacctcttcaaggagaactacaaaccactgctcaaggaaataaaagaggacacaaacaaatggaagaacattccatgctcatgggtaggaagaatcaatatcgtgaaaatggccatactgcccaaggtaatttacagattcaatgccatccccatcaagctaccaatgactttcttcacagaattggaaaaaactactttaaagttcatatggaaccaaaaaagagcccgcattgccaagtcaatcctaagccaaaagaacaaagctggaggcatcacactacctgacttcaaactatactacaaggctacagtaaccaaaacagcatggtactggtaccaaaacagagatatagatcaatggaacagaacagagccctcagaaataatgccacatatctacaactatctgatctttggcaaacctgagaaaaacaagcaatggggaaaggattccctatttaataaatggtgctgggaaaactggctagccatatgtagaaagctgaaactggatcccttccttacaccttatacaaaaatcaattcaagatggattaaagatttaaacgttaaacctaaaaccataaaaaccctagaagaaaacctaggcattaccattcaggacataggcgtgggcaaggacttcatgtccaaaacaccaaaagcaatggcaacaaaagccaaaattgacaaatgggatctaattaaactaaagagcttctgcacagcaaaagaaactaccatcagagtgaacaggcaacctacaacatgggagaaaattttcgcaacctactcatctgacaaagggctaatatccagaatctacaatgaactcaaacaaatttacaagaaaaaaacaaacaaccccatcaaaaagtgggcgaaggacatgaacagacacttctcaaaagaagacatttatgcagccaaaaaacacatgaagaaatgctcatcatcactggccatcagagaaatgcaaatcaaaaccactatgagatatcatctcacaccagttagaatggcaatcattaaaaagtcaggaaacaacagtctaattgtcggcgccagcatggacacctccctcctctccgggccgattccgtatgatatacaacactttgatcgtttcggaagcgtgacagttcgacgcgggtgcgcgatcgagttttacaacacaatgtcacaactggatccaaaaattcctttggaaatgcaagggacccagaataaccaaaacaatcttggaaaagaatgaagttggagaatttacacttcttgatttcaaaacttaccacaaatttgcagtaatcaaaactatgtggtactggcataaggacagatacattgatcaacagaatgacattgaaagtccagaaataaattcatatgtttatggtcaactgatttttgacaaagactcagcccgcctgcacccaggtgaaataaacagtcttgttgctcacacaaagcctgtttggtggtctcttcatatggacgcgcatgaaatttggtgccgtgactcggattgggggacctcccttgggagatcaatcccctgtcctcctgctctttgctccatgagaaagatccacctacgacctcgggtcctcagaccgaccagcccaaggaacatctcaccaatttcaaatctgcatgctttgaaaggattaaagcctgctatcactcgcctgctacagcatggccttttaaagcctataaactctccttacaattcccccattttacctgtcctaaaaccagataagccttacaagttagttcaggatctatgccttatcaaccaaattgtttttcctatccaccccgtggtgccaaacccatatactctcctatcctcaatacctccctccacaatccattattctgttctggatctcaaacttgctttctttactattcctttgcatgcttcatcccagcctctctccgctttcacttgggctgaccctgacacccatcaggttcagcaaattacctgggctgtactgccacaaagcttcacagacagcccccattacttcagtcaagcccaaatttcttccttatctgttacctatctcagcataattctcataaaaacacacgtgctctccctgccgattgtgtctgactaa

SEQ ID NO: 125997 - DNA, 3847 bp, Homo sapiens
atgacaggatcaaattcacacataacaatattaactttaaatataaatggactaaattctgcaattaaaagacacagactggcaagttggataaagagtcaagacccatcagtgtgctgtattcaggaaacccatctcatgtgcagagacacacataggctcaaaataaaaggatggaggaagatctaccaagcaaatggaaaacaaaaaaaggcaggggttgcaatcctagtctctgataaaacagactttaaaccaacaaagatcaaaagagacaaagaaggccattacataatggtaaagggatcaattcaacaagaggagctaactatcctaaatatttatgcacccaatacaggagcacccagattcataaagcaagtcctgagtgacctacaaagagacttagactcccacacattaataatgggagactttaacaccccactgtcaatattagacagatcaacgagacagaaagtcaacaaggatacccaggaattgaactcagctctgcaccaagcagacctaatagacatctacagaactctccaccccaaatcaacagaatatacatttttttcagcaccacaccacacctattccaaaatcgaccacatagttggaagtaaagctctcctcagcaaatgtaaaagaacagaaattataacaaactatctctcagaccacagtgcaatcaaactagaactcaggattaagaatctcactcaaagccgctcaactacatggaaactgaacaacctgctcctgaatgactactgggtacataacgaaatgaaggcagaaataaagatgttctttgaaaccaacgagaacaaagacaccacataccagaatctctgggacgcattcaaagcagtgtgtagagggaaatttatagcactaaatgcctacaagagaaagcaggaaagatccaaaattgacaccctaacatcacaattaaaagaactagaaaagcaagagcaaacacattcaaaagctagcagaaggcaagaaataactaaaatcagagcagaactgaaggaaatagagacacaaaaaacccttcaaaaaatcaatgaatccaggagctggttttttgaaaggatcaacaaaattgatagaccgctagcaagactaataaagaaaaaaagagagaagaatcaaatagacacaataaaaaatgataaaggggatatcaccaccgatcccacagaaatacaaactaccatcagagaatactacaaacacctctacgcaaataaactagaaaatctagaagaaatggatacattcctcgacacatacactctcccaagactaaaacaggaagaagttgaatctctgaatggaccaataacaggctctgaaattgtggcaataatcaatagtttaccaaccaaaaagagtccaggaccagatggattcacagccgaattctaccagaggtacaaggaggaactggtaccattccttctgaaactattccaatcaatagaaaaagagggaatcctccctaactcattttatgaggccagcatcattctgataccaaagccgggcagagacacaaccaaaaaagagaattttagaccaatatccttgatgaacattgatgcaaaaatcctcaataaaatactggcaaaccgaatccagcagcacatcaaaaagcttatccaccatgatcaagtgggcttcatccctgggatgcaaggctggttcaatatacgcaaatcaataaatgtaatccagcatataaacagagccaaagacaaaaaccacatgattatctcaatagatgcagaaaaagcctttgacaaaattcaacaacccttcatgctaaaaactctcaataaattaggtattgatgggacgtatttcaaaataataagagctatctatgacaaacccacagccaatatcatactgaatgggcaaaaactggaagcattccctttgaaaactggcacaagacagggatgccctctctcaccgctcctattcaacatagtgttggaagttctggccagggcaatcaggcaggagaaggaaataaagggtattcaattaggaaaagaggaagtcaaattgtccctgtttgcagacgacatgattgtttatctagaaaaccccattgtctcagcccaaaatctccttaagctgataagcaacttcagcaaagtctcaggatacaaaatcaatgtacaaaaatcacaagcattcttatacaccaacaacagacaaacagagagccaaatcatgggtgaactcccattcacaattgcttcaaagaggataaaatacctaggaatccaacttacaagggatgtgaaggacctcttcaaggagaactacaaaccactgctcaaggaaataaaagaggacacaaacaaatggaagaacattccatgctcatgggtaggaagaatcaatatcgtgaaaatggccatactgcccaaggtaatttacagattcaatgccatccccatcaagctaccaatgactttcttcacagaattggaaaaaaactactttaaagttcatatggaaccaaaaaagagcccgcattgccaagtcaatcctaagccaaaagaacaaagctggaggcatcatgctacctgacttcaaactatatactacaaggctacagtaaccaaaacagcatggtactggtaccaaaacacagatatagaccaatggaacagaacagagccctcagaaataatgctgcatatctacaactatctgatctttgacaaacctgagaaaaacaagcaatggggaaaggattccctatttaatatatggtgctgggaaaactggctagccatatgtagaaagctgaaactggatcccttccttacaccttatacaaaaattaattcaagatggattaaagacttaaatgttagatctaaaaccataaaaaccctagaagaaaacctaggcaataccattcaggacataggcatgggcaaggacttcatgtctaaaacaccaaaagcaatggcaacaaaagccaaaattgacaaatgggatctaattaaactaaagagcttctgcacagcaaaagagactaccatcagcgtgaacaggcaacctacagaatgggagaaaatttttgcaatctactcatctgacaaagggctaatatccagaatctacaatgaactcaaacaaatttacaagaaaaaaacaaaacaactgcatcaaaaagtgggcgaaggacatgaacagacacttctcaaaagaagacatttatgcagccaaaaaaacacatgaaaaaatgctcaccatcactggccatcagagacaatgcaaatcaaaaccacaaatcaaaaccacaatgagataccatctcacaccagttagaatggcaatcattaaaaagtcaggaaacaacaggtgctggagaggatgtggagaaataggaacacttttacactgttggtgggactgtaaactagttcaaccgttgtggaagtcagtgtggcgattcctcagggatctagaaccagaaataccatttgacccagccatcccattactgggtatatacccaaaggactctaaatcatgctgctataaagacacatgcacacgtatgtttattgcggcattattcacaatagcaaagacttggaaccaacccaaatgtccaacaatgatagactggattaagaaaatgtggcacatatacaccatggaatactatgcagccataaaaaatgatgagttcgtgtcctttgtagggacatggatgaaattggaaatcatcattcttagtaaactatcgcaagaacaaaaaaccaaacactgcatattctcactcataggtgggaattga

SEQ ID NO: 125998 - DNA, 795 bp, Homo sapiens
tttggtggctcatgcttgtaatcccagctactcaggaggcagagacaggagaatctcttgaacttaggagcaggaggttgcagtgagtcgagactgcaccactgcactccagcctaggcaacagaggaagactctcatctcaaaaaaaataataaattttaaaaaataaataaatgaaataaaacaaagtagaaaccatcagggctttgaggttgggactgtggcatgccgaggggaggctgcaggggtcactgggaaacatcagggtccttcttcggttgcctgagcagcaccggtgtcctcaagccacattcagctgcatggcgccaatgctaagcagaaagaggaatcggaggcgccgagctggggcaagggtgggagccaagggagtggacacagcaggtagggccgggagacttgggtgaagcagtggaagccagagttctgaccctgctggagaagtgtcatgagggcctcagacaggttcacccactgagcaggaggtcttgcagcctgacccaccctgcatcctgttcaggccgggatcatctccttcctgggcttcttctggcccctttctgcatctcttcttgacaacatggcacaaatgaccagggttcttcccacctcaggtctttctgtggcttcctgctgcctgccatctatgttagccccaccgaccttaccctccacatcactgttttcctgtctgtcacccgtaagactttcagtgcctggggccttttcacatgggagtctgctttggagactgctccccttgcctgcttagccccc

SEQ ID NO: 125999 - DNA, 588 bp, Homo sapiens
caatggcagatgagtctggggaccagcgaagaccaccagcacttcacctgcaccatctggaggccccaggggaagtcctatctgtacttcacacagttcaaggcagaggtgcggggcgctgagattgagtacgccatggcctactctaaagccgcatttgaaagggaaagtgatgtccctctgaaaactgaggaatttgaagtgaccaaaacagcagcaccggtgtcctcaagccacattcagctgcatggcgccaatgctaagcagaaagaggaatcggaggcgccgagctggggcaagggtgggagccaagggagtggacacagcaggtctttctgtggcttcctgctgcctgccatctatgttagccccaccgaccttaccctccacatcactgttttcctgtctgtcacccaagatgagcacgacagggttgccagggcctcctgtgcagaaaaggccgtgggaaacagtgcctaccaccagtaccctggccaaggcacccaaaataaccttcctgacctgcagcagcattttgcaatctttgagaacccctgccccctgctgacaaacaaaaatggcaaatag

SEQ ID NO: 126000 - DNA, 1048 bp, Homo sapiens
gcggccgccaacatggcggctctcagcggatgggtggaacggcgtcggcgcgagcttcgtcgggccgcctcgctcctaggggccgtggcgcttttgcttttcggaggcggtgtccgagcccacgacggtggcgtttgacgtgcggcccggcggctgtagagcattccttctgccataacgtgggcccgggggtacgtgccaccgccgacaaatatacgtgtatgttcacttacgcctctcaaggagggaccaatgagcaatggcagatgagtctggggaccagcgaagatcatcaggcacttcacctggcaccatctggaggcccccaaggggaaagtcctatcttgtacttcacacatgttcaaggcagaggttgcggggcgcttgagatttgagtaccgccatggccttacttttaaagccgcattttgaaaagggaaagtgatgtccctcttgaaaacttgaggaattttgaagtgaaccaaaacagcagtgggctcacaaggcccgggggcatttccaaagctgagctgtccaagctggtgattgttggccaaggcatccgcgcactgagctgtgaccagcagcccctgttgcgtggtggcaccttctcatctccggtgaagctgaagggggcctgtgtccctgaaagggcccagcacatcactggttttctaggagggactcttaagttttctacctgggctgacgttgccttgtcccggaggggcttttcagggtggctgaagccctggggcagagaacagagggtccagggccctcctggctcccaacagcttttcaggttcccacttccggtgaagcttttttggactcaggatcgcagatcccggggcacaaagagggtggggaacatgggggctatgctggggaaagcagccatgctccccccgacctccagccgagcatccttcatgagcctgcagaactgctttcctatgtttacccaggggacctcctttcagatgaactgggaagagatgaaatgttttttcatatttaaataaataagaacattaaaaagcaa

SEQ ID NO: 126001 - DNA, 1209 bp, Homo sapiens
atggccctctcctcctggccagtggtcctccgcctgaacatggccgactttgtcttcagtttcctctgcctcggcattggaaccagcatcgtactgggtatcctgttctacctgctgcaggcccacaggtacctgcaggaaggcatgacctaccagctggcactcagcttctacctgacctgggccagtgtcttcctcttcctgatgactggtatgggagaggatgaggaaagtgcccttcagactctcttagatccccgaagctcctacctcctggtctccctggagatcctcccaacaaatcccagtcccctgtcaccttgtgctgtgtccgaggatgaaagcgagatgagggggctttctctgctccgtcgtcagtcccaggcaaccggcagacttgagcccacgttcaagcatgacagcaccctgctggccctccagggggccctgggcctctatgatggacacaccccgccatatgctgcctgcctcggctttgagttccggaagcacctggggaatcccgccaaagatggagggaatgtcaccgtctccctcttctaccgcaatgactccgcccacctgcccctgcctctcagcctccccgggtgcccggccccctgtccactaggccgcttctaccagctgactgccccggcacggcctcccgcccatggggtctcctgccatggcccatatgaggctgtcatccccccagggcctggagctatcataccaagcacagggccagctgtgggcatgcagagagagaggtctgaagtggggagtggcgtgcctgcaaggacggtttatgcatcagaacagcacgcctatatgtggcattcggcgctgattcctgactctggtctgcgtgggaaacctactctctcctccaggaagcccccccagacttcctgcgggccagagtttgccaatgtcctctccctggctctctgcggagcgctggtagtgtgcaaggccagagccatggaccaggcgaggcctcggcagctgattggaatagatgcattaagggatcccagggcaagtagtagaacaagggcaggaggcctgggcatgattcgacggcaggaggaagaaccagcggcccgcacggtgcttgccaggtgcgactcaagccccagcgagtgcccgagccatgcacgggcgccatacgacactggccccctttttaacgcgaagggctaa

SEQ ID NO: 126002 - DNA, 657 bp, Homo sapiens
atggggtttaaaaaggaggaagtggcctgccaaggctgtatagatacttccttcatggagctgccattgaaaccctggcctgttgagtgggttgtcaaggagagtgtggaacaggatatcaggggacatgggtctctactaaatggaatgaaaaagcctactgtgcattctgtgctgatatgtgacagtcttcagagaaaggactcctttcttagatggcatgacccattaaatattgctccaggtcaacagaagaaggaaattgctgtcccgcctcagaaatttcactccagggtcatggcatataaaaactggcaggcttctttaaagatgactttctcaaaggactctgagactggggactgtgggatcaacggaatgtttccaggacttcattctatgaagaattcaatgggcacagagggccacaagggaatgctgtttaaggaagcagaaaaccctgaaggggagaagaaggaggcagccaccttggaaggtgagaagacacttcttgtggaggtggaaaagaatagcaccctctctgagcccggctctggccgggggcctccccaagaggaagaagaggaggaggaagaggaagaggctgccaatgaagatgctgagaccccaggcatcagagatcatgagagtctgtag

SEQ ID NO: 126003 - DNA, 1089 bp, Homo sapiens
gctagcaggaagggtctgcccctggggtctgtagttatctccccagagctcttctcgccggtcggccggcgtagctcgctaagctcgcggggaacaccaacacgaatgttcccacaccactccataactgagtctgtgaactatgatgtgaaaacgtttggatcttctcttcctgttaaagtcatggaagccctaacattggctgaagtcgatgaccagctgaccattaacataaatgaaggtggatgggcttgtctggtgtgcaaagagaagctcattatttggaagattgctctgtcacctattactaagttatccgtttgcaaagaacttcagctgccacctagagatttccactggagtgccgacttagtggctctttcttactcttctccctcaggtgaagcacattctactcaggctgttgctgtcatggttgccaccagagaaggatctatccgctattggccaagccttgctggtgaagatacctacacagaggcttttgtagattcgggaggtgataagacttacagtttcctaacagcagtgcagggaggaagttttattttgtcttcatcaggaagccaactaattcggttgatacctgagagctcaggaaagattcatcagcatatcctgcctcaggggcaaggcatgctttcaggaattggtcgaaaagtttcttctctttttggaattttatctcctagtagtgatctcacactttcaagtgttctctgggatagagagagatcaagcttttatagcctgacgagttcaaacatcagtaaatgggaattagatgattcttcagaaaagcatgcatacagttgggatataaatagagccctgaaggaaaacattaccgatgctatttggtccatatgccaagtgacacagaacgctcctcactttgaatgcggcctagagcaggaaggagctctgcagaaggcccaggctgcaggcaaagaagccttgctttggaccatatggttcagcaggcccaaagatgctggaggtatcaatggtggaggagattcagtaaggagtttaatcaatggtggaggagattcagtgaggagttga

SEQ ID NO: 126004 - DNA, 1801 bp, Homo sapiens
atgaagaggaggttcaggggaaaggatgaagaggaggttcaggggaaaggatgaagaggaggttcaggggaaaggatcaagaggaggttcaggggaaaggatcaagaggaggttcaggggaaaggatcaagaggaggttcaggggaaaggatcaagaggaggttcaggggaaaggatcaagaggaggttcaggggaaaggatcaagaggaggttcaggggaaaggatcaagaggaggttcaggggaaaggatcaagaggaggttcaggggaaaggatcaagagttcagttttgaacttcagcagcccgttaaacctctccagtttggattaggccttcagtcattgaaccagtacctgacaagggctttctgttctcatgacacagtttttacagccaaaggtcagtacatttcttttcaaaagtcccgtagatccgccttgctcctggcatcctttcaccttcttatgaatgatgaagtcgatgaccagctgcccattaacatagatcaaggtggatgggcttgtctggtgtgcaaagagaagctcattatttggaagattgctctgtcacctattactaagttatccgtttgcaaagaacttcagctgccacctagtgatttccactggagtgccgacttagtggctctttcttactcttctccctcaggtgaagcacattctactcaggctgttgctgtcatggttgccaccagagaaggatctatccgctattggccaagccttgctggtgaagatacctacacagaggcttttgtagattcgggaggtgataagacttacagtttcctaacagcagtgcagggaggaagttttattttgtcttcatcaggaagccaactaattcggttgatacctgagagctcaggaaagattcatcagcatatcctgcctcaggggcaaggcatgctttcaggaattggtcgaaaagtttcttctctttttggaattttatctcctagtagtgatctcacactttcaagtgttctctgggatagagagagatcaagcttttatagcctgacgagttcaaacatcagtaaatgggaattagatgattcttcagaaaagcatgcatacagttgggatataaatagagccctgaaggaaaacattaccgatgctatttggggatctgaaagtaactatgaagctattaaagaaggagtcaacattcgatatttggacttgaagcaaaactgtgatgggctggtgattttggcagcagcatggcactcagcagacaatccatgtctcatctattactctctgataacaatagaagataatggttgccaaatgtcagatgcagttactgtagaagtcactcaatataatccaccttttcaggtctgaagaccctgattttgtgtcagttgacggtcccaaacttttcaaaccagactgcctatctgtataacgaaagtgctgtctatgtgtgctccacaggaactgggaaattttctcttccccagggagaaaattgtctttaatgcacaaggtacagtagcagttttagaaagcatgattggcctgaagaggcacaaggagggggcagctactggaaacacagagaaagcagttggacaggaggcacagtccctgacagaggggcacagccaatgtaaagtgcgcacaggcaaggaagaaagctggcagaataactactccaacttctggccttatggcagggcctcacattcatctgacctggcagaagccggagggcaagggagcccattcaggaaggccaccttgctgtggcagagtcaagagtag

SEQ ID NO: 126005 - DNA, 278 bp, Homo sapiens
cgtcccccagcccgacacccgtaaagggtctgtgctgaagtggattagtaaaagaggaaagcctcttgcagttgagatagaggaaagccactgtctgctgcctgcccctgagaactgaatgtctcggtataaaacctgattgtacatttgttcagttgtacacgtccagtcatagtaccttcccttgaacttaattatgacgtagattctattgctcacatgtttgttgctgaccttctccttatgatcaccctgccctcctacgacattccttttta

SEQ ID NO: 126006 - DNA, 267 bp, Homo sapiens
cccctccatgggctcctgtgcggcccgagcctccccaacaaggaccaccctctgctccagggcgcccaatcccatcgaccacccaagggctgaggagtgcggacgcagggcgcaggactggcacgcagctccaccggcagcccgcgaaggtctgcagcttcactcctgaagccagcgagaccacgagcccaccaggaggaacgaacaactccagacgcgccgccttaagagctgtaacactcaccgtgaagatctgcagcttcactc

SEQ ID NO: 126007 - DNA, 1341 bp, Homo sapiens
atgggggaaagaaacggttcgggaaaggggagaatggaggggagaagagggaaggaagatggcaggagcctcggaggtcaggcttgcaagcaaagcaaacaccaggctccagaggggtttgcaggctacagaacaccgagtttcgagagaatcacatgtttatcttctcttaaaattctcatactgaacgatctggatgtgactcagctcacgcagtcgctagctgtggcaccgtattttaacagaaagaacactgtatttgccagctcagtacagcatatctctggctctgttttctccccagcaggaatccgagggtctgtctctgtatgtgttatcatcagactgctggcatacctttccctgctgtggtattcagacctaaatagtgtgtgcacctattacctctgcagagtaattactgtttggtaccatggtagagtttctgtgtccagatacggttgtgaatgcttggaatgtaacattgggaaagacagaactattgcttgtaagacgtgccttttgccttccaccttctgccgtgattgtgaggacccgccagccacgtggaactcttactgctttgagagagcatccaggtctgtgtatggagcagaaacacaaaaggagtccagaaatctcctcgtgctgaggaaagacagagctgaggctatggggagaccaaagcagaattggtgggttcttggtctcactgacttcaagaatgaagccgtggaccctcgcggagtgaagctgcagaccttcgcggtgagtgttacagctcataaaggcagtgtggaccgagtgagcagcagcaagatttattgcaaagagcaaaaaaacaaagcttccacagtgcagagggggaccccagcaggttaccactgctggttccggcagccttttattctcttctctggccccacccacatcctgctgattgctccattttacagagagccaattggtctgttttacagagagctgattggccgtaacacgcataagcacaagtattatccgaccgttattcacattcttgcccgcgtgatgaatgctcatcagaatgtacgtatggcaatgaaagacgggtttattgagaatatgtttttcgtctcagccaatccctgggtgagtttcaccagttttgatttaaacgtggccaatatggacgacttcttcgcccccgttttcaccatgggcaaatattatacgcaaggcgacaaggtgctgatgccgctggcgattcaggttcatcatgccgtttgtgatggcttccatgtcggcagaatgcttaatgaattacaacagtactgcgatgagtggcagggcggggcgtaa

SEQ ID NO: 126008 - DNA, 861 bp, Homo sapiens
ctacacggttgtagggtcgttttcaggtgagatcagcaagctgctttctctctctgctttctgctggttgcagcaaacctgccccacacatctattttcagccatggaaaagcaccatgtcctctgggcagccagccccaggcagtggttgaggatgaaagtcccagaataaccaaggtcttttaccagtggtttgatgatggaacataggccccagatcagtctgggtaaaggactctggggtttcaaattagagcctgagaagtctaagcaagaacctggaatgtgccaaaagtatgtgttagaattaaagcaaacagccattctatatttacgggccttagctgccttcccgcggggcagggctcgggacctgcagcccgccatgcctgagcctccgaccccctccgtgggctcctgtgcggcccgagcctccttgacgagcgccaccccctgctccatggcgcccagtcccatcgaccacccaagggctgaggagtgcgggcgaacaacgcgggactggcaggcagctccatctatctgcagccccggtgcgggatccacgaggtgaagccatctgggctcctgagtcgggaaggtctgcagcttcaatcctgaagccagcgaggccaccagcccaccgggaggaacgaacaactccagacgcaccgccttaagagctgtaacactcaccgcgaaggtctgcagcttcactccgcgaggatccgtggcttcattcttgaagtcagtgagaccaagaacccaccaattccggacacactgtgagtcaggatcagtcttattatagctaattagagcaaccccattgctaaagagtttagagcctgggtcagacttcat

SEQ ID NO: 126009 - DNA, 389 bp, Homo sapiens
cgctgataaccatgtcccaagcactgctctaagttcccaatgtgtccggaattggtgggttcttggtctcactgacttcaagaatgaagccacggaccctcgcgttttagactatgctaaaaacagcctcaggaccttcagcactgatcaacaatcctgggcatgggctgaccgacagttttcacccagagagtgaagatcatggaggagccatcttaaattcgcgcccagcgcaggctcccaggaatccttatgtcaccgatctcaattcagccaatgtgacaaacacagcagtaattaagtctagagagctaaacacacctcaaaaagaattgtctcttggtatgagtggaatggaataaaatacatggaaacccaaaaaaaaaaaa

SEQ ID NO: 126010 - DNA, 424 bp, Homo sapiens
ctacaaaaggagcagcaccagttcagtaaaattggtgcacgtccagtcatagtaccttcccttgaacttcattatgacatagattctattgctcacatgtttgttgctgaccttctccttattatcaccctgctctcctactacattcctttttacttgggcttccaaaatgctgggattacaggcataaaccaccgtgcctggttctattagtacttttataaacagcatcgcgaaggtctgcagcttcacttctgaagccagcgagaccatgagcccaccgggaggaacgaagaactccagatgcgctgccttaagagctctaacactcaccgcgaagatctgcagcttcactcctccagggtccgtggcttcattcttgaagtcagtgagaccaagaacccaccaattccggacccacaac

SEQ ID NO: 126011 - DNA, 633 bp, Homo sapiens
aaaacactatcagctgagctgtcattactaacaaaacccaaaaggaaagtgaaagctttgtttctctttacccacccctccaacactgacgtagctattcagttgttaaataaacctgttgtgttgcacatctgcactgtgctgataggaaggtatttctgtgtccggaattggtgggttcttggtctcactgacttcaagaatgaagccgcggaccctagcggagtgaagctgcagaccttcacgaaaacactatcagctgagctgtcattactaacaaaacccaaaaggaaagtgaaagctttgtttctctttacccacccctccaacactgacgtagctattcagttgttaaataaacctgttgtgttgcacatctgcactgtgctgataggaagaccttgtgtggtggatgggacttgggccgtcgagcaagaggcagatctcatcgtggaggctcgtgcggcacaagaagccattgagaggggtgggaggatcaaggcatggctgcagggtgacggaacgactctttggcgaccagatgtgagggaagaatcacggaaagagagtatcattagaccaaaaagtcgctgtatcttagatatagacatgatgacattcagcttggtctaa

SEQ ID NO: 126012 - DNA, 641 bp, Homo sapiens
  misc_feature (1)...(641): n = a,t,c or g
ttccaggggaccggcactcagcacaccaaggacctgcacaggcaccggcctatgagttccctcagtttttattgaatatgattttcattatttcagcaaaaagaaatgtagtaggagagcagggtgataataaggagaaggtcaccaaaaaaaacatgtgagcaaaagaatctatatcataattaagttcaagggaaggtactatgcctggacgtgcacgtaggccagatttatgtttctctccacccaaacatctcagtggagtaaagaataacaaggcagcactactgccaacatgtctcgcctccactgagatgtttgggtggagagaaacataaatctggcctacgtgcacgtccaggcatagtaccttcccttgaacttaattatgatatagattcttttgctcacatgttttttttgttgaccttctacttattatcaccctgctctcctactacattcctttttgctgaagtaatgaaaatcataataaaaaaaactgagggaactcaaaggccggtgccggtgcaggtccttggtgtgctgagtgctggtcccctggacccaatgttgtttccctnnnnnnnnnnnnnnnnnnnnnnnnnnnnnnnnnnaaatagggcgggtggcgggggcct

SEQ ID NO: 126013 - DNA, 1420 bp, Homo sapiens
gttcaaacaattctcctacctcagcctcccgagtagctgggattacaggtgtacgccattgtgtccggaattggtgggttcttggtctcactgacttcaagaatgaagccgtggaccctcgcgcctggacaacaaagagcaaaaccccacctcaaaacaaaacaaaacaagaaaacaagaatgaagatgtagggagagatcagagggtggagtggcttgtcacagaggaggtctctgagttgagccttaaaggagagaaattacactggaaggagaaggaagtacagagcacaggcaaagaaacagatgcacggagcagcatgaggaattatttgatgttgctgggacctgaagtgcaagaaaaagagccagtgaagagaagactagcaagggggaaggcttttgttgaattagcagaacctaccagagctcctggaaattctgggtttccggtctctgggggcgtcttcactccaagcctcggtgcccttacttggatttgcaagtttagagttaaatcgtgggccatactcaattcccaactgctgcttgacaccatgaagaaagggattgtatataagaatggagacagaatccagggcaacaggtcagcagacaatcgtaataatggtgtgcctctcactggggctcgggacatgcagcccgccatgcctgagcctcccacccactccatggggtcctgtgcagcccgagccttcccgatgagcgccgcctcctgcttcagggcacccagtcccatcgaccacccaaaggctgaggagtgcgggcgcacggcgcgggactggcgggcagctccacctgcagccccggtgcggggatccactgggtgaaaccagctgggctcctgagtcgcgaaggtctgcagcttcactcctggagccagtgagaccccgagcccaccgggaggaccgaagaacttcagatgcgccgcgttaagagctgtaacactcaccgcgaaggtctgcagcttcactcctcgagggtccgcggcttcattcttgaagtcagggagaccaagaaccccccaattccggacacagggggacttggctgcttcctgtttcatggtagtgctcgggggatcccaaatgttcgagagcaatcggttttgtcttgctagtttccggtccgacatcaggggtgttcgcaatggcgtcgctctctttgtggacgccccaggattattacgaacggtagtccgcatgcctacactctccgtgtcctctctgcgctttcttctttcgtcatctctggaggctagaagtccaaaatcaaggtctttatagggctgtgctctctctaaagcctctgaaggagatccctcttcactttttccagcttctggtagcccaaggtgttccttggcttgtcgcaccacaactccaatctcagcctccat

SEQ ID NO: 126014 - DNA, 831 bp, Homo sapiens
ttttttttttttttttagagaaacgatagttgggcccaggggcaccgacacacagcacaccaaggacctgacactggcaccggcctctgagttccctcagtttttattgattattattttcattatttcagcaaaaaggaatgtagtagcgagggcagggtgataataaggagaaggtcagcaaaaaaacatgtgagcagaagaatctatgtcataattaagttcaaggggaggtactatgactaggatgtgcacgtaagcccagatttatgtttctctccacccaaacatctcagtgggagtaaagggataacaagggcagcattgctgcaaaacatgtctcacctcccaccataggggcgggtttttctcccatctcagaactggaccaatggtacaatccgtgttttaatacccgggacattcaagttccccagggggcagttcagggagaccagtgggccttccctcttattctcaaatgcaagagtctttcctctttggactaattccaccttcaggcacagatcttttttggggtgttcacgttggggggaccgtcaggtctttctcatcccacgaggccatatttcagactatcacatggggagaaaccttggacaataccctgctttcaagggcagaggtccctgcagctttccgcagtgcattgtgcccctggtttattgagactagagaatggcgatgacttttaccaagcacactgcctgtaaacattttgttaacaagacacatcctgcacagccctagatcccttagaccttgatttcatacaacacatgtttttgtgagctcaaggttggggcaaag

SEQ ID NO: 126015 - DNA, 1404 bp, Homo sapiens
atgcgtctcgaaagtgataacatctggtgcagtttgtcccgatccacaaatcgaaaggggctggaatatcccattggtccttggctgccgtttatcaccaattcccgcgtccaggagcaggcgttttatcacgatcgccactcgtttgaggcagttctggatcttaatgctgcgccagaaagcgtcgacctcgcggaggccgaacgtctggcggaagatctgcgtttgctttacgtggcgctgacactctcggcgtttgcaccgctggtgcgccgtcgtggcgataaaaaaggtgacaccgacgtccaccaaagtgcgctcgggcgtttgctgcaaaaaggggaaccgcaagatgcggcagggcttcgcacctgtattgaagcgttatgcgatgatgatattgcctggcaaacggcacaaactggtgataaccaaccctggcaggttaatgatgtttctacagcagagctgaatgcgaagacgttacaacgattgcccggcgataactggcgcgtcaccagctactctggtttgcaacagcgtggtcacggtatcgcccaggatttgatgcctcggctggatgtcgatgctgcaggcgttgccagcgtcgttgaagaaccgacgttaacaacaacaccagtttccggcgggggcgtcacgggggacgttctggcaacagtttgtttgaagacctggattttacccagccggttgacccgaactggaggttgtgagcgtacccactacacgtcgttcgccaatgcaccttgtaacaaggccaacgttgcctgccagttatcttcatgcacgccaattgctttgaagaccgggcgagaagctgttgaaagcgctcaggaaaatgctgacgatgatgatcactttaccagcacgcagaacgaagcctttcagacgctgccaggtctggataatcaggcttttaacgtgtggtacatgatagaccggcaactccatgacaaacggcgtcgcttcaccgcgcatgatggtgtacttgagcatcaggccagtcagcaccgccatcacaatacccagcatatacagcgagaagaccgccagcgcaccgttctgcccgaagaaggcagccgcgaatactgcgaagatagccagacgcgcgccgcaggacataaacggtgccatcatgatggtcatcagacgttcacgcggtgcatcaagcgtacgtgcacccattaccgacggtacgttacaaccgaaaccgacgatcagcggcacaaaggatttccccggcaagcccagcgcctgcatcagacggtccatcacaaacgccgcacgcgccatatacccggagtcctcaagggaggagaggaacaccgaattatatgcctcagcatcagacagtgtctaagattcatctttggcaggcactga

SEQ ID NO: 126016 - DNA, 1319 bp, Homo sapiens
atggtctgctgtttttctgaaaacatccagtacaaagagtgcgacttgaggctgaatgtggagctcgggccagcagctctgcagagtgcctactcccaccgccaccaatgcgccctggtcctcctatgcgaggaggagagtcagccggcacacaaactctcggcgttgcaccgctggtgcgccgtcgtggcgataaaaaaggtgacaccgacgtccaccaaagtgcgctcgggcgtttgctgcaaaaaggggaaccgcaagatgcggcagggcttcgcacctgtattgaagcgttatgcgatgatgatattgcctggcaaacggcacaaactggtgataaccaaccctggcaggttaatgatgtttctacagcagagctgaatgcgaagacgttacaacgattgcccggcgataactggcgcgtcaccagctactctggtttgcaacagcgtggtcacggtatcgcccaggatttgatgcctcggctggatgtcgatgctgcaggcgttgccagcgtcgttgaagaaccgacgttaacaccacatcaatttccgcgcggtgcgtcaccggggacgttcttgcacagtttgtttgaagacctggattttacccagccggttgacccgaactgggtgcgggaaaaactggaactcggcggctttgaatcgcagtgggaaccggtattgaccgagtggatcacggctgtcctccaggcacctctcaatgaaaccggcgtaagcctgagtcaactttccggccgcaataaacaggtggagatggagtcttatctgccgattagtgaaccgcttatcgccagtcagcttgatacgttaatccgccagtttgacccgctatccgcaggctgccgacgtggaattatgccggtacgggcctgttaaaggatcaacggtgctggacgcacaaagcacgtgggagcccacggtcctggcacaggtcattcacgagctccttctattcggggctagggagagagtggggctgagcttgctgtgggtggtccctgagtatcccggatggctcccggggaagaggagggcaaaactgctgggccgtggcaacaggggcgactgtacgcggaaaacaaggactaaacaccccgcgggggaaaagcacgctagttggaaccagccaaatttagcaggggacaaacacgaggaggagcacgagaaccctccgaaaaacgatcttagtcctgttgtcagctgtcactccgatcatattgtggcacactttggcttacacaacatttctgctcctctaaacctcatctctgtccacccctgtgcccttctctccag

SEQ ID NO: 126017 - DNA, 1965 bp, Homo sapiens; identical to SEQ ID NO: 121511

SEQ ID NO: 126018 - DNA, 381 bp, Homo sapiens
atgaggttttacggacagctggctgaagacccagggcagcaaaaagctggggaaacaacaaggcatactgaagactatatttctcagctgcctttgcagagacaagggatccccgaacttgcccttcagaaagatctttttattaacaagatttatggaaaagagttcaatgtctgcaggtcgactctagaggatccccgagttcatgtcctttgtagggacatggatgaagctggaaaccatcattctgagcaaactattgcaaggacagaaaaccaaacaccgcatgttctcactcataggcgggaattgaacaatgagaacacttggacacagggtggggaacatcacacaccagagcctgtcatggggtgggggtag

SEQ ID NO: 126019 - DNA, 1953 bp, Homo sapiens; identical to SEQ ID NO: 122064

SEQ ID NO: 126020 - DNA, 411 bp, Homo sapiens
atggtggatcctggtgccattactccccagagccagggcttatataccactggaaaaggggacatggatgaagctagaaaccattattctgagcaaactattgcaaggacagaaaagcaaacacctcatgttctcactcggcacaaaaatgctctccacacggcacccgcactacctgtcattccagatgcttaccgctttagtgcctctttcagcaatatgaagttaaatccaggtactgtgagtgctgacttgacttttggttcttatgaaggtggggtggacctggagcctgtgtccactggagcaggtctagatcttgggttcatggtggccagcctgacagtaaggctcactgaagttgtcctaatggttgggtccacagggatagtcctgatcataagtccatag

SEQ ID NO: 126021 - DNA, 1038 bp, Homo sapiens
atggatgaagctagaaaccatcattctgagcaaactatcgcaaggacaggaaatcaaacaccacatgttctcactcataggggtccagtaccagcacctctcaccagtggtctacactattatacaactttagaagaactctggaaaagttttgatctttgtgaagactattttaaacctccatttggaccatatcctgaaaagaggcctgaaatctgccatgagagctgcattcttttaagacgttggccctcattaaaaggcaagatttatccaaaacgtaatggcttaaatatcagccattttcgtgtgatcaatttcagattctccaatgacagcaaatatggtggggatgaggcacagtgtgggaaggattccttggtttccatgaaatgttcattgtttcggttctgtccgtggtcaaaagaattgcctttccagcctccggaggggagcatttcttcacacctaggatcaggagccagtgacagtgagaccgaagagacccggaaagcggtctgggacaacgaccacatgctctttggaagaggctttggtgagatcccaaacacacatgtgaacatgcatgtccagaaagaggcagaatggccattgcacttttctctctgggctccgcggcagtgttcacaaataacactgagtaaagaccttgaacagggtggggaaaacaaaggactggaggtgaaaatgggaatgggagagaataatctgggtgtcaataggaaaggctcggtcacggaaggaccgatggtggtgtcattcacagaaagtcagccaggactgcggagagatcatcgccagtggatgctttctctgacctttccttcctgcatgctgttgggaagactggccccaaatccaacgggaaggatatcagagaccaccgagtttggggcacagagaaactcacaaaaatgtgggagaagcagaaatagctacaccatacccgttttggaagaggctacatctacattcaagggaagtttatgccccattccccttgaactgtccatgtaa

SEQ ID NO: 126022 - DNA, 6003 bp, Homo sapiens
atgaacatcgatgcaaaaatcctcaataaaatactggcaaaccgaatccagcagcacatcaaaaagcttatccaccatgatcaagtgggcttcatccctggggatgcaaggctggttcaatatacgcaaatcaataaatgtaatccagcatataaacagagccaaagacaaaaaccacatgattagctcaatagatgcagaaaaggcctttgacaaaattcaacaacgcttcatgctaaaaactctcaataaattaggtatcgatgggacatatctcaaaataataagagctatctatgacaaacccacagccaatatcatactgaatgggcaaaaactggaagcattccctttgaaaactggcacaagacagggatgccctctctcaccactcctattcaacacagtgttggaagttctggccagggcaattaggcaggagaaggaaataaagggtattcaattaggaaaagaggaagtcaaattgtccctgtttgcagacgacatgattgtatatctagaaaaccccattgtctcagcccaaaatctccttaagctgataagcaactccagcaaagtctcaggatacaaaatcaatgtacaaaaatcacaagcattcttatacaccaataacagacaaacagagagccaaatcatgagtgaactcccattcacaattgcttcaaagagaataaaatacttagcaatccaacttaaaagggacgtgaaggacctcttcaaggagaactacaaaccactgctcaatgaaataaaagaggatacaaacaaatggaagaacattccatgctcatgggtaggaagaatcaatatcgtgaaaatggccatactgcccaaggtaatttatagattcaatgccatccccatcaagctaccaatgcctttcttcacagaattggaaaaaactactttaaagttcatatggaaccaaaaaagagcccgcatcgccaagtcaatcctaatttatagattcaatgcccaagaattggaaaaaactactttaaagttcatatggaaccaaaaaggagcccgcattgccaagtcaatcctaagccaaaagaacaaagctggaggcatcacgctacctgacttcaaactatactacaaggctacagtaatcaaaacagcatggtactggtaccaaaacagagatatagaccaatggaacagaacagagccctcagaaataatgccacatatctacaaccatctgatctttgacaaacctgacaaaaacaagaaatggggaaatgattccctatttaataaatggtgctgggaaaactggctagccatatgtagaaagctgaaactggatcccttccttataccttatacaaaaattaattcaagatggattaaagacttaaatgttagacctaaaaccataaaaaccctagaagaaaacctaggcaataccattcaggacatagccatgggcaaggactttatgtctaaaacaccaaaagcaatggcaacaaaagccaaaattgacaaatgggatctaattaatctaaagagcttctgcacagcaaaagaaaccaccatcagagtgaacaggcaacctatagaatgggagaaaatttttgcaatctactcatctgacaaagggcgaatatccagaatctacaatgaactcaaacaaatttacaagaaaaaaacaaacaaccccatcaaaaagtgggcaaaggatatgaacagacacttctcaaaagaagacatttatgcagccaaaagacacatgaaaaaatgctcatcatcactggccattagagaaatgcatatcaaaaccacaatgagacaccatctcacatcagttagaatggcgatcattaaaaagttaggaaacgactggtgctggaggggatgtggagaaataggaagacttttacactgttggtgggactgtaaactagttcaaccattgtggaagtcagtgtggcgattcctcagggatctagaactagaaacaccatttgacccagccagcccattactgggtatacacccaaaggattatagatcatgctgctataaagacacatgcacacgtatgtttactgcagcactattcacaatagcaaagacttggaaccaacccaaatgtccatcaatgatagactggattaagaaaatgtggcacatatacaccatggaatactatgcagccataaaaaaggatgagttcatgtcctttgcagggacatggataaagctggaaaccatcattctcagcaaactatcgcaaggacaaaaaaccaaacaccacatgttctcactcatagatgggaattgaacaatgataacacatggacacaggaaggggaacatcacacactggggactgttgtggggtggggggaggggggagggatagcattaggagaaatacctaagggcactggcagagttctacttggtgctggccacactgagttccaatgcaaagtcccagaatggctgagctctccttcccccaagcatacagattctctctccgcaccatgtggccactgcctggagatgagggaagggtggtgttggcatttcaagactgtctttgctatcctcttcagtgcctctgtcagcgatatgaagttaaaaccagttgttgaaagtgatacactaacaattgagtctggaccacttgctagtgaagataaaccactttcgtgtggtacaaactctggaaaagaacaagaaataaatgagactctgcctatcacaactgtagctcagagttcagttctacttcatcctcaagaagcagcagccaggattagaatgtcagcaaggcagaaacagataatggaaatagaagagcagaagcaaaagcaattggaattacttgaacaaattgaacagcagaaattaagattagaaactgactgcttcagggctcagctggaagaagaaaaaagaaaaaaaactcaaccgactggggtaggatgcagaaaatctcatcactacataaatcatttgcattcttttagttctctgcctgttaaagttgagtcaggaaaaattcaagaacccttttcagccatgagcaaaagtacagtttccacaagccattctataatcagccaaatgcatgataggcctttgctgccgtcagagaatatcacagcccagcaaggtaatatgaaggccctccaagaacagttagacctacagaagaaagttcttcaggcaactcaggaagctcaggaacagttgcttttgtgcaaacagaaagaagtggaacagcaaacgggcctctcggtattccttcccttggtaactccagattcatctgctttattgccttctgccaaagcagatttggggagaatccaggaatcttcaccaaccaagaataatattgcagtttcctcagaccatcatgtgatctcacaacttcaggataagcgtttgagtctttcacagcctatcctatcacagcaaaataattttaaatttctccaagagcagttgaatattcagaaggatagccttcaggctaggcgagaagcccaggaagtattgtatgtacataaacagagtgaattggatagaagagtatgttccgaacaggctgagccctctttcccatttcaggtagctcagcatacatttacttcactaccatctgctgatacaaaatctggaaaaatacaggagcaacattcatctaagagcgagaaaggacttgtttcatgccaatctgacatccccatatctcaggatgggtctttgagtttcctacagcagttcctacctctacatgatagtttgaagttgctccaagaacagttgactaaacagagggatactcttcaggctaggcatgaagctcaggtggaattacttttacatagacaaagagatttgggggacagtaagtctgggctggtgagctcttcatcctcaccagtggttgttcagcattcagttgcttcacaagcttctgctaaagctgagcctaggagaattcaggagctttatttatctgagaaggagaatgtggatgaatctgagagattccaggaatgtatatcaatcaagagtgacagtaccattcccttaagccatcctaagatcccaagatgtcaggaaagacttttgagagtttcacaacatatgctacctctacaagataatttggaggaacaccaagcatggctagacactgagaaagaagcctttcatttcagccagaaaacccaagaaaatacatcttctgaacaaactggttcatcttcattcataccccagttggtacagctttcatttacttcgttagcttcagctgagtctggcacaatcctggaacctctttttacagagagtgaaagtaaaattttttcaagccaccttcagatcccacaattgcaggataggcttttgaggatatcgcaacttatccagcctcaacaagataatttgaaggcacttcaagaacagttagctacacagagagaagccatcattctagctagacaagaagctcgggaagaattacttttacatcagagtgaatgggagggaagaatatctcccgagcaggttgacacctcttccttacccctagtaccacagcattcattcgcctcattacctcttaatgaatctgaaagaaaccaagaaccatgttcaattaacagtgataatatagtatcctcaggtcactcagagataccaacattgcctgatgggctgttgggtttatcacatcttgttttacctcaacaagataatttgattgcacttgaagaacacttgcatgcacagacagatttccttccttctattgagaaaacccagaaagaattggttttgtcaaaaccatgtaaatttgaggaaaaggtatcttctgagcattttatccagtctcaccatggtgatttgcaggcacttcaacagcagttagatacacagaagaaagccattcgatctatacaggaagtccaagaagaattgcttttgcaaagattaagtgaattggagaaaagggtatcatctgaacaagtttgctcctcttcatttgtatcccagcaagataacttgggacttcagaaacagttggatctacaaagagaagttctgcattatagccagaaagcccaggaaaaattgcttgtacagagacaaacagcattgcagcagcagatacagaaacatgaagagactttgaaggatttctttaaagacagtcagataagtaagcccacagttgaaaatgatttaaaaacccagaagatggggcagctcagagactggtttcctaatacacaagacctagcaggaaatgatcaagaaaatattaggcatgcagataggaacaactctgatgataatcatttggcttcagaagatactagtgccaagcaaagtgggagacatgagacatcaatcaacacatgtacgataagcattggtttggttcggaaaagtttcctctttgtggcaaagctgaactctggacttagcaggcttccctatggtcagtgtgcatttagagtctgccgaagatcatgtactctccactatgtcaaaactgcccatattttgtacaagttaattgcagaggttacaaggggatttggccacctccttaactttttcccacagcacatggcaagcacaaccccccagctggattcagggcacaaaggaaaagattgggagggaagcagagggagatgtgacactgacaaaaaagaaggcaaggtggccacagaggcagagactagagtcacgcagctgcaagtcaaggaatgccagcagccaccagggctgaagcggcaaggaacgggttctcccctggagcctctggagggaggctggccctgccaacaccttgatctgcaacttctttccagcttccagaactgtgagagaagaagttctgttgttctaagccatcaacttgtggtaatttggtatagcagccataggaaaccctatgcaaacagtgaactaaataatgagcggtatttgtag

SEQ ID NO: 126023 - DNA, 1128 bp, Homo sapiens
atggcacatccactttggaagacagtttggcagtgtcttataaaactaaacgtacttttaccctatgatctagcaattgtacagcaagtgtacgagggttgcttcaaaagacattgccttttgaaaagacatgttgaaaattatgtccatgtaaaaacctgcacgcaaatgtttatagcagttttattcataattgccaaaacttggaagcaaccaagatgtccttcagccctatctctgacaattgacccacgttccagcttcttggacctcacccagacccacttcttcagtagcctgtcaggcaactgggagagcaaactgctgccttcctgcaaaagggagcaaaaccaggctcagagaccctcaataagaatgcctgcgtttttcaggaggacttggagagctgagctccatgctcatggcagtgaccttggtaatgcacctgcttcctccctgctggttcctgggatcacctctcgatcaatgagctgccccaagtctatgccccaggcttcactttcaagaaaatctgaaccaagacccagcatccctgtcactgagggaactttctacaaccccccttcagatggtcaccagtatttgctagaatctccagggatgacaggagtttgtatacctcaattaagtcttaccattgctggacaaaagagggggacaggaaaagggagcctggagctggctctgcatcaagtactttttctctgttgcaattcccctgtcttgataaattggctctgtctaggcagcaggcaaggtaaaccccttgggcagttacagaaagggcagtcagatgtggaggtctcccaccttctgctacccccaggtctaccagcagggtggaggatgggctcagaggcattggggaaagggagagagaaagatgggatgagggttgtggagagaaggaagagaggggagagagatgaaacaaacaggtccaagacattcatcactctggaaggaaacccctgtgcttcaccttccactgtgggcaaccgggagtcaccaaacattagaggaaaagcttctgacatgaatgacaaacgaaaaagacaacagacaggaggaatgcaaaggaaacagagagcgagaagagcagaatga

SEQ ID NO: 126024 - DNA, 363 bp, Homo sapiens
atggacatgagggtccctgctcagctcctggggctcctgctgctctggctctcaggtgccagatgtgacatccagatgacccagtctccatcctccctgtctgcatctgtaggagacagagtcaccatcacttgccaggcgagtcaggacattagcaactatttaaattggtatcagcagaaaccagggaaagcccctaagctcctgatctacgatgcatccaatttggaaacaggggtcccatcaaggttcagtggaagtggatctgggacagattttactttcaccatcagcagcctgcagcctgaagatattgcaacatattactgtcaacagtatgataatctccctcccacagtgtaa

SEQ ID NO: 126025 - DNA, 1240 bp, Homo sapiens
tgcagaattatccatgggctcaagcaagagatgaaaaatcatattctccccaaaatgggaaaatcagtgctaccaggggcccaaagggatgttcaggttacatctgtcaggattaataccataacagaggaccatctttggagcacagtggggctcacctccgattctggcctagtccaaaggcacaaagccccttgcaccagcagcgtgcgtcagcaagagagcggaagcaggaacagttggcaggaagacacataccccctgaagatccagagggaggccatctgggtacagcagctggacaaaagaagctcctcagcctccagtcgcctgtctgtgcatgcccctcggtcactgatctcacctaccagactcaaaaagggtgcccataaagcggtaaactatgaaaaactttcagaaatcacccaaggtcataacaaaaacccagccctttttctctcttgtttaactgacgccatgagaaagtataccaacgtagacccagctatcccagaaggaaccactaaacctttctccctctataccgatgaatgcaagctccttcaagctgccagactcctgcagaaagctaccgtcattcattgcagggaccatcaaaccccagacaatcctattttggtgggaaatctagcagatagagaagccaaacaagtagccctacaacctgtacaaggccagtttctgtgcctgtcctcgttctctcctctttactctccagaagaaaaggaggactaccaagcccaaaaccttcaaaaacaaggaccatgattctgagccattcaggaattacctcccctccttaatccagacatggtctttcattcgtgaagcagcaaatgaggccatgccccttcctgtcaacacctccttgtcctctcaacataactgtcttgcaggcacagatgtgtttatctgccaacccgagcctcacaaaaacctacaactgaagtggacaggcccctacactgtgatacgcagcatgccaactgcagtgagacaaggactcctcaactggattcatcgcactagggcacgtgagattatgaacaagtggcccagaaccctaagttggtggggagaacaggttgctgctgcagattcggtgtctggggaacaggaatatgccgggagactcgtagacacttttgaaggatttttgcaagaaatgctaaatcaaaaatgctgtggtgaagttcctgagggtggtgccttgtcctga

SEQ ID NO: 126026 - DNA, 479 bp, Homo sapiens
  misc_feature (1)...(479): n = a,t,c or g
aaagagagagagacagcttatgccattatttctcctctctctctctgccttggctgccnnnnnnnnnnnnnnnnnnnnnnnnnnnnnnnnnnnnnnnnnnnnnnnnnnnnnnnnnnnnnnnnnnnnnnnnnnnnnnnnnnnnnnnnnnnnnnnnnnnnnnnnnnnnnnnnnnnnnnnnnnnnnnnncagcttatgccattatttctgcatatcagacttttagtactttcactaattttgctattgctatctagaaagcannnnnnnnnnnnnnnnnnnnnnnnnnnnnnnnnnnnnnnnnnnnnnnnnnnnnnnnnnnnnnnnnnnnnnnnnnnnnnnnnnnnnnnnnnnnnnnnnnnnnnnnnnnnnnnnnnnnnnnnnnnnnnnnnnnnnnnnnnnnnnnnnnnnnnnnnnnnnnnnnnnnnnnnnnnnnnnnnnnnnnnnnnnnnnnnnnnnnnnngttntccttgacactgagg

SEQ ID NO: 126027 - DNA, 477 bp, Homo sapiens
ttaggcctccggataactgtgggcaagcctgactgatgtcaggccctccacaagaggtggaggagcagagtcttctctaaactcccccagggaaaaggagactccctttcccggtctgctaagtagcgggtattgttccttgacactttttgataccgctagaccacggtccacctggcaacgggcgtcttcccagatgctggcatcaccgcagtcagcttcatcaaatcttgacactttaccacatttatttttgaaaaaggaattaaagcattgctgattcatatcctctgataaagcaatgctatgcttggaattatccatctttttagttgtaaccattctagggcatgtgtgtatcgtagtagtagttgtcattgtcgttgtagtgtcacacttggtgtttattttcatttcctgggtgagtaatgatgtttggatatcttttgagaaataccagtaccatcttttggccat

SEQ ID NO: 126028 - DNA, 654 bp, Homo sapiens
atggtgccctgcatcccagccactccagctccagctgtggctaaaaggagccaagagacgagagagtgtagaaataaagacacaagacaaagagataaaagaaaagacagctgggcccggggaaccactaccaccaagtcacggagaccggtagtggccctgaatgtctggctgcactgttatttattggatacaaagcaaaaggggcagggtaaagagtgcgagtcatctccaatgatactggccgccgccgacagcggcatcagccctcgggccgtgtggcagttccgcaaaatgatcaagtgcgtgatcccggggagtgaccccttcttggaatacaacaactacggctgctactgtggcttggggggctcaggcacccccgtggatgaactggacaagtgctgccagacacatgacaactgctatgaccaggccaagaagctggacagctgtaaatttctgctggacaacccgtacacccacacctattcatactcgtgctctggctcggcaatcacctgtagcagcaaaaacaaagagtgtgaggccttcatttgcaactgcgaccgcaacgctgccatctgcttttcaaaagctccatataacaaggcacacaagaacctggacaccaagaagtattgtcagagttga

SEQ ID NO: 126029 - DNA, 952 bp, Homo sapiens
gctctgtcccaggatctccacagacctcggcctctccatgtgagggggacacagtggtgctctgctgagttgtgagggcccagatcacagatcccatgtgagaaagagagagtttcagcgtcatccttgaacgcaggatccgggaccttcagacccagggaaagggtgagggagactggggcctggtctgctttcccgggcctgaaagcttccccgaggtttgcagggtcagggaggaggaacggtgggggtgggcagtcactgcctgttccccactgcctgtgttcgcaggagccacgggacagaagacggtggcctctgctgccgggccacgttagtccgcagctcacccgaacagaggacaaccctgaggtttggccatatgggccacctggacactgggaattcgggggagcacgtcccaggcgtggtgcatcctgggccagaaacgccatgggctccctcccccgcttctccttggcttcctgccctgttggggtcctcattccctttctgttcccccagtgccccggggcggcattttactgcctcagaatttggagggagggagcagtaccttcccggagtcccacgcatgtgagttgggtcaagtgcattggacctagggaaagagaaagaaagaataaaagctggagagagagtgaagtgaatgcaagatacaaagtgggatggaagaattaaatccagagttccaggcaatcaaaatgagtgcaggttgaaagaaaacaggtgaattttagtggcatatggatgataaagctgtaaataaaattcttttgatgaaactctccggttacgagacaaagactgtaactgaacaggagctggtgtgactgttaccagacagaggcaactgatgaaaaagccctgtgaaagataggatgtgaggtgagcatgagcttgagctgagagacagacacaacagtatctg

SEQ ID NO: 126030 - DNA, 2134 bp, Homo sapiens
ggcctggccactgagcctgagtctgtctttgctctggatgttctgcgacagcgactgcatgagaagatccaggaggcccggggccagggcagtgccaaggagctgtcccctgccgccttggagaaaaggcggcggagaaagcaggaacgggaccggaagaagaggaagcgaaaggagctgcgggcgaaagagaaggccaggaaggctgaggaggccacggaggcccaggaggtggtggaggcaaccccagagggggcctgcacggagccgcgggagccgcccgggctgatcttcaataaggtggaggtgagcgaagacgagccggccagcaaggcgcagcgcagaaaagagaagaggcagagggtgaaggggaacctcacgccgctgaccgggaggaactaccggcagctgctggagcgcctgcaggcacggcagagccggctggacgagctgcgcggccaggatgaggggaaggcgcaggagctggaggcgaagatgaagtggaccaacctcctctacaaggcggagggcgtgaagatccgtgacgacgaacgcctgctgcaggaggccctgaagcgcaaggagaagcgcagggcgcagcggcagcgccggtgggagaagcgcacggccggcgtggtggagaagatgcagcagcgccaggaccggcggcggcagaacctgcgcaggaagaaggcggcccgcgccgagcgccgcctgctcagagcccgcaagaagggccgcatcctgccgcaggacctggagcgcgcaggcctggagccacgggacagaagacggtggcctctgctgccgggccacgttagtccgcagctcacccgaacagaggacaaccctgaggtgtggcatatgggcacctggcactgggagtcgggggagcacgtccaggcgtggtgcatcctggggcagaacgccatggctcctccccgctctcttggcttctgcctgttggggtctcattcctttctgttccccagtgccccggggcggcattttactgctcagaatttggagggagggagcagtaccttcccggagtccacgcatggccaccagagggctccttggtctagcggtgacgccagcgtctgggaagacgcccgttgccaggtggaccatggtctagcagtagcaaaaagtatcaaggaacaacacccgctacttaagcagaccgggaaagggagtgtccctttcccctgggggagtttagagaagactctgctcttccacctcttgtggagggcctgacatccggcaggcctgcccgcagtaatctggaaggcctaaaccgtctccctgtgatgctgtgcttcagtggtcacgctcctagtccgccttcatgttccatcctgtacacctggctctgcccttcctagatagcagtagcaaaattagtgaaagtactaaaagtctctgatatgcagaaataatggcgtaagctgtctttctctctgtctcctctctctctctctctgcctcggctgccaggcagggaagggcaccctgtccagtggacacgtgatccacgtgaccttacctatcattggagatgactcacactctttaccctgccccttttgctttgtatccaataagtaacaatgcagccagacattcggggccactaccggtctccgagcattggtagtagtggtctcccgggcccagctgccttttcttttatctctttgtcttgtgtctttatttctacactctctcattgctgcacacagggagggagagacccatggaccctgtagggctggtccattgcgccactctggtcatgttgagaaattgctcaatttctgtgacgaaaaagggatctgcacgcttacagccagtctctatcccagaatatcttattacaaaattgtgactgtcaatctcctttccacattcactgtctaacagaatgccagaatttccaacaactgcacaggtcttaaacctgcgattcttcattggtgaaacttcaggtaggaggctatgtagatcatgagaaatgtttagtgtccggcgcctgtcaagcacatagtgtatgacatcaccaggcttaaaactgctcttgaccactgacacatctcgttctgcatctaagaaacgaagtatgttcttc

SEQ ID NO: 126031 - DNA, 1000 bp, Homo sapiens
atggagactgaaccaaaggcaagttacgggaagataagaatatctgaagagaattccattcaacttgatgattttacagaagcatatgaaagtggacaaaaccaagcatattctcttgaacattttagtcctgtttttcctaaaacagaaaatagccacattcacataaactctgacaaaggtcctgaagaaaatacaggatctcaagaacttttcagttctgaagatgaactgccaccaaatgagatacgtattgagttgtgtagctcaggaattactgtgttcccaactaaataccttccacaaaagtgctattagaagaagctggtcctctgaagataaagtgggccagtctgaagctctatctagagtccttcaagtagctaagaaaatgaagttgatttctaatggaggagattctgctgtagaaatggatcggagaaatgtgtctgaatttaaggatgttgttattcatgaggaccaatgggttggcgagacagtactacaatcaacatttagcagtcagttattaaatcttgggagttattcatctattcagcctgaagaatattccagtgtagttagtgatgttgtacttcaagacctactggcacaggtgtcctcaaaacattcctacctcagagatcttcctccgaggcagcctcagaggaaaatatactataggccagctttaatgactgtagttgatggaagacatgatgtttacatccgtgtagactcaaagctgatagagaagattcttctcaacatttttgcagactgcctcaacagagtgatagttacttcctcagagatcacctatgggatggtcatggcagacctgttacactccttgtcggcagtcagcgcagaaccttgtgtatcaaagattcagagcctttttgtgttagatgaaagcagctatccattacaacaagatttctccctcctggatttttatcctgacactgtaaagcatggagccgatgcccttttctga

SEQ ID NO: 126032 - DNA, 1493 bp, Homo sapiens
cctcgtgccataaatcttgggagttattcatctattcagcctgaagaatattccagtgtagttagtgaagttgtacttcaagacttactggcatatgtgtcctcaaaacattcctacctcagagatcttcctccgaggcagcctcagagggtgaacagtatagactttgtagaattggagcaccttcaacctgatgtattagtccacgcagtactaagagttgttgatttcactatactgacagaggcagtatacagttatagaggacagaagcagaaaaaagttatgttaacagtggaacaggcccaagatcaacattatgcgcttgtattatggggtcctggagcagcctggtaccctcaacttcaaaggaaaaaaggttatatttgggaatttaaatatctttttgttcagtgcaattacacactagaaaacctagaattgcatacaacgccttggtcatcctgtgagtgcttgtttgatgatgatataagggcaattacatttaaagcaaaatttcaaaaaagtgcaccctcctttgtgaagatatcagacttagcaacccacctagaggataagtgttcaggagtggttctgattaaagcccagatttcagagctggcatttcctattacagcatctcagaagatagcgctaaatgctcacagttctctgaagagtattttttcttctcttcccaacatcgtatatactggctgtgcaaaatgtggattggaactagaaacagatgagaacaggatctacaaacaatgttttagctgcttgccatttactatgaagaaaatatattataggccagcgttaatgactgccattgatggaagacatgatgtttgtatccgtgtagaatcaaagctgatagagaagattcttctcaacatttctgcagactgcctcaacagagtgatagttccttcctcagagatcacctatgggatggtcgtggcagacctgttccactccttgttggcagtcagcgcagaaccttgtgtattaaagattcagagcctttttgtgttagatgaaaacagctatccattacaacaagatttctccctcctggatttttatcctgacattgtaaagcatggagccaatgcccgtctctgaggccagaggaagaaattgcaggcatttcaaggaagaagtactgaaatgatttgtcttttgaaataaatgaatgacagggcttttgctttggattttttatgaaatatattttacaaagagaattgcactagatatataaattaaaacttttttcctaagaaaatcctgtgaggtttaaaaagattgtttttgtcttttggtttcttcctttctcctggagaaatgatctaccagtcaaggcaatatgtagcacatccctgggaattaaaggtttgcccatttgttcactgtatttagtccctgctacattccaggcattgtactaagtatggggaaccacagagaagacattccctcagaaa

SEQ ID NO: 126033 - DNA, 372 bp, Homo sapiens
atgccatccagactgaggaagacccagaaacttcggggccatgtgagccatggccatggccgcataggcaagctccaaaagcaccccagaggccacagtaatgctggtggaatgcatcaccacaggatcaacttcaacaaatactacccaggttactttgggaaagttggtatgagtgagcagacacaggtgaatgctgctaaaaacaagcctggggctgctcccctcattgatgtggtgcaatcgggctactacaaagttctgggaaaggaaaagctcccaaagcagcctgtcattgtgaaggccaaattcttcagcagaagagctgagaagattaagggtgtcaaggggacctgtgtcctggtggcttga

SEQ ID NO: 126034 - DNA, 303 bp, Homo sapiens
atgacgaacgtgtactccttggatgggattctggtgtttggtttgctctttgtttgcacctgtgcctacttcaagaaagtacctcgtctcaaaacctggctgctatcagagaagaagggtgtttggggtgtgttttacaaagccccgccgggccgacccgaaatgaaaagctctcctcctgcgaagccccctcggggcgctgtgcagcgaggccccttaggcggcggccacgctgtggtccccgaggtcccggagctggccctgcggggcccggcgctcagaagtgatgaattgatcagatag

SEQ ID NO: 126035 - DNA, 451 bp, Homo sapiens
gtggcatggcaagacttctgtcagaagttggcagcaggctctcacttgattaagaaggcaccaagaagaagaacagaaaaagatgacttactattcttgaccgtgcagtttagcccatggggctgtcactgactttacatgctgctgcagctccttagtcagctggtccttgtcatgggacagaaactgtggggtcaggacaatcaatgccttcaccacccagaggcattgatagtgtcatgactcctccccaggaaccagatgtagccctcttcatccacagttgctctgtccccggtgtcgcagacgtccccacattccacttcggctgtgttctctgggttacccgccgaggcctgccacctcctccaccaacaaacggaagccaccacatcttctccgagactcgctctgaccacgccgccgatgctgcccgggcctcgcaacgaaa

SEQ ID NO: 126036 - DNA, 351 bp, Homo sapiens
atgagcttcctgagtctccaccagaagcagatgctggccctatgcttcacgtacagcctgcagaactcccccagacttgctgttgctgccaccactagcactgacgccaatacaaccactgctgctgttaccctcaatgcaccagcccaccctgtcgtgaaggtgtttattgtcctgaccccacagtttctgtcccgtgacaaggaccagctgaccaaggagctgcagaagcatgtaaagtcagtgacagtctcatgcaagtccccaaggaagatggagtttgtcccggagctgcggaaaactgtcactggaaagattaaacaagccaggattgaccatgaggaaccctga

SEQ ID NO: 126037 - DNA, 469 bp, Homo sapiens
gcggggaattcgggaaggtgaggagtttgatgtggacctggctgggatggaagtggctgtgggaggatggggcagaggcctctggttgcacaggcaccaggctggcattcgaggccagagcctgggatggaggtgtagaccatgggtgggggcagggggagtccaggcagcttctgagaggccagaccttgcagggtcaattatgggccctgaggtgggggccctgaggagggcctctccagtgattgtgatccagagccaggcaggggcgtttctgtcttccaacaccacctgccagcagttcagggatcctgggtttagggggaggtacccagcatcgcctcacaccctgtctctccccccagagactgctcatctatgattacttctatgccttcctgcggcgggagtactacctcacacatggcctctacttgaccgccaaggatggcacagaggccatgctcgt

SEQ ID NO: 126038 - DNA, 937 bp, Homo sapiens
atggcggctcccttggtcctggtgctggtggtggctgtgacagtgcgggcggccttgttccgctccagtctggccgagttcatttccgagcgggtggaggtggtgtccccactgagctcttggaagagagtggttgaaggcctttcactgttggacttgggagtatctccgtattctggagcagtatttcatgaacggcagtacatacctgtgaaaatgaagagcaaagccttctggatcttttcttgggagtatgccatgatgtatgtgggaagcctagtggtaatcatttgcctctccttcttccttctcagctcttgggatttcatccccgcagtctatggctttatactttctgttccagatctcactccaaacattggtcattttctggtacttctttgcagagatgtttgagcacttcagcctcttctttgtatgtgtgtttcagatcaacgtcttcttctacaccatccccttagccataaagctaaaggagcaccccatcttcttcatgtttatccagatcgctgtcatcgccatctttaagtcctacccgacagtgggggacgtggcgctctacatggccttcttccccgtgtggaaccatctctacagattcctgagaaacatctttgtcctcacctgcatcatcatcgtctgttccctgctcttccctgtcctgtggcacctctggatttatgcaggaagtgccaactctaatttcttttaaggcatcacactgaccttcaacgttgggcagcggccgcacagactcaaagccccgcgggcgagctcagcagcccggagcgaccgcggccccgccgcctcccccgcgagtcccggcgatgcggcccggcctgtgagcggccggcgaccctgggacgccccgccgcacaactacctcaacgccgtgccgcccccctcccgcccccag

SEQ ID NO: 126039 - DNA, 701 bp, Homo sapiens
gtcatcgccatctttaagtcctacccgacagtggggcacgtggcgctctacatggctttcttccccgtgtggaaccatctctacagattcctgagaaacatctttgtcctcacctgcatcatcatcgtctgttccctgctcttccctgtcctgtggcacctctggatttatgcaggaagtgccaactctaatttcttttatgccatcacactgaccttcaacgttgggcagatcctgctcatctctgattacttctatgccttcctgcggcgggagtactacctcacacatggcctctacttgaccccccaagggattgcaccagaggccatgctcgtgcttcaaagtaggcctggctggcacagggctgcatggaccctcagggggcttgtggggccagaagctggggccaaagcctccaagcccagaagtttgccaagcaagcgagtgcttgggcagaagaggttcgagtccaagggtcacaagttctctggtaccaaaaagggacccatggctgactgacagcaaggcctatggggaagaactgggagctccccaacttggacccccaccttgtggctctgcacaccaaggagccccctcccagacaggaaggagaagaggcaggtgagcagggcttgttagattgtggctacttaataaatgttttttgttatgaagtctaaaaaaaaaaaaaaaaa

SEQ ID NO: 126040 - DNA, 210 bp, Homo sapiens
atgggaacactcactggcaaaacatttctaggggatagtttgatgaagggaaggcctggttgcagtatgcctgaaatttgggatgtagaagatcctgccaatgctgggaaaactcccttatgtaacctcttggtgaaggattccaaacctcacttcaccactgtattccagaacagtgtttacaaagtcctagaagttgtaaaagaatga

SEQ ID NO: 126041 - DNA, 870 bp, Homo sapiens
atgggaggaggtgggagcagcgggaccttccgagtaaggcatcccggcaggaacgtcagtgccttctggacacctccagaagcagaagcacacagccccacagaaaaatcctgcaggctcaggacccgaggcatgacacgatccaaactcactgcttcatcagacaccagtgagtccctcgacgcttaccaaggccccctgccttacacctgggagccctgtgctttgattaaccctatactcaacgctgtactggcagccctgctgtctgtgctgagattcctccctgttctgcccctggaacacacggcccgtgagcatcccaagaaggcagagaaccagacccatgaacgagcgctgagcacccgccttataaggcagctctggagaaacttggctggtgtggctgaggagccggagggggagaaggaaaggccccagcaaacagtggtcatgtgggcctcctgcatgccactggtagccccccagctaggaccacctctcctttatccctggaagcacaagaacagagagaagggggcctcagctcagaccagaagcaccccatgcaccgggtctcggtccagcctggaagcacggcccacagacctacatgactacctgggcagtgatccccaaaaggtcccccgtcaccagctggggagctcccgaggggagggtggctttgcagagcatctggagacatcaatgggccatgccattaagaacacttgtgattcacaagaagaggttgaaatatcaacattaacaggagtttggaagaagttgattccaaccctcatggatgagcggtttaagacttcagcagaggaagtcactgcagatgtggtggaaatagcagagaactag

SEQ ID NO: 126042 - DNA, 645 bp, Homo sapiens
ttatgccgctggcgatccaggttcatcaagccgttttgtgatgccttccatgtcggcaagaatgcttaatgaataccaacagtactgcgatgagtggcagggcgggggcgttatttttttaaaggcagttaatggtgcccttaaacgcctggttgctacgcctgaataagtgataataagcggatgaatggcagaaattcgatgataagttttgccgtagcctatgggcgccagcccaaatggccccgcgcatggattgaaggggtgtaaaggagttgtgggtgccgtgccccctatgggattccgatccagcggaaaattcggcaaagtaaccaccagggattcgcaagaaccggcatggttccggaagggggccacagaattttctgatcgggcaacgaacagatcaagcaacggtttttgatcccgggagagactatatcccgcctcagtgaggtcgtttgactggacgattcgcgggctatttttacgtttcttgtgattgataaccgctgtttccgccatgacagatccatgtgaagtgtgacaagtttttagattgtcacacgcatggcccaagattccattccttggaatccatgaggccacgaaccccagatcagagaacacgaggcttgccaccat

SEQ ID NO: 126043 - DNA, 5580 bp, Homo sapiens
tcagacccgtgaaatgaagcccaggccgaggctggctggaatctggatggtttctagtgcgagggaagatgggttgaaaggaaaggtgacaggaaagatgtgtttagcatccatgagcagctggggagagtctttcctgtctcgtaaacgcatctgtatagtacgaatgaacgacacagagactctttcttcaaactcattaactggagtatacaaattcaacactttcacaatctgggcagtagttaaagcattgcacatagaacaaatggcttctgcatcatcatctgttttctttttcacttgcaaaagttgagcagcctgaatgagaggttccagggtttctttagccccactattcatcagattcttgtcacgcagccattcttccagttgactgacattgtacctgatctgcatgcctttactccaggagcacatgtccttccgcaggagaaggttgttcagggtgatggcccctatgatgtagaacatctgcttgaccacctgcttgatcagttcagggtccatgccatgctgacacatgaccgagtggaaggagttgagctgccggaggatggagtccagtgtgtaggtgccctcatcggcgatactggaggttcgctttctcaaccctgtgggcttcaccccagacacgccctgaatcgtttcatgttccagcatgcctgagacaatcattggctgaaggatgttctctaacacccgcacgagctgctggtagatctgaatggccaagtcactcagcacctgccgatactcagccaggtcaaaattggtgaggcagtgttcattctggcgagatgtgttgtgcttcataaagccctcttctccactgtactgtttcaagcagtgcaaaaatcggcatgtgttagagagccagaaggagacggtttcaaaatcatcacctctttttttctgatcatcattcaggtagtcagcatgtcgaacacacatgaacaggatatatgccggtaatcctggaatcaaattgactgctacaccacgtggcttcagttcattaacccatgtgccagaaggaacttttatccaatgcagaaaatacttgcccagaatcaggttcttaacaagtttttgctcatcctccttcttgtattccagcatcccttggaaatccttttctttcctgggaatgttgactggtcggatgggttcatcaatgatctgtcctggggatatgttctccatctggcccacttctagttcgccaatttttttggcaaatactttcagttgttttttcagtttacggaccgtcttatcctgtttttcaagttgttccatcaaatcaatcatccgtttgtaaagggaaatccgatatgattgatacttcttagggtcatctgcatataattcctcaaaatacaagttttcgttggtcagccgggtgatctcgtgctgcaggctggcctcaatgcgggcctctgggggcagctgcaggttctgggccagcagctgctgctgtcggttgttctcctccttcaggctctggatctccccacggagggcctcggcctcattctcatggctcctcttctgtgactgcagctgggattccaggagccaagatagcagaaaccacggagtcaccttcaggcttctccatccctcgcccacacattcaataaaccaaacagctttctgacttcgtcttcttatgtatctttcaaaacgtcccatttctgtcaatcctaacttgggttggatggcctctttctggctcaccagttgagaccttaagatgaggacttcctccttgcggacatcaagctcctcgctcacagaggtcagctgctccatgaggacacggtaggcaggtgcacctggggcggtcacctctggggcacttttctcactgagggccttgcgcaactcatttagctcattcttcagttttttgttttctgattctagttcttgacgcttgagtgactcatattccagttctgcacctctaatttgtggtctttcttcttccttggccttgctgcggagcacctgctcctccttgcggtccagctcatcctgcatcacctgcttctcctgctccagctctgtgacccgcttctggagcttaaggaacaatgacatgtccagaggtaccttcttctcacttggttcctctgtccttgatggaatgtcttccatttctgcaatttcagagctaaagatatattcagactcgttgctgctgtgggtggagtctgttctcttgtgtccaggcttaggcacatgctgtactgcaatgtgaagggaagatccaagaacaccagcacctctgaaacgatccagaagctggggtgcacaataactttggtgtgaggttggttggcgtgtagtacgcatataagctttacctgtcatctccttagcctgctgcacgatgcggtgattgagggcttctttttcttgcttcagcaaagtattttcttccttcagatttgataccagttgctctgtttcttgtttgtatcgatctgcatgttcctcaatgcattttttctctgaacgagtttgctccaggtctttccggagcttggcaatttcttcctgcagactaaggacccgcccagtggcaactttcgcttcctcttcacttagttgaagacgttctaagtcacttcgtagtttctcagtctcagagttgtatattccttccagattggttagtttctccacaaggcatttgtagtctttgttctgctcatcaactttgcgctgcagctgcatgatcttgttctccatgccgatgtgcagcttcttatagcgctccactgagcgagcctcgattttgagcttctttagctcacgcttggccatcatccgcctgaagcagcactgaaggtagatgatggcatgcatgctcctcttgtagtgtgtgcgggccagccagccccggactcgcttctgaatgatgactgctttgtgctcacggagtatctgcagaaaaggataagggcaagcaatgtcaagaccctggactacactcatgattatcaatctatgtcgggctgaaaatccacacattaccttgcgatacctatttctggccaagaagcctcgcaagtaagactgaagaacgatagtggcagctcgtctaatcttgtacctcctgcggaccacatacatgcgccagtacttttgaatgatggttgctgccttggttctgcgcagaaacttagcatagcatcgggcctggtagccccgcacgtatctctgcatggtgatggctgccttccgcatgcgtaggtacttctttctcagcagccaccctcggatggtcttctggatccggatgcaggcagctctcagtttgtcagctctcaatttttctagataggccacttgaccggcacggaaaaagatctttgtcttaccaaactggtatttgtccttgtccagtatcagtttctctaacacattcttgcatgtttgctttctgtcactcagcacatctttctgcttcattaggacacggtagcggctgaaaaattcttggtaagtccaccgtgaggggaaaccggccgcactgattcggatggtttccaggacaccacatgctctcagctgctgcactgccctcttctcatcaaacgtgaatgggaacttgaagtcattaggcttgatacagcgcacatagtgaggggtagtggcattgagtgtctccataagcaggtgcagggagtttctgaactgatgccccactgttttcttgtgctctttggccatttggcctggtctgcctttggtgggctttgcaggagttcgtgtgaggggtgtgcgccctgaggaggtggctgaagttggactgatggccttctcatcatcttgaaatagttctggtagcatcttaaactttccttcctcgaggtgaagcaggaggactttatctcctggcttataatctttgagcagctctgctgacttccagacttcctctggatcaggtatccaaaccctggcaaatttgtcagcaaaatgttggatgatgaaagctttgtttgatagacgaggcttttcaaagagtgcacatttgttcaaatgtgtgttgtacaatttttgggcccaggtgtcatctgtgcctttaggcatcttgcattcctcatccagtaaatctagaatgcctagttttgattctataagattaatacaaggctgattatcataaaaatctatgagtgtccatggaatttgttccttcatatattcttcttgctccaatttgaagacatgggtgttacacacatataggagggaaataggaacagagatcctacaggttccgtaaatgtctagcacaccaataaaagagtgctgtttgacagcagaatggagagcctgattgacattatctacaatccagttaaagagcttggcacagctctgcttggccaaatcatcgcgggcatttgtggtctgcacccttgtgatgggcttgatgtatgtctctgtggcagtagccagtttccgatggcagagccagtgacacatctcctcatagtccacacccatgagttcacagaagatgcagagaggttcatgcttgggaggtattgtgcagctgtctgcatctcgggatgtaaatccaacattgcctaagtgaaggatgccagcaagtattcggaaaattcccatttgatgagattcactaattcctagcaaagtgcaggcctgcctagtatgtgccatcccctttgcatcatccactccttcaatcacaggactgcctccttgttttgtgtaattaaagttatctgcatttcctaatcgtagcattttaaattcaggtaactttgctgaggcacaaagctgatagaagatatgatagtttctctcctcttctgcctggaataccactctggatttctctaaaagataagttctcatattggcaccaatgattcgatatctcttatcaaaaccaatctcaatatacttcccaaaacggctgctattatcattcctggttgttttagcatttccaatggactccatgatggggttggaggccaagaccttttcctccacattggcctcactggcagaaccactcacagttgcaaagtatcgcatggcatacttagctgagactgtttttcctgccccagactctccacttacgatgatggactgatttcgttcatctctggccatttgcttgtaagcttcttcagctactgcaaagatatgtggatccatatcacccatgttctgaccactgtatgcattaataatatcttctccataaataggcagctgttcatagggatttatagctactaggactataccacaatacgtataaataagtttggaatcaataaagcggactctgagattatggagcacagcaggctcatgaagatagctgagggctgtgaggtcattttcaccaacaagtatgtcaggatttcgtaagtgaggcagctccttggtctttggatctagatggtattccaaatccgcatggcccaagattccattccttggaatccgtgaggccaagaaccccaggtcagagaacatgaggcttgccaccat

SEQ ID NO: 126044 - DNA, 899 bp, Homo sapiens
ctatttcactctattaaatcttgcaactgcactgtcttctggtccgtgtttgttacagctcgagctgagctttcacttgctgcccaccactggtgtttgccgctgtcacagacccgccgctgtcgcagacctgccgctgacttccaaccctccagatccagcagggtgtccgctgtgctcctgatccagcgaggcgcccattgctgctccaaatcgggctaaaggcttgccatcattcctgcacggttaagtgcccgggttggtcgtaatcgagctgaacacttgtcactgggttccacggttctcttccgtgacccatggcttctaatagagctataacactcactgtgtggcccaagattccattccttggaatccgtgaggccaagaacccccaggtcagagaacatgaggcttgccaccattttggaagtggcctgccaccatcttgggagctctgggagcaaggaccccctcgtaacagtgaaattctgaagataaatgacatacaagtgccaaatttacagttccaaaatgaagagttctgcattcaaaaaaaggatgagaaaggatgttatttgagctagaccttcaagcacaagaggaattccgataagtacgaggcactggaaaattattatagtcaaggataatggcaaaagcagagaataaaggcaggaaggggcatgtagtgatcagaagccaaaacaaaaatcagtgggcagatacattctttagaacaactcattattatcgtcattatatacacaagaaaacagagttcatcagataggttcagcagattgttcaaggtcacatagcaaaagatggagactcttggattttatcccagccagaccaactctaaccaccatcctgtgcagcctgagaccaattgt

SEQ ID NO: 126045 - DNA, 225 bp, Homo sapiens
atgggccaactgtatgaggtaatggttctggttgcacaatactggatgccgtccagtgcagtctggcatcctctagcccttgttctagatgcgttgataacacatctgagaagtggggcagaaggtgttatttatccggatcctcttacatatggcagtgacaatcatgaggaagactattttctgtatgtggcctacagtgatgagagtgtctatgggaaatga

SEQ ID NO: 126046 - DNA, 10386 bp, Homo sapiens
tcaagctgaaccatcgtaggaagttgaaagccttagaaagaggacttggtaaagtttttggattatcttgaaactctggcaagatggccaagtatggagaacatgaagccagtcctgacaatgggcagaacgaattcagtgatatcattaagtccagatctgatgaacacaatgacgtacagaagaaaacctttaccaaatggataaatgctcgattttcaaagagtgggaaaccacccatcaatgatatgttcacagacctcaaagatggaaggaagctattggatcttctagaaggcctcacaggaacatcactgccaaaggaacagtggttccacaccggtacatgccttatagaacggagacagagtgctgcaggttttacatcacaacaatgtggaattagtgaatatagggggaactgacattgtggatggaaatcacaaactgactttggggttactttggagcatcattttgcactggcaggtgaaagatgtcatgaaggatgtcatgtcggacctgcagcagacgaacagtgagaagatcctgctcagctgggtgcgtcagaccaccaggccctacagccaagtcaacgtcctcaacttcaccaccagctggacagatggactcgcctttaatgctgtcctccaccgacataaacctgatctcttcagctgggataaagttgtcaaaatgtcaccaattgagagacttgaacatgccttcagcaaggctcaaacttatttgggaattgaaaagctgttagatcctgaagatgttgccgttcggcttcctgacaagaaatccataattatgtatttaacatctttgtttgaggtgctacctcagcaagtcaccatagacgccatccgtgaggtagagacactcccaaggaaatataaaaaagaatgtgaagaagaggcaattaatatacagagtacagcgcctgaggaggagcatgagagtccccgagctgaaactcccagcactgtcactgaggtcgacatggatctggacagctatcagattgcgttggaggaagtgctgacctggttgctttctgctgaggacactttccaggagcaggatgatatttctgatgatgttgaagaagtcaaagaccagtttgcaacccatgaagcttttatgatggaactgactgcacaccagagcagtgtgggcagcgtcctgcaggcaggcaaccaactgataacacaaggaactctgtcagacgaagaagaatttgagattcaggaacagatgaccctgctgaatgctagatgggaggctcttagggtggagagtatggacagacagtcccggctgcacgatgtgctgatggaactgcagaagaagcaactgcagcagctctccgcctggttaacactcacagaggagcgcattcagaagatggaaacttgccccctggatgatgatgtaaaatctctacaaaagctgctagaagaacataaaagtttgcaaagtgatcttgaggctgaacaggtgaaagtaaattcactaactcacatggtggtcattgttgatgaaaacagtggtgagagcgctacagctatcctagaagaccagttacagaaacttggtgagcgctggacagcagtatgccgttggactgaagaacgctggaataggttacaagaaatcaatatattgtggcaggaattattggaagaacagtgcttgttgaaagcttggttaaccgaaaaagaagaggctttaaataaagtccagacaagcaacttcaaagaccaaaaggaactaagtgtcagtgttcgacgtctggctattttgaaggaagacatggaaatgaagcgtcaaacattggatcagctgagtgagattggccaggatgtgggacaattacttgataattccaaggcatctaagaagatcaacagtgactcagaggaactgactcaaagatgggattctttggttcagagactagaagattcctccaaccaggtgactcaggctgtagcaaagctggggatgtctcagattcctcagaaggaccttttggagactgttcgtgtaagagaacaagcaattacaaaaaaatctaagcaggaactgcctcctcctcctcccccaaagaagagacagatccatgtggatattgaagctaagaaaaagtttgatgctataagtgcagagctgttgaactggattttgaaatggaaaactgccattcagaccacagagataaaagagtatatgaagatgcaagacacttccgaaatgaaaaagaagttgaaggcattagaaaaagaacagagagaaagaatccccagagcagatgaattaaaccaaactggacaaatccttgtggagcaaatgggaaaagaaggccttcctactgaagaaataaaaaatgttctggagaaggtttcatcagaatggaagaatgtatctcaacatttggaagatctagaaagaaagattcagctacaggaagatataaatgcttatttcaagcagcttgatgagcttgaaaaggtcatcaagacaaaggaggagtgggtaaaacacacttccatttctgaatcttcccggcagtccttgccaagcttgaaggattcctgtcagcgggaattgacaaatcttcttggccttcaccccaaaattgaaatggctcgtgcaagctgctcggccctgatgtctcagccttctgccccagattttgtccagcggggcttcgatagctttctgggccgctaccaagctgtacaagaggctgtagaggatcgtcaacaacatctagagaatgaactgaagggccaacctggacatgcatatctggaaacattgaaaacactgaaagatgtgctaaatgattcagaaaataaggcccaggtgtctctgaatgtccttaatgatcttgccaaggtggagaaggccctgcaagaaaaaaagacccttgatgaaatccttgagaatcagaaacctgcattacataaacttgcagaagaaacaaaggctctggagaaaaatgttcatcctgatgtagaaaaattatataagcaagaatttgatgatgtgcaaggaaagtggaacaagctaaaggtcttggtttccaaagatctacatttgcttgaggaaattgctctcacactcagagcttttgaggccgattcaacagtcattgagaagtggatggatggcgtgaaagacttcttaatgaaacagcaggctgcccaaggagacgacgcaggtctacagaggcagttagaccagtgctctgcatttgttaatgaaatagaaacaattgaatcatctctgaaaaacatgaaggaaatagagactaatcttcgaagtggtccagttgctggaataaaaacttgggtgcagacaagactaggtgactaccaaactcaactggagaaacttagcaaggagatcgctactcaaaaaagtaggttgtctgaaagtcaagaaaaagctgcgaacctgaagaaagacttggcagagatgcaggaatggatgacccaggccgaggaagaatatttggagcgggattttgagtacaagtcaccagaagagcttgagagtgctgtggaagagatgaagagggcaaaagaggatgtgttgcagaaggaggtgagagtgaagattctcaaggacaacatcaagttattagctgccaaggtgccctctggtggccaggagttgacgtctgagctgaatgttgtgctggagaattaccaacttctttgtaatagaattcgaggaaagtgccacacgctagaggaggtctggtcttgttggattgaactgcttcactatttggatcttgaaactacctggttaaacactttggaagagcggatgaagagcacagaggtcctgcctgagaagacggatgctgtcaacgaagccctggagtctctggaatctgttctgcgccacccggcagataatcgcacccagattcgagagcttggccagactctgattgatggggggatcctggatgatataatcagtgagaaactggaggctttcaacagccgatatgaagatctaagtcacctggcagagagcaagcagatttctttggaaaagcaactccaggtgctgcgggaaactgaccagatgcttcaagtcttgcaagagagcttgggggagctggacaaacagctcaccacatacctgactgacaggatagatgctttccaagttccacaggaagctcagaaaatccaagcagagatctcagcccatgagctaaccctagaggagttgagaagaaatatgcgttctcagcccctgacctccccagagagtaggactgccagaggaggaagtcagatggatgtgctacagaggaaactccgagaggtgtccacaaagttccagcttttccagaagccagctaacttcgagcagcgcatgctggactgcaagcgtgtgctggatggcgtgaaagcagaacttcacgttctggatgtgaaggacgtagaccctgacgtcatacagacgcacctggacaagtgtatgaaactgtataaaactttgagtgaagtcaaacttgaagtggaaactgtgattaaaacaggaagacatattgtccagaaacagcaaacggacaacccaaaagggatggatgagcagctgacttccctgaaggttctttacaatgacctgggcgcacaggtgacagaaggaaaacaggatctggaaagagcatcacagttggcccggaaaatgaagaaagaggctgcttctctctctgaatggctttctgctactgaaactgaattggtacagaagtccacttcagaaggtctgcttggtgacttggatacagaaatttcctgggctaaaaatgttctgaaggatctggaaaagagaaaagctgatttaaataccatcacagagagtagtgctgccctgcaaaacttgattgagggcagtgagcctattttagaagagaggctctgcgtccttaacgctgggtggagccgagttcgtacctggactgaagattggtgcaataccttgatgaaccatcagaaccagctagaaatatttgatgggaacgtggctcacataagtacctggctttatcaagctgaagctctattggatgaaattgaaaagaaaccaacaagtaaacaggaagaaattgtgaagcgtttagtatctgagctggatgatgccaacctccaggttgaaaatgtccgcgatcaagcccttattttgatgaatgcccgtggaagctcaagcagggagcttgtagaaccaaagttagctgagctgaataggaactttgaaaaggtgtctcaacatatcaaaagtgccaaattgctaattgctcaggaaccattataccaatgtttggtcaccactgaaacatttgaaactggtgtgcctttctctgacttggaaaaattagaaaatgacatagaaaatatgttaaaatttgtggaaaaacacttggaatccagtgatgaagatgaaaagatggatgaggagagtgcccagattgaggaagttctacaaagaggagaagaaatgttacatcaacctatggaagataataaaaaagaaaagatccgtttgcaattattacttttgcatactagatacaacaaaattaaggcaatccctattcaacagaggaaaatgggtcaacttgcttctggaattagatcatcacttcttcctacagattatctggttgaaattaacaaaattttactttgcatggatgatgttgaattatcgcttaatgttccagagctcaacactgctatttacgaagacttctcttttcaggaagactctctgaagaatatcaaagaccaactggacaaacttggagagcagattgcagtcattcatgaaaaacagccagatgtcatccttgaagcctctggacctgaagccattcagatcagagatacacttactcagctgaatgcaaaatgggacagaattaatagaatgtacagtgatcggaaaggttgttttgacagggcaatggaagaatggagacagttccattgtgaccttaatgacctcacacagtggataacagaggctgaagaattactggttgatacctgtgctccaggtggcagcctggacttagagaaagccaggatacatcagcaggaacttgaggtgggcatcagcagccaccagcccagttttgcagcactaaaccgaactggggatgggattgtgcagaaactctcccaggcagatggaagcttcttgaaagaaaaactggcaggtttaaaccaacgctgggatgcaattgttgcagaagtgaaggataggcagccaaggctaaaaggagaaagtaagcaggtgatgaagtacaggcatcagctagatgagattatctgttggttaacaaaggctgagcatgctatgcaaaagagatcaaccaccgaattgggagaaaacctgcaagaattaagagacttaactcaagaaatggaagtacatgctgaaaaactcaaatggctgaatagaactgaattggagatgctttcagataaaagtctgagtttacctgaaagggataaaatttcagaaagcttaaggactgtaaatatgacatggaataagatttgcagagaggtgcctaccaccctgaaggaatgcatccaggagcccagttctgtttcacagacaaggattgctgctcatcctaatgtccaaaaggtggtgctagtatcatctgcgtcagatattcctgttcagtctcatcgtacttcggaaatttcaattcctgctgatcttgataaaactataacagaactagccgactggctggtattaatcgaccagatgctgaagtccaacattgtcactgttggggatgtagaagagatcaataagaccgtttcccgaatgaaaattacaaaggctgacttagaacagcgccatcctcagctggattatgtttttacattggcacagaatttgaaaaataaagcttccagttcagatatgagaacagcaattacagaaaaattggaaagggtcaagaaccagtgggatggcacccagcatggcgttgagctaagacagcagcagcttgaggacatgattattgacagtcttcagtgggatgaccatagggaggagactgaagaactgatgagaaaatatgaggctcgactctatattcttcagcaagcccgacgggatccactcaccaaacaaatttctgataaccaaatactgcttcaagaactgggtcctggagatggtatcgtcatggcgttcgataacgtcctgcagaaactcctggaggaatatgggagtgatgacacaaggaatgtgaaagaaaccacagagtacttaaaaacatcatggatcaatctcaaacaaagtattgctgacagacagaacgccttggaggctgagtggaggacggtgcaggcctctcgcagagatctggaaaacttcctgaagtggatccaagaagcagagaccacagtgaatgtgcttgtggatgcctctcatcgggagaatgctcttcaggatagtatcttggccagggaactcaaacagcagatgcaggacatccaggcagaaattgatgcccacaatgacatatttaaaagcattgacggaaacaggcagaagatggtaaaagctttgggaaattctgaagaggctactatgcttcaacatcgactggatgatatgaaccaaagatggaatgacttaaaagcaaaatctgctagcatcagggcccatttggaggccagcgctgagaagtggaacaggttgctgatgtccttagaagaactgatcaaatggctgaatatgaaagatgaagagcttaagaaacaaatgcctattggaggagatgttccagccttacagctccagtatgaccattgtaaggccctgagacgggagttaaaggagaaagaatattctgtcctgaatgctgtcgaccaggcccgagttttcttggctgatcagccaattgaggcccctgaagagccaagaagaaacctacaatcaaaaacagaattaactcctgaggagagagcccaaaagattgccaaagccatgcgcaaacagtcttctgaagtcaaagaaaaatgggaaagtctaaatgctgtaactagcaattggcaaaagcaagtggacaaggcattggagaaactcagagacctgcagggagctatggatgacctggacgctgacatgaaggaggcagagtccgtgcggaatggctggaagcccgtgggagacttactcattgactcgctgcaggatcacattgaaaaaatcatggcatttagagaagaaattgcaccaatcaactttaaagttaaaacggtgaatgatttatccagtcagctgtctccacttgacctgcatccctctctaaagatgtctcgccagctagatgaccttaatatgcgatggaaacttttacaggtttctgtggatgatcgccttaaacagcttcaggaagcccacagagattttggaccatcctctcagcattttctctctacgtcagtccagctgccgtggcaaagatccatttcacataataaagtgccctattacatcaaccatcaaacacagaccacctgttgggaccatcctaaaatgaccgaactctttcaatcccttgctgacctgaataatgtacgtttttctgcctaccgtacagcaatcaaaatccgaagactacaaaaagcactatgtttggatctcttagagttgagtacaacaaatgaaattttcaaacagcacaagttgaaccaaaatgaccagctcctcagtgttccagatgtcatcaactgtctgacaacaacttatgatggacttgagcaaatgcataaggacctggtcaacgttccactctgtgttgatatgtgtctcaattggttgctcaatgtctatgacacgggtcgaactggaaaaattagagtgcagagtctgaagattggattaatgtctctctccaaaggtctcttggaagaaaaatacagatatctctttaaggaagttgcggggccgacagaaatgtgtgaccagaggcagctgggcctgttacttcatgatgccatccagatcccccggcagctaggtgaagtagcagcttttggaggcagtaatattgagcctagtgttcgcagctgcttccaacagaataacaataaaccagaaataagtgtgaaagagtttatagattggatgcatttggaaccacagtccatggtttggctcccagttttacatcgagtggcagcagcggagactgcaaaacatcaggccaaatgcaacatctgtaaagaatgtccaattgtcgggttcaggtatagaagccttaagcattttaactatgatgtctgccagagttgtttcttttcgggtcgaacagcaaaaggtcacaaattacattacccaatggtggaatattgtatacctacaacatctggggaagatgtacgagacttcacaaaggtacttaagaacaagttcaggtcgaagaagtactttgccaaacaccctcgacttggttacctgcctgtccagacagttcttgaaggtgacaacttagagactcctatcacactcatcagtatgtggccagagcactatgacccctcacaatctcctcaactgtttcatgatgacacccattcaagaatagaacaatatgccacacgactggcccagatggaaaggactaatgggtcttttctcactgatagcagctccaccacaggaagtgtggaagacgagcacgccctcatccagcagtattgccaaacactcggaggagagtccccagtgagccagccgcagagcccagctcagatcctgaagtcagtagagagggaagaacgtggagaactggagaggatcattgctgacctggaggaagaacaaagaaatctacaggtggagtatgagcagctgaaggaccagcacctccgaagggggctccctgtcggttcaccgccagagtcgattatatctccccatcacacgtctgaggattcagaacttatagcagaagcaaaactcctcaggcagcacaaaggtcggctggaggctaggatgcagattttagaagatcacaataaacagctggagtctcagctccaccgcctccgacagctgctggagcagcctgaatctgattcccgaatcaatggtgtttccccatgggcttctcctcagcattctgcactgagctactcgcttgatccagatgcctccggcccacagttccaccaggcagcgggagaggacctgctggccccaccgcacgacaccagcacggatctcacggaggtcatggagcagattcacagcacgtttccatcttgctgcccaaatgttcccagcaggccacaggcaatgtga

SEQ ID NO: 126047 - DNA, 414 bp, Homo sapiens
atggccaagtatggagaacatgaagccagtcctgacaatgggcagaacgaattcagtgatatcattaagtccagatctgcactctctggtaccttttctggtactgtgtgttcattaatagccttcccactagaacagggctccccaactcccagggcctggactggtaccagtccgttgcctgttagggaccaggtggcacagcaggaggtctctcctactacaggagagagagataatggccctttgctcctcattccgcattcagaccagattccccagctggcaatctcctgccatcggattgcatcaccaactcaacctaattggtcacctggacctgaaggacagttctgactttccttcaaatctcatgccgttgttgatgctcgtctggtggatttgtacctgaga

SEQ ID NO: 126048 - DNA, 938 bp, Homo sapiens
ctaaacaaagagtcctctttccagccatctaatcgggtaatttattttttcaaccatcacataaatcgaaacacagctgtaaccaatgacttgcagatccagttcccagccagctggaatcagttctgctgaaacagcaagatttttacattgttcacttctgtacatctgccaaacacatccttgttcttcctgcacgagactggactcacctctgctactactaggtaaaaggtgctcagaggcaggtggaataatgattaatcgtaataaataatatacatgaagttctggagagatatccacagatattatgggtgaaacacagctagaccactggacactcagttcctgttcttgggaagttgtctctccagcgaaatgacgccaggtaaacagcccacagcattcgatgtgctgattatattgtgacaaaggctgacaaagtacagactctaaggggcgcactggaccatccttcccacagacaccgggagtctgaaatggttttctcctatgatcactttcttcacttttcatatccattttaagtttttcccaaccgactaccacttcttcaagcatcttgacaactttttgcagggaaaacgcttccacaaccagcaggatgcagaaagtgctttccaaaagttcctcgaatctcaaagcacggatttttatgctacaggagtaaacaaacttatttcttgttggcaaaattgtgttgattgtaatggttcttactttgattaatacagatgtgtttgagcctagttttaatgattcaaaattcatggtccaaaatggcaagcacttttgcaccaacctagtacacagtgacctggtgaggtatattctagggatgcaaagccagtttaatattcaaatatcaatcagtacaattcaccacatcaacaggctaaaaaagaaacatcaca

SEQ ID NO: 126049 - DNA, 475 bp, Homo sapiens
  misc_feature (1)...(475): n = a,t,c or g
gatgggtcccgatcgagaccctagttagagagcggtaattccaagntgaaaatccttctatttatatatattataaggtctcaaactcttgacctcaaaaaaaatatatacatatatttttagacagtcttgctctgttgcccaggctggagtgcagtggtgcaatctcggctcactgcaagctccacctcctggtttcaagtgattctcctgcctcagcctcccaagtagctgggattacaggtgcacgccaccatgcctggctaatttttgtatttttagtagagatggggtttcaccatgtggccaggctggtctcgaactcctgacttcaggtgatccgcctgccttggcctcccaaagagctggggtttctatatttatttatttatttattttttgagatggagtctcgctctgtcgcccaggctggagtgcagtggtgggatcttggctcactgcaagctccgcctcn

SEQ ID NO: 126050 - DNA, 315 bp, Homo sapiens
tttttttttttttttgagactgagtctgactctgtcgctcaggctggagtgcagtggctcgcggcaacaaggcctgggttcaagggattgtcacgcctcagcctcccgtgtagctgggattacaggcacaagccaccaaacccggctaatttttgtatttttagtagcgacggggtttcgctatgttggccagggtggtctcaaactcctgacctcaagtgatctgcccgcctcggcctcccaaaatgctgggagtacaggcgtgacaccacgcgcggaccagttactttttaaagtggctctaggtccctttag

SEQ ID NO: 126051 - DNA, 3869 bp, Homo sapiens
tttttttttttattaggaaattgtagataattttaatgaagtcaacgtcaagaatataatctggttgtaataccaatacaatgtgttctaaaataatttttctattgagttaaatattcatctgtagatcctataacagcatgttcatattcacaaaatctgaatgaaaagtaaacacaacttggcatttctgacgcagggtaacacaaagttcacttcggaggggactgagatttttgtttaattttgcttttgaaaccaagcacagttatagtcaaaatgagggacattattcagaatgaggttatgtatttatttaacaaaatactgcttctctgaagtacatttcattagggagagtgacagtaatgctaaaaaaaagaacatgaaaatgcacacagcatttctgaaaggttataataatttatttaatttttttttgagacagagtctcactctgtcacccaggctggagtgcagtggctcctgtgatcttggctcactgcaacctccacctcctgggttcaagcaattctcgtgcctcagcctctcaagtagctgggattccaggcatgcaccccaaacctggctattttgttttgtatttaaattagtttaatttttttttgaggcagagtcttgctctgttgcccaggctggagtgcagtggcatgatctcagctcactgcaacctccatctcccaggctcaagcaattctcctgccttggcccccagagtagctgggattataagcacctgccaccatgcccaggtaatttttgcatgtttagtagagatggggtttcaccatgttggccaggctggtctcaaactcttgacctcaggtgatttgcccgccttggcctctgaaaagtgctgggattacaggcgtgagcaaccgcgcccagccctatttttttggtattttagtagggaccagcgtttcaccacgttgggccaggctggtctcgaactcctggcctcaagcaatccacccgcctcagcctccaaaagtgctgggattacagatgtgagccatggcacccatgccaaaaggctatattcctggctctgtgtttccgagactgcttttaatcccaacttctctacatttagattaaaaaatattttattcatggtcaatctggaacataattactgcatcttaagtttccactgatgtatatagaaggctaaaggcacaatttttatcaaatctagtagagtaaccaaacataaaatcattaattactttcaacttaataactaattgacattcctcaaaagagctgttttcaatcctgatagttctttattttttcaaaatatatttgccatgggatgctaatttgcaataggtgtcataatgagaataacccaaactggataaatgtgacaaatgattgacaaagcatttcacacccttcaattacaccacatcaagaatgaggggaaagcgttgtaaaagtagactactgcaatgctacttgtattcttgcaataaaaccagcaagcatccatatcaagagagttatcatctcacttccaactttttcccctcaagaacaatttgaatctctttggcatccaaagtctcataggtcaataaagcttctgcgagattcttatgctcctttgcatgagttttcaagatatgttttgctcgttcatatgagtcccttagaaggattcttatttcttgttcgatggcagattgggtttctggacttagtttccctgtatcactgtaggtcataactccaagcttttcactcattccaaatttggtaaccatccgctttgctattttagtggcattatcaaaatcactggaagcacctgttgtaatatggtcggttccaaatataagctcctctgccactcttcctcccatactaacatccatttgtgcaagcagctgggctctagtttcattccatctgtcattctcaggtaacagggacacatgtccaagtgttggcccccgtggcatgattgtagctttgttgataggcattgcatcttttgtgtaatatgcaataatggcatgaccagattcatgatatgctgtgatggttttgtttttgttatcaatttccacacttcttctttcaggccccattagaattttgtctttggaaaactccagctccttcatggtaaccatttcttttccatcaacagctgcttttaatgcagcctggttcacaagattctccaactctgctccggaaaagccaacagtacctcgagctataatttctggatcaacggattgatcaaactttattttattgagataccatttcaaaatttctgttcgaccttttacatctggccttggaactgtaacttgcatgtcaaaacgaccaggacgtattaaggcattatctaatgcctctgggaagtttgtggctcctattatgataactccttcattgggtttaaaaccatccatttcagcaagaagttgatttatggtctgccttgaatatggatgcattggagattcaattctcttcccaccaacagaatctaattcatcaataaatataacacaaggagcattcgcctttgcttccctaaaaagatttctgatacggctggctcccacacccacaaacatctcatcaaattcggatccagaagcataataaaaaggaacatcagcttctcccgccacagctcgggcaagaagtgtctttccagtccctgggggtccaactaaaagaattccttttggaagtttacctccaagaatagtaaatttttgtggatttttcaagaattcaacaacttcctgtaattcttgtttagcttcctccacccctttaacatgttcaaaggtgacatttttcatctggacaggatctactgcagaatcaagccctgttgttgtccggaagcggacagataaaaatgggttttttagaagtccataaatgccgaatagcagcagaacgaagagaatcagacgggttcgccttagggaatcattggttttttgtgtgagtgcttgagctttcagaaaaccttccgcaaaaccagttttaaatgcatcttggtgagcttcaggtatatttttggttttcatgagtttgtccaaactctcaacatctgatcctctgtcccgcaaaagaaaccccttcacgaatgatggcgctatattctgtgtttcagctaatctctcggaggtagactggagacgtcgtgtccttgatttcaaagttttaaaaccccgagactgtatgaaaactggccagtactgaagatctgaacaaatgctttgaagagctcttgaatgatgtcgatacaagcaagaggaacgtaatgtactaaatatatctaagttaccatatttattttcaaagaaggattgtgcagagacatgggatgtatgccaatgggaagaaatgtttttgcctttacaaaatccaggaagtagattttctaccagctgatcaatctgtccaatttttagttcagataatccaaggtcccttaagttaagtgaaggctcactgctgggagcctcatgctcaggaactacatctcgatgctggttttgagaaactgacactccactgagagaaacagaagtgttttttggtgtatggaaggcattgatgagatgactcagaggaactgtaacctggggttgcaccgtgctcgacaaggaaaacatctccggcgggccctcagcgacctcacccgcctgccgaaactgtgcccctctgtccacggcccggcggggaggcgctgagcccttcttttttcctttttctccgacccgttgcccctcactcctcccagaaacggaaaatggcctccccttcctacagctactgcaacgacagacaatccgcct

SEQ ID NO: 126052 - DNA, 437 bp, Homo sapiens
caccacacccggctaattttgtatttttagtagagatggggttttgccatgttggccaggctggtctcgaactcctgacctcaagtgatctgcctgccttggcctcccaaagtgctgggattccaggtgtaagccaccgtgcccagccctaaaacgtatttaaaatgttattttgttcccttaaaaatacttattatttttgcttagtgcaaagataatgtgtgtttatgatgaaaaccctgaaaatgtagacaggtataagaaatagtccattaactaatcacccagaaataaccattgctatgcattttcttttggccttttttctaagtacatatatttaaaaaataaaattagaatgctattgtattttttaacttcatgttttgtatcatgagcaaattccctcctaataaaagttatacatattttaacat

SEQ ID NO: 126053 - DNA, 7268 bp, Homo sapiens
tgcagcctgagttgcacctggctacagagtggagccttgcttctgaaaagatataaagtttattgggcaaacctagaatcatcagtattattacataaattagacagcggtaaaattttcctagggcatatgtacaaatcacagtgatttccattgcgcaacaaacaagattaaaaataggcactcccctccctgaccccccatgagaaggtggggtcactccgcggggttcccagttctggctcgccaaggggtgcacaaacctgccaaggcactctgcctgtgtgcacagcatccggcagcagtcacaggggccccagaagcacgttggcaacaaggcgaggctgcccagtgttcagcacaaaaaaagaattcagctgtgacagctgagcagagctcaacagccatctcagagcacaaggactgtggaaaagcttcaaatcccacctgctaaaacacagatgtaatgctttttatatacagaacagacatgtccaccatggaagatcaaactaagcctcaacagaacttcccaacacacaacaatttacagagaaacatgacagagcatccccgttattaggaaggactgtactgctgggggcaaggcagatggtttgcaaagcaaacttgattatgaaaaggcttggtgaaaatacagcccaccttcaccaagacacacacacagacaggcacacaccccaaagtatccaaatgcattaagacacctgttcatgtgcttttcttcttgcttttaagtcaatcccgtccatttaagttatactaattagaaggcgttcttgcctccatcagcaagagaaaaacagtgcatcgactcctccaatgtgtgtaaaatgcatgctaggtagattgaaggaaaaacgagaggaacccgggcaccccatttcaaatctgtacaactggagaaatcaaaggctgcaaggactgtgtagacctgatgcaaagttaactggctgcaaaaataaaacccaagccagtgctgtcttgcactctgttcactcagcagctggagcaatgaatgattgtgacattctggtggggtatttgtgcagcctgagttgcacctggctacagagtggagccttggagtctttaacagtgttaagccatagtttcacagttacaattgtccaaagaactagagaccatgtaggtcaaacacagaaatggcgaacaacacatcccaaaccactcaactgtttagttccactggtggaatttttttttaaaattggggggttaaggttggaatttcaaatgatttggtgttttgttgcttttgctttttcttcaaagcaaacaaataaaaaggtcttgaatatggacagaaaagaaacaaaacgctgaatgagaaattcagtaacaagtgattttgcagttgtttgatgggcatggagagggagtggggctgaactgcattttgaggggatgaagcgtgcaatcttacccactgctggggggtttctgtttcttattccatcatgctgacagcaaatataatttgcccatcgctggctatagatatgtttaggctaagcaggatttagacttctgttgtgaaggaattagaagaattcagtagatacagtgtatactattcggttgtgactttatttccttcctggctttatcaatgcctatgaaagcaggccggtggcatttcccttcagaaaaacaacctcttgttacttcttgttttaacatttccatttcctaaagatattctcttactgtatcccaatttaagaaaatactgccaattcataaaattacatggagcaaagtaaatttgtaatgtttttctgatacaaattttgtgattatcgtaagaattttcctctacattttgcacagtgattgtttcacgatcatctatgggaacattttggaatgcccacccgggtcaactatttttatttatttttttttttattttttgagatgggagtctcactccttcgccctggctggagtgcagtggcgcaatcttggttgactgcagcctccgcctcctgagttccatattctcctgcctcagcctcccgactaactgggattacaggcatgtgccaccacatctggctaatttttgtgtttttaatagagacaagggtttcatcatgttggccaggctggtctcaaactcctgacctcaggtgatctgcctgccttggcctcccaaagtgctgggattgcaggcatgacacactctgccaggtaaactctttttaaattattcagtgattgttccatgttttagctcattttgattaaattaacctctatatgacattgggacatttaaattatgaccccgccatgggcagtttccaggtagcctgtgtctcttcaaatgctgaaatgtgtgtgacggtcaaaagtgggttcacaccatcacacgttcttggaattgcttctaatttctcatttgttctgtatggctggaggctgatcatgatgtctgtaaagaacaaggtcaccaatgtgcttacatatttcattttcctgcgtatcagttcacaattaaggcatttcaggctttcctgatgctaatgctcatctgagtatgaaatcctggataataaaacagacaacataaaattacacatatggactcatgggtttatgtactttttaaagtgtgctcaagtgtttcatttatggttttattaataatttttaaagtagaatgttcaataatattattactatgatttatttttatagtcagcaaacatgagacttcatgcttttccttctagctccacgtcggtgcacagtgtaacctttttttaaaaaaatatggaatgctgcatgaatctgcggatcttcctcgcgcagggggccatgctaatctcctctgtgtcattccaattttagtatacctgctaccgaagtcagcaacagtttcaccttttcacattcacagtaaaactgatgggaaaccgcacgctaaatgtttaggcagcgatggccctcaactgttaatcccaacaggatggtgagtgagaagcacaggctgaaaatagagttgtctaaaacatttccacatttcaccatctgaacatcattttccactgagttattaattgtaaagagtttattctgctgaacctactaattattctcacctactgagttgaccgtcacgtgaagaaaaggtcactgatgaaacagggtggctatgttctgtttctgtaatttcactgttttaacatctttttttttatatagagatggggtctcgctatgctgcccaggccagtctcaaactcccaggctcaagcaatctttctgcttcagcttccccaaatcctaggattataaaagtgagccctacaaccagcttcactgtcttttaaagccttaaagtggacgttctcttcataccaccttcaaaagcaaaaagccattgaggttttttgggtttttttttttttttggaacagggtctcactctgtcacccaggctggagggcaatggtgtgatctcagatcactgtggcctggacctcctcaggctcaagtgatcctctcatctcagcctcctgagtagctgagactacaggcatgctccaccatgcccagttaacttttttgtattttgtagagatgaggtgtttcccagacaggtattgaactcctgggctcaagcaatcctctcgccccagcctcccaaagtgttacttaggattacaggtgtgagcctggccccagtgccttcttatctgtaggcgaactctggcccaaatctgattacatttcccttgacattttgcctacatttttaaaaatgtatggcttttcctaacagaaactctccacagtactgatgtgtgatatgtgtgcagaagagaggtagcaagtgctagagggagaaatctcttcccagatattgcttggaaaaacagctccaatagcaaggaatgcaccggatggctccagagaacctgagctactgagttttgagaagagattaggagccgaggggacccaactggcttctcactgcacacattttcactaacacatggcaagggtatactccacccctactctgggtgcagaaggagacagatgaaggcagggcatgagaaaaagaagaggtggagaagaaagtcttggaggtctgtgtgagtgtacccctgttgtcaacaaggaattcctggaaggctccaaaacctacttcttcaatgcactcacccctgccacagctgggccctgtgacctcatacacagcagatttgagcaatgccatatttgaggtgagtcacagtaaagagaaaaggtgcaccctcttcagatgtctacagccaagtttccagccaggatggtccagagaaaaagcaagggagaaaatgagttatgtacaaagccagaccccacaccctcagtttatgctgtgtctagcatgacccacatttagcaagagatgtttcagaacaaactcactgtatggctgtcatgccatcaacacccagggaagaacatctgggggttgctcctttcaggtgtctccccagtcatttcccaagagaacactctcacgcctggattattctgcataaaacagcatgacttgtcgaggagagtattaggcacactcaacatgaatatttaaaaggagaaattaggaacaggtgaggttccttttgactctgccacccactcacatcctatagatcatctgtttctcgcttttcccaaaactaaaggtgaaataaaatctctgcatgaaggtcagccttatagatgagctgatcttaaaagttatttgtgaactgtgggaggtgtattttttcaaaaaatttcaactgggactttaataggtagccatttccctgtgcaggatgaattttttttttaatacagggtcttgctctgtcgtccagcctggagtgcactggcacaatcagggctcactgcagcctcaacctcttgagctcaggcaatctctcctacaacagctcctgaatagctgggactacaggtatgcacaatgacacccgactaatttttataatttgtgtaaattccatacagacagggttcactatgttgcccaagctggtctcaaactcctggccttaagcaatcctcccaacccaggttcccagagtgctgggactacaggaacaagccactgcacctagcctagatgaaattttttaatgtgacacaggttttctgaatacaatgcattgctccaacaacttcaaagtcattgtggattcctgcaataaattcgctcccacatcttctccatgtttcrtcttttaaagtcrcaagttactaggtaggaagaactaaagatactgaatgtagacacccccggcccccggatatcttattcccccaaactatacaatgcatatgagatgatttttttaaaaatgcatgcaacatacccttcagatgttgtccccaagagaagggaagataatttgagaaactgaattgaaaaataaaaataataggctctgtgaagtatgtatatttacatcactgcacaatttgtgcatctgccataatgacttctatatatacacacacacacacacacacaatttgtggttataatcaaataagtccagttcaaacttataaagtctatgagaaaaaccaagacaacaccaaaagataagataaaatctataacgaaacaattttcaaaaccttcctacagtgtggaattctggttgcttaaataatgccagttccatgaatttcaactgtgctctgatctatttctatacacacaggtacagagaaaactggaaatgtcctcaggccgtgaagaagacattttgcttctggtctgcttaggtgcagttctttgttccaggcagattccaatcttcctgtttcttccagatgtgagctcgtcctcagaaattcttgaagatttctaaatccttctgcggcacgggcgcggctgtgtcccagtcatgctcagggtaagtttcgaagttggaagtgtcgccgttgccagctatcgtgggcacgatgggaggcttcagttttctctgcggaacagctttccagtccacggagcggaaccaccgatggtggttcacatcattcgccccgtttttacatggaaatccaaatgtctggggaaatatagtttgcctgcaagaattttctgataaatgccaaacgggttgtcatcaaaaaatggaggaaaccccgaaagcatctcgaatatcaggatgccgagggcccaccagtccacggcccttccgtggcccttgctctgaatgacttcgggggctaggtactcgggtgttccacagagggtccaagtcctgtctaccagcttcttggcaaacccaaagtccgtgagcttgatgtgaccatccctatccagcaggatgttctccggcttcaaatccctgtagacgatctccttggagtgcaggtactcaatggcacagatgatctccgcagagtagaagagccccgtggtgctggagaagtgcccccggttgcgcaggtagctgaagagctcgccacccggcacatactccatgagcatgtagaggaagcgctcctcatgccacgtccagaacagcctgatgaggaacgggtggctgacttccttcaggacagacttctcattgtgcacgtgctgctcctgcttccggcggatgacgtcgggaatgctcatcaccttgagggcgaagaaatgcttggctgtcttctccttcaccaggtgcacccgcccgaacgtcccagtgcccatggtgaccagcgcgtcgcagtcctgcaggcggtaggcaggcgcctccggcgaccgcgcctcggggctggggcagagcgcgggcgcccagtcggcggcatcctccgtcacctctcgggagttgctctccgccgcggccgcctgggccggcccgggcgcctccatggggaggcactcaggtccggggcgccgggccaggccggagcgctcgggaagccggactccccgggacgcagcctcggagggcggcgcggcagccgcggcagcatcaacggaggctccccatgcgcgccctcgcctctgggtgcgcggctcggcacggctgacggagacacagagacaatggctgggcggtgctcacggcactagcagcaatagccccgggagggagcagccgctggcctcgcggggcgtgcaccgagtgctggatggctgcgaggaaggcgggggcccaagcattcccggtctcacgcccgccgcttcctccagctcggtggccgcgtgc

SEQ ID NO: 126054 - DNA, 768 bp, Homo sapiens
atggggtttcgccatgtaggccaggctggtctcgaactcctggcctcatgtgatctgcccaccttggcctcccaaagtgctggaattacaggagtgagccaccatggccgacacaaaaaatatttcttaaatgatgatgatgatgtgatagaaatctacacgattactcagacagatcaagagcaggctggagtaccacaacaatgccgcccggggctccaacttaccactagcgtccgggaggaagaccaggcagcggtcgccgcggcggcagctagacgagaaacggactcggctgcaatcgcccagcggagcccgcggcagtcgcatctctgcactaatcgcgtcttctttcttcttcgttggcccctaactaactacactactctaaacggacgaaggccatcacacgagcgccacgacgatcgcgacgactccgacgacaacgatgtacagacagaagaagagttcatatgcaatcggcagggccttgggcccacagccagtcggttgcccagtcgttgtgggggagggaggggtgctgtcaatgcaaggtcaaggcagcaagaggtgaaccacaaaggctctcttttggcaactgctgggatgccgagctgcaaccggtcaggcagagctctaaccggtcaggcagagctctttttcacaggctcccaggcgcaaccgggcaggtgcctgcggtgtcctggcggcagcgcagagaagggtgaacggggcccccttggctcagaggcaccaaaaccaagctga

SEQ ID NO: 126055 - DNA, 1191 bp, Homo sapiens
atgcctatttgtgaagaacttggcacagttcatgacagcctgcttctgatcagggtggtttatggagaaataggactcggagatgggcagagacttcgtgggggccacacatcagtggcagctgggcaccctgatgaactcatcttcagaatgcagactgtgacttcatcctggacgaaggccaggtctgactcatctcggggtccccagccccggcccagggcctacagagaagctggcaccaggaaagccctcgtccgcggcctgcgcaccctcccctccggccctggactgacacatcgcttttggggtcgatgcactgtgtccaacattcggcctgaattgattaagcacttgctgtatgccgagcctgaggcagccactgtccgggcgctggaggggggaagcatggatcagggattccaaggcgggggcggtgaacttgaccggggggccggaaggaaggagacccccggccaggcctccagctgtgctctcaccgcatcagcccgtggcagatgggcgttggctcagtgggccgcccacctgtcccgtggtcacagtggacactcgagggctctgtgtgggcagctcatcttccacggggctcagaacattattgacagtcgggaaaatggtcgttcccttcacattgtagttggcaagattgcagacagccagcagaaactggcttccagccctgaccctgtcctgaagatgccggcaaacattgaggaagcctcttctacacaccaggcactgagcgaggcaccgatcaagacagacacaggcttgccccatgaggagcaagcagaaaaggaggacaagcacgaaaggacaagtgctgacctgcagtcacgggaatcggactcccggctccaagctgcccagaaacagaactccaggcccaaaggcgcccgtgagaagaatcaggcttcttgtgtgttggctgtagtgggagaaagaatggaaggagagggtctagaccactatgatgatgatgacgatgaagctttggcctgtcttcttctaatggactcctacctattcctcaaggttcagctcaaactccacttcttaccagaacttctgattcctcaccttccacgaaggccctcgctgctggccgtgcagagaggcaagtccagaggccaggacgcaggcagcgatgaccaggccttcctggaatga

SEQ ID NO: 126056 - DNA, 792 bp, Homo sapiens
atggggtttcgccatgttggccaggctggtctcaaactcctgacctcaagtgatctgcccgccttggcctcccaggtccagtgtaaactcgtggtccctgcatctgcagaaaggcacatttcccctctgcagcgcggactgattgcgttctcgctgcgtccagatccagggctcgccggcgacagagccagtctcggggtcccactgtgcggataccggattggtaatccgaggcggagccctaagcgcacacgccattgcgcccggacagcggctgtctcatgctctgcatacagcaagtgcttatatcaattcaggccgaatgtgggacacagtgcatctaccccaaaagcgatgtgtcagaccacggccgcaggggagggtgcgcacgccgcggacgagggctacacacaaagagtagtgggagcgaggcgagggacacctcaacgctacacgggcggggcagagactaagaaccgagcctttcgcagctaccccaaaatggagacctcttggccgcgcggcggagggagcaccccgcctgtagcactggatgcacaagtggagcgcgagtgcgctctagggtctggcgcgcagggcaagcactcgtgcctggctgtgcgggttgtgcttatattttgcattaacgaacattacccccaaacactcacctaccgattacctttcgtgcttcctctccgctcagggggaaccccaacctcctggagagctctgttctttcccagttccagcgactctaactgtaagctctgtgggggcacgagctcatag

SEQ ID NO: 126057 - DNA, 529 bp, Homo sapiens
  misc_feature (1)...(529): n = a,t,c or g
ttttttttttttttttttagtagagatggggtttcaccatgttggccaggctggtctcaaactcctaacctcaagtgatccgtccgccttggcctcccaaagtgctgggattacaggcgcgagccactcntgcccagcctacaatcatgatttctaattccaaaaatcagactttctaattctcaggtagatggccaaagctgattttcaagttttgtgtctttttaaacagaagaaaatgaaccttattaaagctgaatgactcattcaaggccatatagctggtaggtggcagaagtggggtttgaacccgtttttcttgctataccacacaccaattactgtatagaaaaatagctgaattgctcctattagccaaatttcatttttaaaacccccacatgtggtttattattctgttatggcaatgtctatgttgcatattaataaaaaagaaaatccttgtgtttagaaaacagtgttatcacagataacaataagctattcttgttcctggttccaatgattt

SEQ ID NO: 126058 - DNA, 1371 bp, Homo sapiens
gcaagtctcattacatttaaaacccttttttaaacttggtcccttttctgtgccaactttatgtttgtttttgttcttgtttttgtttgagatggagtctcgctctgttgcccaggctggagtgcggtggcgcaatctcagctcaccccaacctctgcctcctgggttcaagtgattctcctgccttagcctcccgagtagctgggatcacaggcgtgcaccaccacgcctggataattttttttgtaattttagtagagatggggtttcaccatattggtctgaaactcctgacctcgtgatctgcccgccttggcctcccaaagtgctggcattacaggtatgagccactgtgcctggcccctattttttattttctgagatgaagtctcgctctgtcaccctaggctggagtgcagtgtggcacaatctcagctcactgcaacctccacctcccaggttcaagggatcttcccgccctcccacctcagcctccggagtagctagaattacaggccaccatgcccagcaaatctttgttttgttgttgttgttgttgttttgctttttgtgttttggtagagatggggtttcgccatgttggccaggctggtctcaaactcctgacctccagtgatccacccaccttggcctcccaaaagtgctggggattacagggcatgagggcaccgtgcccagccttgtttgcttttttaacagataacagtgtgctcatagaaactgctttgacatgactgcaatcatgtgcttcatagaaacttaattagattataccactagagtcttcagatttttatacttttttttttgaaacggagtctcactctgtcacccaggctggagtgctgtggtgcaatctcggctcactgcaacctctgcttcccgggttcaagcatttctcctgtctcagcctccccagtagctgggattacaggcacccaccaccatgcccagctaattttttgtatttttcagtagagacgggctttcaccatgttggctaggatagtttcaccaggatctcttggcctcatgatcagcctgcctcggcctcccaaagtgctgggattacaggtgtgagccaccgtgcccggccaccagaatcctttggtatagccaagccttttggttaccgcctcatgaagaatatgcttcccgcattgtcctagtcccagtagtattctcacaggtgttatgtgcaggacacaatccaaatcataaacctggctcatgcccaacacatttctgctaatagggagagggacccaccacacacccacacatgccagaggtccctcctcacagaggagagggcctgtgtctgtagaaggttaaagctgacaacatgtg

SEQ ID NO: 126059 - DNA, 1476 bp, Homo sapiens
atggccatactgcccaaggtaatttatagattcaatgccatccccatcaagctaccagtgactttcttcacagaattgggaaaaactactttaaggttcatatggaaccaaaaaagagcctgcattggcaagtcagtcctaagccaaaagaacaaagctggaggcatcacactacctgacttcaaactatactacaaggctacagtaaccaaaacagcatggtactggtaccaaaacagagatatagaccaatggaacagaacagagtcctcagaaataatgctgcatatctacaaccatctgatctttgacaaacctgacaaaaacaagaaatggggaaaggattccctatttaataaatggtgctgggaaaactggctagccatatgtagaaagctgaaactggatcccttccttacatctcatacaaaaattaattcaagatggattaaagacttaaatgttagacctaaaaccataaaaaccctagaagaaaacctaggcaataccattcaggccataggcatgggcaaggacttcatgactaaaacaccaaaagcaatggcaacaaaagccaaaattgacaaatgggatctaattaaactaaagagcttctgcacagcaaaagaaactaccatcagactgctaggcaggcctcctgcgctcttcactgcctctagcagcgtcttgaaacagctggctctggaaggcatcctgattctggattcaagagctttgcttggatttctgtatgaagctcggcacagtcacagcaactctccaaatcatgacgctcaaaatgccacatctaaaaagaacatccgggatggctatgataaaatctacagacaagaacaagtgttagcaaggatggaggaaaaaaccctcatcactgctggtgggaatgtgaaatggtgcagccactttagaaaacagattggcggccagtggctaacactggagacgaagaccaagacaccacagcctttctccagtacctctcaaatcagcacagacaaggacaaaggcctcaatccacaactgctgaagatggaccctggccacatgggatggtgtccacctggtatgggcatcccgtggcagctctcctctgatgaccgagtgtgggtcttggcagcagccggctctggaaggcatcccggctctgggttcaagagcttgctgggcttctacatgaaggcagttatggacattgatgataatgatcatgaatatgaggtggcaattcctaaggtagttctggtggacctcagtgcatcagtggggaagagagagtttttagggtggtacaaagtatataaggaagaaactcctgagccacttaaggatgagtctgaatgtgtggtgttggctagatgtgggaagagctgcaaacacagtgaagtgaatgctgcaaggactggtcatactgaccacccagctgtgcaaggagaagagcaaccctggttgatgtga

SEQ ID NO: 126060 - DNA, 786 bp, Homo sapiens
ctagactctagactgagctgccttggtcactctgggacagttggcagagtattcgtggtcagggaggtgacccgcgggcatcaggatcatgccacccagggacaaagggtgcttctgcgccaggccccggatgttctttttagatgtggcgttttgagcatcatgatttggagagtcgttgtgaccgtgcttcagtgggaacagcagatgcaactggcggggctgaaggtcagtgggaacttcagggccccagagaaggcctgcctcgtgcatcatgggatcaggccatcccatgtggccagggtccatcttcagcagttgtggattgaggcctttgtccttgcctgtgctgatttgagtggtactggagaaaggcggtggtgtcttggtcttcgtctccagtgttagccacaggtagccaggcagaagccccatgtgagaacccctcccatgcgggccactggtgctgatggccatggtactgatgacccactggtgctgatggccatggtgctgatggccactggtgctgatgatcactggtgctgatggccactggtgctgatgatcactggtgctgatggccactggtgcttcagcatttagtgttatggaggaggttttcttccccggtgtagacatgtgcttcagaagacgcccaggggttgattcctggagtgatttagcagaatggctgcacttccttggggtttggagctcctgagaccatcttcctctgaattcttctagagtaactctgtagcagtcatcgacagtaggtcccat

SEQ ID NO: 126061 - DNA, 861 bp, Homo sapiens
atggccatcagcaccagtgggtcatcagtaccatggccatcagcaccagtggcccgcatgggaggggttctcacatggggcttctgcctggctacctgttggcagagtattcgtggtcagggaggtgacccgtggtcagcaggatcaggccacccagggacaaagggtgcttctgcgccaggccctggagaaggacagagcggtggggactcggggtcggccgcagataggggagtcaccacctgccggggccggcctccttcagagctggctcgggacaagcctgggatggaaaggggaagtagaaagagctcagggcacagggattggggccgatcctggggtctgagctgtgggtggctaacactggagacgaagaccaagacaccacagcctttcgtccagtacctctcaaatcagcacagacaaggacaaaggcctcaatccacaactgctgaagatggaccctggccacatgggatggtcagacacgcctgcccagctatctgcaggcgaagaggctcagaagaggtttaggggcctgaaggacatcttgcttccatgtccatatgagcaggctatttctgctccatgagtcaattttgccatataaaatacttaatttcagccattccagggtgctgtaggatgcacagcttcccatcagcccacctgaactccagccatgccattttaataccaggaataaggtcacctgctttcctgccccttaggtggccagagccatggaagcaaaatggcacttctgtttacctgttatattatttttttgtcatccttatatgcttggaaaatgcaattatatgaaaaaagtttagtaattacagacataacagcaaa

SEQ ID NO: 126062 - DNA, 594 bp, Homo sapiens
atggccatcagcaccagtgggtcatcagtaccatggccatcagcaccagtggcccgcatgggaggggttctcacatggggcttctgcctggctacctgttggcagagtattcgtggtcagggaggtgacccgtggtcagcaggatcaggccacccagggacaaagggtgcttctgcgccaggccctggagaaggacagagcggtggggactcggggtcggccgcagataggggagtcaccacctgccggggccggcctccttcagagctggctcgggacaagcctgggatggaaaggggaagtagaaagagctcagggcacagggattggggccgatcctggggtctgagctgtgggtggctaacactggagacgaagaccaagacaccaccgcctttctccagtaccactcaaatcagcacaggcaaggacaaaggcctcaatccacaactgctgaagatggaccctggccacatgggatggtcagacacgcctgcccagctatctgcaggcgaagaggctcagaagaggtttaggggcctgaaggacatcttgcttccatgtccatatgagcaggctatttctgctccatga

SEQ ID NO: 126063 - DNA, 355 bp, Homo sapiens
gctgcctctgaagcgtacctgctcgcccttcactgaggagtttgagcctctgccctccaagcaggccaaggaaggcgaccttcagagagttctgctgtatgtgcggagggagactgaggaggtgtttgacgcgctcatgttgaagaccccagacctgaaggggctgaggaatgcgatctctgagaagtatgggttccctgaagagaacatttacaaagtctacaagaaatgcaagcgaggaatcttagtcaacatggacaacaacatcattcagcattacagcaaccacgtcgccttcctgctggacatgggggagctggacggcaaaattcagatcatccttaaggagctgtaa

SEQ ID NO: 126064 - DNA, 1926 bp, Homo sapiens
atgaaggggccgctggccccatgcaagtctgaaatccagcggggcagtcaaattgtaaagctccaaaatgatctccttttactccatgtctcacatccaggtgacgctgatgcaagagcaagagagaagaaggagacagacgaaataaaagccacaacaagaacaggacaacacaatgctcgcagaacaactacacgacaacaacaacaagcgaagagagacgaatcagctggtcccctacatgattatgaacatacgttgtatattctagcgctgtcaattgctgtgtattgtaacgccagctacgtgcattacatgagacgcagagtctcgcacaatgttatcccatcatcagatatagacagcgggcttatttgcagttgcagtattgcgttcacataccatgcaggtatctcagttgttcgcatatggccacctagctgggatcatagcaggcagcaccagattatagtatcagtcacatattcttggtatcgtgtattagcgatgtatagcctagcagagcagatagcctatagcacatatccccacacgtcattggttgcgttcgaagttgttagcgcacattcagctgtgcacagaggacccgtgaaagtggaagaggacccgtggatccgtaccggaacccgatatgaacaggaactgctagggagaggttatgctaaggctgatggtaccttttgttgtgaacttccatttaaagctcagggttacacatacagattgctggcatctgaaggaaaaactgcctatggtcctcatctaattagaacaatgtgcgcgatacggtccccgatagacattctgtctgaatccattgttctcatgtcatgtctggatgctaagaactatcttcagtgggataaatgctcttctcatttaccccagaatgatggatccaccaatagcttgcaccatgcacctggaaaagctacaggcagtaagcaccagtctgtgaaagctgctgtgggggctgtaccctgcagatccatagggccagagctgctcaaagccatgggagcctactccttgcatcagtgtcacctggatgtgagacatggagtcaaaagaaattattgtggagccttaagttctttaggtgctgggaatgtagccgatcgtgttttggctcagctcttaacagaaatggatgggattgaacagctaaaggatgtgaccattttggcagctactaaccgtccagataggatagacaaggtcaaggaccttaaacacaacccggttaagcaaaccggttccccctctggcgggaacgtgttcgatacagggcgaagtaacaaccgagggggccaagttaccagcctgcgcacgtacagctgggcggccacccggatacatcatattagtaaggtcacagggcaaatcactgcccccaaaattggagagacagacagcccaggtacagaaaatcacaactttctggagcggaaacccacaaagagaaacctccatgagagccagtgccaggatagcgcaagcatcgcaaataggacagaagcagacagaggagaccgaagtagtttggagagacagacatttcagcgtgaggacatttcccccgaaaatttacatgtcgagcatactacattccacggcacagtcccagcaaagacagagagagcgaacaaagacgaacaaaaagatagaagaaacaaaaaaaggataacgaagaggaaacgaagcaagagaagagcagagaaacagaggaaagacacagagaaaaagaaaacaagaaaagaaagaagaagaacaacaagaagcagaacaagacaaagagaagaaaaggcgatcctcagaccccccctcacgagagggtgctcccccccccggtgtcgcactttcggtcccatagccgcgttaatatggcgctcccgcgcgcagtag

SEQ ID NO: 126065 - DNA, 468 bp, Homo sapiens
atgaacggatgctctgccctccctgcctttgcccatgctgactctcgctcctacatccgtaaacttagctattgcatcttccagaaggccattgctacaccctcaaaaccaggctctgggccaggcacagtggctcgcatctgtaatcctggcactttgggaggccgaggctacatccagaagatcaagtcgggagaggaggactttgagtctctggcctcacagttcagcgactgcagctcagccaaggccaggggagacctgggtgccttcagcagagtcctcggggtctacagaaaaacatcagggagaggccaggatgggttgcagggtgtggtgtgcaggtgtcttagtggggtggggcggcagcatggggccagcagctgcccacctcctccgaggaggctgctgggccgccgctcagcactggcaataaacatggtgacggatgagtgtggacgagtgtga

SEQ ID NO: 126066 - DNA, 1045 bp, Homo sapiens
cccggctgggagaagcgcatgagccgcagctcagtagtaaacactcaggaagcgttacccactgctgccattcccagagatgcaaaaggccgagtgtactacttcaaccacatcactaacgccagccagtgggagcggcccagcggcaacagcatgcagtggtggcaaaaacgggcagggggagcctgccagcggtccgctgctcgcacctgctggtgaagcacagccagtcacggcgggccctcgtcctggcggcaggagaagatcacccggaccaaggaggaggccctggagctgatcaacggctacatccagaagatccagtcgggagaggaggactttggagtctctggcctcacagttcagcgactgcaagcatcagccaaaggccagggggagacctgggtgcctttcagcagaaggtcagattgcagaagccattttgaagaacgcctcgttttgcgcttgcggacggggggagatgagcgggcccgtgtttcacggatttccggcatccacatcatccttccgcacttgagtgagggttggggagcccaggcctggcctcggggcagggcagggcggctaggccggccagctcccccttgcccgccagccagtggccgaaccccccactccctgccaccgtcacacagtatttattgttcccacaatggctgggagggggcccttccagactgggggcccttccagactgggggccctggggttccccactccctgtcagtccccagttggggctgcgacctccagactctccattaaggagttgacttcagcatgggagggaggctcgcagacccagggcaatgtggtgggaggagtgttccaaagagaagatctggtcagcagagccgccccatgtcccaccaggtcctggaggcagatgcgagggcccagagttgtttgtagttaggccacgcttctctgttcagtagcaaaagcaaacactcgtgggcccagctgtgggccctctgagcaactttgcagcaccctttcacccccaattaaatccggaaccact

SEQ ID NO: 126067 - DNA, 512 bp, Homo sapiens
ccccgggagagggcgccgagaggctcggtgggcgcgggcggcgagatatgccacacttctgtctgctgttgtcaaccctcctggactaggctgctcttgttaatcacatggatgttgctgattactctgagtgcaaaccttttcactgttccagagaggagcctgacaaccacattctccttctcaagatataagagttcggaccgcccagcacacaaggtcagcatgctgctcctctgtcacgctctcgctatagctgttgtccagatcgttatcttctcagaaagctgggcatttgccaagaacatcaacttctataatgtgaggcctcctctcgaccctacaccatttccaaatagcttcaagtgctttacttgtgaaaacgcaggggataattataactgcaatcgatgggcacaagacaaatggtgtccacaaaatacacagtactgtttgacagttcatcacttcaccagccacggaagaagcacatccatcaccaaaaagtgtgc

SEQ ID NO: 126068 - DNA, 1622 bp, Homo sapiens
atggtatggcagcaagattatggaaccaggagagagcaccatggctgccgtctggaattctgccgtgtatctgcagggtgcccttgcctaagccccttgacctctttggttatagtttcctcatctgctgagagaggtgaggaagctgcagaagaagactttgaaactagcagaggtgggttcatgaggatgaaggaaagaagccatgcccataacataaaagtgcaaggtgaagcaggaggtgctgatgaagaagctgcagcaagtgatccagaagatctagctaagatcattgatgaagatgtgaaaggcattgtacagaagaagatgagaatcacagtaaaccaaacaaaggaaatgcagaagagatattttcagctgaatattggaaatgtaaaatgccacacgttggatgagatgattatccgagctcagacttgggaaatagtcatgcttctggaccaagtgccaggtcctggccctacacaacaggtagatggttggatatatttggataatggagctttccaaacagaagcaaaacacaaacccactgatgtaaaatataaagaaactgaaccagtgtgtcttttcaccatagatataagagttcggaccgcccagcacacaagaataaaacagaaagtctccattacttctatggctacaccatttccaaatagcttcaagtgctttacttgtgaaaacgcaggggataattataactgcaatcgatgggcagaagacaaatggtgtccacaaaatacacagtactgtttgacagttcatcacttcaccagccacggaagaagcacatccatcaccaaaaagtgtgcctccagaagtgaatgtcattttgtcggttgccaccacagccgagattctgaacatacggagtgtaggtcttgctgtgaaggaatgatctgcaatgtagaattacccaccaatcacactaatgcagtgtttgccgtaatgcacgctcagagaacatctggcagcagtgcccccacactctacctaccagtgcttgcctgggtctttgtgcttccattgctgtgatgccaccattcctaggagaggcagagaccagcctctaaagcacaagccaaaaactgtgtgaacggtgaactttggagtgaagatcaatcttgcacttggtgaagagtgcacattgggacctcaaggcgaaagccagttggtttgcttggataaaatgttccccgcatggaggccacgggactgaggatgggaaatttggcagggcctgagaagatggtctgacttccaggcttcctggtcaaagagagctacggtttgggcaggttctgcagagaggatcctggcaactaggtcccaccgagctaggccttaagttgaaaggatttcttgacctccttgactgcctcagaggctgccaggtcaaaccctcttgtttatgtgattagctcagagcatctctatgaaatctaacccttcccctcatgagaaagcagttttccccaccaacagcatagtcaatgagaaaggcaactgtacgaagaaaacttccagtggaactaatatgaaatctatttgccacactatggggggaaataaagcttttaaaaaatacaatgtaaaaa

SEQ ID NO: 126069 - DNA, 861 bp, Homo sapiens
atgtctaagcgggagtcctttaacctggaaagttatgaattggacaaaagcttctggctaaccagattcactgaactgaagggcacaggttgcaaagtgccccaagatgtcttgcaaaaattgctggaatctttacaggagaaccacttccaagaagatgagcagtttctgggagccgttatgccaaggcttcgcattggaatggatacttgtgccatttctttgaggcatggtgggctttccttggttcaaaccacagattacatttacccgatcgtagacgacccttacatgatgggcaggatagcatgtgccaatgtcctcagtgacctctatgcaatgggggtcacagaatgtgacaatatgctgatgctccttggagtcagtaataaaatgaccgacagggaaagggataaagtgatgcctctgattatccaaagttttaaagatgcagctgaggaagcaggaatgtctgtaatggtcagccaaacagtactaaatccctggattgtcctgggaggagtcactaccactgtcttccagcccaatgaatttatcatgccagacaatgcagtgccaggggacgtgctggtgttgacaaaacccctggggacacagaaatggaataagattaagctagtggtcaccgaagatgtagagctggccaaccaggaggcgatgatgaacatggtgaggctcaacaggacagctgcaggactcatgcacacgttcaatgcccacatggccactgacatcacgggcttcgggattttgggccacgtgcagaacctagccaagcagcagaggaacgaggtgtcgtttgtaattcacaacctcctggtgctggccaagatggctgcg

SEQ ID NO: 126070 - DNA, 628 bp, Homo sapiens
attgtcctgggaggagtggctaccactgtctgccaactcaatgaatttatcatgacagacaatgcagtgccagcggacgtgctggtgctgacaaaacccctggggacacaggtggcagtggctgtgcaccagtggctggatatccctgagaaatggaataagattaaactagtggtcacccaagaagatgtagagctggcctaccaggaggcgatgatgaacatggcgaggctcaacaggacaggcggccttctgatctgtttaccacgtgagcaagcagctcggttctgtgcagagataaagtcccccaaatatggtgaaggccaccaagcatggattattgggattgtagagaagggcaaccgcacagccagaatcatagacaaaccccggatcatggaggtcgcaccacaagtggccactcaaaatgtgaatcccacacccggggccacctcttaatctagacagaaatagctgtttggttttgtttttaaatagatctatttcccttatcacttcaattaaagactataaacaacaaaaatctcattgtgtctacacatcggggtgaccttaggtcggtttgtaagtggatacaattaataaaataaaatccattgccttttaa

SEQ ID NO: 126071 - DNA, 1023 bp, Homo sapiens
atggctgtgcaccagtggctggatattcctaagaaatggaataagattaaactagtggtcacccaagaagatgtagagctggcctaccaggaggcgatgatgaacatggcaaggctcaacgggacagctgccggactcatgcacacgttcaatgcccacgcggccactgacatcaagggctttgggatctggggccacgtgcagaacctggccaagcagcagaggaacgaggtgtcatttgtaattcacaacctcccggtgctggccaagatggctgcagcgagcaaggcgaagtcccgatgtaccatcaggtatgaaaaccctaagagggagcaggtgtcagagcaggaggtcacagggcagccactgaaggaaagctgcattctgaggctggaagaaggaagaatgtcactgagtagacaaaataatggtcatcagggaattggtaaagtaaagaggaaaagaagaatcaagacagtacaatgccatgacagctcaagtgagaagacttttcataaggagaggggagacaaccccatgaatgagccatgtaggtcaagaagaatgaaggctgagatcagtgctgcagaaatcacaggtagcacaaggcaatctggagctcagcagtccggagctggtataatgactccatcgtccttctgtcttggtccttttgagtgtggctccatcatcctcagtgcccagagggcaaggtctgggcccactttaattgtgggtgcaatccataatatagagccagtggcctatgtgtgcttaacaaataccatcaggtatatccatgggtcttatcacccaacacaggaagctgggcatcatcccagatgcctacctgtttttgatctaccacctttagctgaaaaggatgaaatgatagatgtagaattcagaatctggatagcaatgaagattattgagattcaggagaaagttgaaacccaatccaagaaacctaaagaatccagtaaaataattccagagctgaaagccaaaatagccatttga

SEQ ID NO: 126072 - DNA, 1640 bp, Homo sapiens
ggcggcggccggctcccgcaggcgccgaggcaggcgagcccccggccccaggcgcccgggccccgccgccgcccgcgcgcggcgcggcattttattcaggcgacgcttaagggagccggccgcgcccggtgcattgtgggaggcccgcggccgttttcgggaggaaggcggaggggccaaagcgagccggtggatccataaagaacccagccaacccgcagagggaggggaggggctgagctgtgaggagagcggggcccaagaaccatgtctacgcgggagtcctttaacccggaaagttacgaattggacaaaagcttccggctaaccagattcactgaactgaagggcacaggctgcaaagtgccccaagatgtcctgcaaaaattgctggaatctttacaggagaaccacttccaagaagatgagcagtttctgggagccgttatgccaaggcttggcattggaatggatacttgtgtcattcctttgaggcacggtgggctttccttggttcaaaccacagattacatttacccgatcgtagacgacccttacatgatgggcaggatagcgtgtgccaatgtcctcagtgacctctatgcaatgggggtcacggaatgtgacaatatgctgatgctccttggagtcagtaataaaatgaccgacagggaaagggataaagtgatgcctctgattatccaaggttttaaagacgcagctgaggaagcaggaacgtctgtaacaggcggccaaacagtactaaacccctggattgtcctgggaggagtggctaccactgtctgccaacccaatgaatttatcatgccagacaatgcagtgccaggggacgtgctggtgctgacaaaacccctggggacacaggtggcagtggctgtgcaccagtggctggatatccctgagaaatgggaataagattaaactagtggtcacccaagaagatgtagagcttggcctaccagggaggcgattgatgaacatggcgaggctcaacaggacagctgcaggactcatgcacactgttcaatgcccacgccgccacttgacatcaccgggctttgtgtattttgggccatgcgcagaaccttggccaagccagcagaaggaacgatgtgtcgtttgtaattcacaacctccccggtgcttggccaagatggcttgcggtgagcaaggcctgcgggaaacatgttcggcctcatgcacgtgacctgcccggagacttcaggcgggccttctgatctgtttaccacggtgagcaagcagctcggttctgtgcagagataaagtcccccaaatatggtgaaggccaccaagcatggattattgggattgtagagaagggcaaccgcacagccagaatcatagacaaaccccggatcatcgaggtcgcaccacaagtggccactcaaaatgtgaatcccacacccggggccacctcttaatctagacagaaatagctgtttggttttgtttttaaatagatctatttcccttatcacttcaattaaagactataaacaacaaaaatctcattgtgtctacacatcggggtgaccttaggtcggttagtaagtgagatacaattaataaaataaaatccattgcctttttaaaatatt

SEQ ID NO: 126073 - DNA, 501 bp, Homo sapiens
ttagtgctctaccatcaccgtcttaacatccttagtcttatctgtgaacttgtgttttacgagtgaaatcatcaccagtccccaagcacggacctcacccctggccagccttccggcatgccaggcctcctcctccctcaagcccatgcggaagcagggaagtgggtcacacagggagcccatgctatgggtggacgtacccttcatcacctctttaaagacctcttcaaatacgttcacactctgagttactgggggtttggactccaacatctgaattttaagaggacacaactcagtccgtgacagcgggtcttctcgaagtctcgtggggaagagtggttctttgcagtaagtcatttcctgccttacagtcttgacctctcccctaattcccacgtactttcttccttcccccatcttgatggcactgatggaagaaactctggaccacttgcgccagggacaccaagtctgcatccttagccttgatcgggccat

SEQ ID NO: 126074 - DNA, 519 bp, Homo sapiens
atgacggtgaaaacctctgacacatgcagctcccggagacggtcacagcttgtctactcctcccacgtctttgcccagaccccagcagcagctggaacaggagggactccctctcactcagcccatcgggtggatcaggtggactggtcatgcccggaaatgacttactgcaaagaaccactcttccccacgagacttcgagaagacccgctgtcacggactgagttgtgtcctcttaaaattcagatgttggagtccaaacccccagtaactcagagtgtgaacgtatttgaagaggtctttaaagaggtgatgaagggtacgtccacccatagcatgggctccctgtgtgacccacttccctgcttccgcatgggcttgagggaggaggaggcctggcatgccggaaggctggccaggggtgaggtccgtgcttggggactggtgatgatttcactcgtaaaacacaagttcacagataagactaaggatgttaagacggtgatggtagagcactaa

SEQ ID NO: 126075 - DNA, 312 bp, Homo sapiens
ggtatcagcagctctgtcctcagaatgggtcccccacttcacacagttgtaggatggctacagcagctccaagcagcacattcagaggaagaagaaaaaatgtttcatttgtgtggttttaagcataaagaagttgtttcccagagctctttgccagctgtcatccctcaaaactcactggccacaattgcttcacatgcccgggaagcactgtgcggtgtgggaggatgaatatgtgccaatttggaaagatgagtatttgtgggaaaatgaataaagcaaagtgtaaatcagaaaaaaaaaaaaaaaaaa

SEQ ID NO: 126076 - DNA, 711 bp, Homo sapiens
atgccatctaaggactcgttggctgcagtctgtgcagatcttcacatacaaggagatggccatagctgtggtgctctgcagatgtggcagtggcttcatcaggatgaacgaggggcccctggagatgatcaagctgctcacactgcaatacaagctactggaattaggtctgcttctggacaaggaacagcttgctggaatggacatccatgttcgtgtgaagggtagtggtcatgtggttcagatttatgctgtccttcagtacatctccaaagccctggtaccctgttacccaaaatatgtagatgaggcttccgaggagatcaaagacaccctcaccagaccttgctggtggttcacccctgttgctatgagccattgcctcctgtttccttctgcctaaataaattctgcttcagaagtcaaattaggttcatgaaaatgattgctggcagccttcatgcaggtaaatgatccaaatgcagaaccgtggatggtgatggtatgatgtaaccaaggatccttgttcttgtcattttctactttgccacttccaggtatcagcagctctgtcctcagaatgggtcccccacttcacacagttgtaggatggctacagcagctccaagcagcacattcagaggaagaagaaaaaatgtttcatttgtgtggttttaagcataaagaagttgtttcccagagctctttgcc

SEQ ID NO: 126077 - DNA, 488 bp, Homo sapiens
cagtggcggaattctagccaccggtgtctccttctacatccgcctctgcgccggctgccacccgcgctccctccgccgccgccgccttgctgctgctcaaagctgctgccgccccttgggctaaaaggttttcaaatggaacattttgatgcatcacttagtacctatttcaaggcattgctaggccctcgagatactagagtaaaaggatggtttcttctggacaattatatacccacatttatctgctctgtcatatatttactaattgtatggctgggaccaaaatacatgaggaataaacagccattctcttgccgggggattttagtggtgtataaccttggactcacactgctgtctctgtatatgttctgtgagttagtaacaggagtatgggaaggcaaatacaacttcttctgtcagggcacacgcaccgcaggagaatcacatatgaagattatccgtgtcctctggagggactactt

SEQ ID NO: 126078 - DNA, 624 bp, Homo sapiens
  misc_feature (1)...(624): n = a,t,c or g
gtcctagccaccggtgtctccttctacatccgcctctgcgccggctgccacccgcgctccctccgccgccgccgccttgctgctgctcaaagctgctgccgccccttggcgtaaaaggttttcaaatggaacattttgatgcatcacttagtacctatttcaaggcattgctaggccctcgaggtatcagcagctctgtcctcagaatgggtcccccacttccacagtgggtttttgtaagggaaganaattttggggggggnctcacacagcagctccaagcagcacattcagaggaagaagaaaaaatgtttcatttgtgtggttttaagcataaagaagttgtttcccagagctctttgccagctgtcatccctcaaaactcactggccacaattgcttcacatgcacctgcctgaaccagccaccagagggggttaggacccccccagattgactagatcctaaggattctctacctggggctggagttcgggtcaggtgcccgggaagccctgtgcggtgtgggaggatgaatatgtgccaatttggaaagatgagtatttgtgggaaaatgaataaagcaaagtgtaaatcagaggtttaagttaaaaaaaaaaaaaa

SEQ ID NO: 126079 - DNA, 1311 bp, Homo sapiens
gtgataacttcaggtgggataacattttgtgaccagctatggcataaagagtgttttctgtgtagtggctgtaggaaagatctctgtgaagaacagttcatgtccagagacgactatccattctgcgtggactgctacaaccatctttatgccaacaagtgtgtagcctgttccaaacccattagtggtctcacaggtgccaagtttatctgctttcaagacagccagtggcatagcgaatgctttaactgcgggaaatgctctgtctccttggtgggtaaaggcttcctgacccagaacaaggaaatcttctgccaaaaatgtggctccggaatggacactgacatctaggagacagtccttgcccacctaaaatccattttgccttcgttgtcactaaagccagaactcagttgcggtcttatttttgacttaagttttagaaaatattcatgtagtttagagtggaaaagtttttgcacacattttgatcgaactatattctaagcacacaaaaagcacagtagaacagaaatgaatatatgctaaatcacaaagacaactctccttgcaaaatactgcactctgctgttagaagcagaggaaaatatctcttcataatcaaatatatgacatatacctaggagctgtggatgtaattactgaagaatgaggtttttcatacctgaagagtaaaagaaaaactaagagatcaaactgagaggtatacatgaggctagtgtttgcattcctggttatatgtaatgtgataaattagctatgaatggtaaaagaacaaaactgatcagagtaaattcattagcaattatcacatttaagaattgttatcatttaaaaatcatcctttttttcacacatactgactgtagaattaaaaaacaaagctacaatttgccctcatacacactgcttccacagcttgctagttctgtgtttactcaatggaatatgagaactgaggacattatggctctcataatctgcataggtataaagaggatcatttctacctagggatagccaaagcatgggtttcaacacgttttgtattaaatatattttcaaagtccacagtgatttttctaaacgcttacagattccatgaaataaaagtctattctttcaagtggagctaaccaggataatctttgtccccaaaggcaaacctttaaaataaatagatcattaaatcttcacttgtggaaatgagttttagggaagggattgagtcttggaacatgactttcatccagatatctaacgacataatagaatgcataattagctctg

SEQ ID NO: 126080 - DNA, 711 bp, Homo sapiens
atggaatactatgcagccataaaaaatgatgagttcatgtcctttgtagggacgtggatgaagctggaaaccatcattctcagcaaactattgcaaggacaaaaaaccaaacaccgcatgttctcactcatagaaatacaaactaccatcagagaatactataaacacctctacgcaaataaactagaaaatctagaagaaatggataaattcctcaacacatacaccctcccaagactaaaccaggaagaagttgaatctctgaatagaccaataacaggctctgaaattgtggcaataatcaatagtttaccaaccaaaaggagtccaggaccagatggattcacagccaaattctaccagagaaaaattaactcaagatggattaaagacttaaatgtaagacctaaaaccataaaaaacctagaagaaaacctaggcaataccattcaggacataggcatgggcaaaggcttcataactaaaacactgaaagaaatggcaacaaaagccaaaattgacaaatgggatctaattaaactaaagcgcttcttcacagcaaaagacactatcatcgtagtgaacagacaacctacagaatgggacaaatgtttttcaatgtatccatccgacaaagggctaatatccagaagctacaaggaacttaaacaaatttccgagaataaaacaaccccatcaaaaagtgtgtga

SEQ ID NO: 126081 - DNA, 384 bp, Homo sapiens
gcctccgaccacgcgggctcctgatcgcgggcgcccacatcgcggacatggagggctggtggccggcgttgtcgcgcacggcccggcgccacccgtggcccaccaacgtgctgctctacgttgctcgagcaacgtagctcgtacgctctacgagcgtgccgtagctcgctcgtctccgccggggacgtgctgcagcaacggctgcagggccgctaggccgactggcgccagacgcggcgcgtggccacgttggtggtgaccttccacgccaacttcaactacgtgtggctgggcctgctggagcgcgcgctcccggggccgagcgccgcgcgcaatgcttggccaaagtttgcttgtgcgaccaaggtggtcgggttgcgccca

SEQ ID NO: 126082 - DNA, 1165 bp, Homo sapiens
atggaacactatgcagccataaaaattgatgagttcatgtcctttgtagggacatggatgaagctggaaaccatcattctcagcaaactgtcacaaggacgaaaaaccaaacaccgcatgttctcactcataggaaaggatcctccccatctctgcagaagcctgaccatccccctagagggcctgggaggaagtgggttttgcatacagtccctgttgactctagtgccccctgctggccccagacgcgagttccggcgaggcttcaggcaacttcgcggtgtggtgaactctctgaggaaaaacggttccattcagagccgatacatcagcatgagtgtgtggacaagcccacggagacttgtggagctggcagggcagagcctgctgaaggatgaggccctggccattgccgccctggagttgctgcccagggagctcttcccgccactcttcatggcagcctttgacgggagacacagccagaccctgaaggcaatggtgcaggcctggcccttcacctgcctccctctgggagtgctgatgaagggacaacatcttcacctggagaccttcaaagctgtgcttgatggacttgatgtgctccttgcccaggaggttcgccccaggaggtggaaacttcaagtgctggatttacggaagaactctcatcaggacttctggactgtatggtctggaaacagggccagtctgtactcatttccagagccagaagcagctcagcccatgacaaagaagcgaaaagtagatggtttgagcacagaggcagagcagcccttcattccagtagaggtgctcgtagacctgttcctcaaggaaggtgcctgtgatgaattgttctcctacctcattgagaaagtgaagcgaaagaaaaatgtactacgcctgtgctgtaagaagctgaagatttttgcaatgcccatgcaggatatcaagatgatcctgaaaatggtgcagctggactctattgaagatttggaagtgacttgtacctggaagctacccaccttggcgaaattttctccttacctgggccagatgattaatctgcgtagactcctcctctcccacatccatgcatcttcctacatttccccggagaaggaagagcagtatatcgcccagttcacctctcagttcctca

SEQ ID NO: 126083 - DNA, 414 bp, Homo sapiens; identical to SEQ ID NO: 125497

SEQ ID NO: 126084 - DNA, 999 bp, Homo sapiens
atgatagactggattaagaaaatatggcacatatacactgtggaatactatgcagccataaaaaaggatgagttcatgtcctttgtagggacatgggtgaagctggaaacaatcattctgagcaaactattacaaggacagaaaaccaaacaccgcatgttctcactcttaggtgagagtgatgagatcacttggacacaggaaggggaacatcacacactggggcctgtcgaaacgctggtgaaagtaaaagatgctgaagatcagttgggtgcacgagtgggttacatcgaactggatctcaacagcggtaagatccttgagagttttcgccccgaagaacgttttccaatgatgagcacttttaaagttctgctatgtggcgcggtattatcccgtattgacgccgggcaagagcaactcggtcgccgcatacactattctcagaatgacttggttgagtactcaccagtcacagaaaagcatcttacggatggcatgacagtaagagaattatgcagtgctgccataaccatgagtgataacactgcggccaacttacttctgacaacgatcggaggaccgaaggagctaaccgcttttttgcacaacatgggggatcatgtaactcgccttgatcgttgggaaccggagctgaatgaagccataccaaacgacgagcgtgacaccacgatgcctgtagcaatggcaacaacgttgcgcaaactattaactggcgaactacttactctagcttcccggcaacaattaatagactggatggaggcggataaagttgcaggaccacttctgcgctcggcccttccggctggctggtttattgctgataaatctggagccggggggcggagcctatggaaaaacgccagcaacgcggcctttttacggttcctggccttttgctggccttttgctcacatgttctttcctgcgttatcccctgattctgtggataaccgtattaccgcctttgagtga

SEQ ID NO: 126085 - DNA, 744 bp, Homo sapiens
atggaatactatgcagccatgaaaaaggatgagttcatgtcctttgtagggacatggaagaagctggaaaccatcattctgagcaaactatcgcaaggacagaaaaccaaacaccacgtgttttcactcatagatgggaattcaataatgagaacacttggacacagggactggaccagtagcaggctggtggaaagcatgagcagctccattcaggaaggggaagcagcagctgtttccccaggagacagtgtctgggagcagctgcaagctgggaagagcctgatggcaagggagctgccgactgatcagcgagaaagagatttcacagagatttcacagggcatcaacagctcaggggatgttggctacaggcggggaaagcacctatatgcccttctacctgccgcacccacggaggaggctcagctggaaggacagggaaggaaccataagcacgggcagggtgggaggcgaacactcggggttgcagctgtcactgattatggaagggtgtgtaagatccccaagcacacgcgctttgcctcagttgctgaatgcagatttgaaaaccacagcaagagtgaagaccagaaaggacagttgctgggtggggcagaaggtgccatcgagggagttgatgtttgccatgacaaggaccaaaaggttcggcatcaggagcccaagagccaggacatccaccaaaggctgttggtcaagctgttcaggtttccggccagatga

SEQ ID NO: 126086 - DNA, 447 bp, Homo sapiens
atggaatactatgcagccataaaaaaggatgagttcatgtcctttgcagggacatggatgaagctggaaaccatcattctcagcaaactatcacaaggacaaaaaaccaaacaccgcatgttctcactcacaggtattttagtgcaaaatcagaagagtctgcatcagaggctacagtcatactatacatactcgctgttgaaagtgaatggtccttttggagactcctgggccatatatatgaatcctattcctaaaaccagtcttgaggaagaacagaacctcagggctactgacagcgcctcctctctcattgctcttggaacactaaatagcaatgaaaatggaagacgcacagctacacataactggcagagatccttacaccttatacaaaaattaattcaagatggattaaagacttacatgttagacctaaaaccataa

SEQ ID NO: 126087 - DNA, 558 bp, Homo sapiens
atggaatactatgcagccataaaaaaggatgatttcgtgtcctttgtagggacatggatgaagctggaaaccatcattctcagcaaactattgcaaggacagaaaaccgaacaccgcatgttctcactcatagggctggtcaccaggccagcagcagtaccagcagcatttgggagcttgttagaaatgcatagccccgagctgcacaccacgccgtgtgaatcagaaactttggaggtggtgttagggatatgtggggtacgagctcgaattcgtaatcatggtcatagctgtgtcctgtgtgagattgtgatcgctcacatttcacacacatacgagctggagcataagtgtaaagctgtggatctccccatcgtttttatgggacacatcaaagctcctaataccctcttaactctgttgatgctgaagattttcccacatgtgtctagggacccttcaatcaccactgattccacaaacacccataaacttgaagaatcagaaacgctcaaatctcaggatctagatgggctcagagattgttcaagactctga

SEQ ID NO: 126088 - DNA, 2244 bp, Homo sapiens
atggaatactatgcagccataaaaaaggatgagttcatgtcctttgtagagacatggatgaagctggaaaccatcatgctcagcaaactatcacaaggacagaaaaccaaacaccgcatgttctcacacaacagcccacaaaacaaaccgcctgcagctcctgttataaatgagtatgccgatgcccagctacacaacctggtgaaaagaatgcgtcaaagaacagccctctacaagaaaaagttggtagagggagatctctcctcacccgaagccagcccacaaactgcaaagcccacggctgtaccaccagtaaaagaaagcgatgataagccaacagaacattactacaggctgttgtggttcaaagtcaaaaagatgcctttaacagagtacttaaagcgaattaaacttccaaacagcatagattcatacacagatcgactctatctcctgtggctcttgcttgtcactcttgcctataactggaactgctgttttataccactgcgcctcgtcttcccatatcaaaccgcagacaacatacactactggcttattgcggacatcatatgtgatatcatctacctttatgatatgctatttatccagcccagactccagtttgtaagaggaggagacataataagattccaagaatcctatccatctttttcaccaatatggtttgtggactgtgatgacccaaatctgacatcagttctggaacgtccagaagatactgagaacaacaattaccttcgtcagcaattgaagtgcacctggatgtttgagatgctagatcaaccactacccatgggtcagaatgggaaaatagaagtgacttcagaagaagaggaagaagagatggctggagatataaaatacttaaatcactgtaagatgaagaaagaagaacttattagtgggaaaaagttggaggatgaaggaattgaaaaagaaaatttggcaacattagagaaaattaggaagactcaaagtcaaggccatttaaatgtgatgtggtgtttgggatctggagaaacaacaaaaccaagaaattctggatcaactggaagaagaaaagaaagcaagcaactgaaagcagggagccaaagggagtggttacaggttcaaattcagaccatagggatcctcatgtccgagaaggcagagttatggacagctctgtattacactcagcatgctgccaggcagtttgaaggagagtcaaaggatctggccagctgcctgcagtattcctggcgcgtgcaagacaatgagggcttgagtctcctgaaccgagagcaggaggagaggctgctggagctagagcagaaggctgagctctgggaggagcaggtggaggtgcacaggcaaaccctggagaccatgcagaatgacctcaccaccatcagtcatgcagtcttccagaatggtgagctcaaagagcagctggccaagttgcagactggcttcatgaagctgaacaatgagaacatggagatcaccagcacaccacagtcggagcagcacatcaagaaagagccgagcgagaagctgggagatggactggacagtgaggaggaggcgcttccgctcatgccaagcatcccggaggaactggagagtcgggaggccatggtggcatttttaaactcagctgtggccagtgccgaggaggagcaggcatggccacgtgggcagctgaaggagcaaaggggggccatggagaagctgcagagccactttatggagctcatgcaggagaaggtggacctgaaggagcagatggaaaaactggaacgtcgctgcatccagctgtctggagagacagacgtcatcatacatcacactgtaccagagctagaggtcagtgctgaagacgtggcaccagaaggaatacatcagcagcctggcccaggacaaggaggagatgaaggtgaagctgctggagctgctggagctgcaggagctgcaggagctggaggcattccagaagaaggcattgttattataggaaatgacagctccacccatgttatggagcctgaagaccttccagtggggcaagatgtggatgtggaagacagtgatattgatgatcctgaccctgtagttattcgaacaactggatacttgctgtttattctgcacattaatgcctgtgtttattactgggcttcaaactatgaaggaattggcactactagatgggtgtatgatggggaaggaaacgagtaa

SEQ ID NO: 126089 - DNA, 411 bp, Homo sapiens
atggaatactatgcagccataaaaaaggatgagctcatgtcctttgcagggacatgggtgaagctggaaaccatcattctcagcaaactatcacatggacagaaaaccaaacaccgcatgttctcactcatagacacagtggtagtgggcagtgatgatttcccattgttgcgagtccctggctgctgtgctagctcccttaatgccgcccatacctctgtaaacattaaacttgagcttactccggtaaggaaaacactgcgcatgcgggaagcccaccctacgcgaagaatcatgggaaagaggcaagcccatgaagtcctagcaacaagtcgaattctttcttctgagcaggcaaaggctgaatttgctccagacacctatggatttgccgtcggtaaatcagggtaa

SEQ ID NO: 126090 - DNA, 423 bp, Homo sapiens
atggaatactatgcagccatgaaaaatgatgagttcatgtcctttgtagggacatggatgaagctggaaaccatcattctcagcaaactatcccaaggacaaaaaccaaacaccgcatgttctcactcgtggatggatccacagcgaagggggaagcggcagtcactatctatcagtgaggcaggagccaaccagttcccgaagagtgttttccgcttctttgggctgggagacagcaaggttggtagtaaatggtctgcgacatgtgcttgtgagcctatccacacgagtgagtactgtggcgatcgcgtgatatgcaagacgacttcgtcgttgcgcggcgcgagttttgcttggtgctcgagtggcaatggggagcgttctcgcatggcctatatcatcatgatagtggcgtcagtgtga

SEQ ID NO: 126091 - DNA, 507 bp, Homo sapiens
atggaatactatgcagccataaaaaaggatgagttcgtgtcctttgtagggacatcgatgaagctggaaaccatcattctcagcaaactatcacaaggacagaaaaccaaacaccgcatgttctcactcataggatccagcctttttagctccctctccagtgccatgaagcaggcccctcaggccacctcaggactgatggagcctccaggtccctccacgcccattgttcaaagacccaggatcctgttggtgatcgatgatgcccatacagactgcccttctcaggaagacagacgtttctctgtcttcccattcctggtccagggccttccagtagaatcaggttttgttgtggacagacacacacatccagatcctgctgcactcatctttgcagccctggcaaagactaggtaccaaacattggatggatgggtggacggtgacctcaggaaggtgacccctgaccttcagactgagttggctgctttttctgtgggctga

SEQ ID NO: 126092 - DNA, 529 bp, Homo sapiens
aacgttttctgaatttaaagactgtacaactcaacactaaaacaaaaaccaatcacctaagcagaaagccaaatttgtcaaaatgtcaacaattgttaaatatggacaatggaccaacaacgacagactggattaagaaaatgtggcacatatacaccatggaatactatgcagccataaaaaatgatgagttcatgtcctttgtagggacatggatgaaactggtaaccatcattctcagcaaactatcgcaaggacaaaaaaccaaacaccgcatgttctcactcacagaaatacaaaaaaccctcagagactattatgaacacctctatgcacacaaactagaaaacctagaaaaactagaaatggacaaattcttggaaacatgcaacctcccaagattgacccaggaagaaattgaatccctgaacagatcaataacaagttctgaaactgaatcagtaataaaaagcctaccaaccagaaaaggcccaggaccaggtggattcacagccaaattctaccagag

SEQ ID NO: 126093 - DNA, 744 bp, Homo sapiens
atggggagaaaccagagaagaaatgctgaaaattccaaaaaccagaatgcctcttttcctccaaaggaacacaactccttgccagcaagtgaacaaaactgggtggagaatgagtttgacaagttgacagaagtagccttcagaaggtcggtaataacaaacttctccgagctaaagaagcatgttctaaaccattgcaaggaagctaaaaaccttgaaaaaagggacatggatgaagctggaaaccatcattctgagcaaactatcacaaggacagaaaaccaaacaccgcatgttctcactcataagtgggaattgaacaaggagaacacatggcacatgaaggggggcataacacaccggggactgatggtcgggaaacctgtcgtgccagctgcattaatgaatcggccaacgcgcggggagaggcggtttgcgtattgggcgccagggtggtttttcttttcaccagtgagacgggcaacagctgattgcccttcaccgcctggccctgagagagttgcaccaagcggtccacgctggtttgccccagcaggcgacaatcctgttcggaggtgggttcctaattcggcaaacgcccttattaatgaaaagaatagccccaagatagggtttgaatggttgttccaggtcgggaacaagagtcccctattacggaaacggggaactccaacgtgcgaagggcggaaaacccgcttttcaggccaagggcccactacgtga

SEQ ID NO: 126094 - DNA, 663 bp, Homo sapiens; identical to SEQ ID NO: 120422

SEQ ID NO: 126095 - DNA, 582 bp, Homo sapiens
atggaatactatgcagccataaaaatggatgagttcatgtcctttgtaggaacatggatgaagctggaaaccatcattctgagcaaactatcgccaggacagaaaatcaaacaccgcatgttctcactcataggtgcccctgtagacaatggccctcgtgtctgccgattcccgcattgcagaacttctcacagagctccatcagctgatcaaacaaacccagcacgtccccggcggagacgagcgagctacggcacgctcgtagagcgtacagctacgttgctcgagcaacgtagagcagcacgttggtgggccacgggtggcgccgggccgtgcgcgacaacgccggccaccagcccgccatgtccgcgctgtgggcgcccgcgatcaggagcccgcgtggtcgaaggcttcctgcaccgcctccgggcctcgccagcctccagcagttactgcgttgcagcagccggcacttgcacctgcctactccccgagctcatgagcggttgggcgccccgagcacacccagctcgtgccgtccaatccggaggccacgggctgtcgtgggggctgaacgtttga

SEQ ID NO: 126096 - DNA, 2943 bp, Homo sapiens
atgaacatcgatgcaaaaatcctcaataaaatactggcaaaccgaatccagcagcacatcaaaaagcttatccaccatgatcaagtgggcttcatccctgggatgcaaggctggttcaacatacgaaaatcaataaacatagtccagcatataaacagaaccaatgacaaaaaccacatgattatctcaatagatgcagaaaaggcctttgacaaaattcaacaacgcttcatgctaaaaactctcaataaattaggtattgatgggacgtatctcaaaataataagagctatctatgacaaatccacagccaatattgtactgaatgggcaaaaactggaagcattccctttgaaaactggcacaagacagggatgccctctctcaccacttctattcaacatagtgttggaagttctggccagggcaatcaggcaggagaaggaaataaagggtattcaattacgaaaagaggaaatcaaattgtccctgtttgcagatgacatgattgtacatctagaaaaccccattgtctcagcccaaaatctccttaagctgatagacaatttcagcaaagtctcaggatacaaaatcaatgtgcaaaaatcacaagcattcttatacaccaataacagacaaacagagagccaaatcatgagtgaactcccattcacaattgcttcagagagaataaaatacctaggaatacaacttacaagggacgtgaaggacctcttcaaggagaactacaaaccactgctcaatgacataaaagaggatacaaacaaatggaagaacactccacgctcatgggtaggaagaatcaatatcatgaaaatggccatactgcccaaggtaatttatagattcaatgccatccccatcaagctaccaatgactttcttcacagaattggaaaaaactactttaaagttcatatggaaccaaaaaggagcccgcattgccaagtcaatcctaatttatagattcaatgcccaagaattggaaaaaactactttaaagttcatatggaaccaaaaaggagcccgcattgccaagtcaatcctaagccaaaagaacaaagctggaggcatcacgctacctgacttcaaactatactacaaggctacagtaatcaaaacagcatggtactggtaccaaaacagagatatagaccaatggaacagaacagagccctcagaaataatgccacatatctacaaccatctgatctttgacaaacctgacaaaaacaagaaatggggaaatgattccctatttaataaatggtgctgggaaaactggctagccatatgtagaaagctgaaactggatcccttccttataccttatacaaaaattaattcaagatggattaaagacttaaatgttagacctaaaaccataaaaaccctagaagaaaacctaggcaataccattcaggacatagccatgggcaaggactttatgtctaaaacaccaaaagcaatggcaacaaaagccaaaattgacaaatgggatctaattaatctaaagagcttctgcacagcaaaagaaaccaccatcagagtgaacaggcaacctatagaatgggagaaaatttttgcaatctactcatctgacaaagggcgaatatccagaatctacaatgaactcaaacaaatttacaagaaaaaaacaaacaaccccatcaaaaagtgggcaaaggatatgaacagacacttctcaaaagaagacatttatgcagccaaaagacacatgaaaaaatgctcatcatcactggccattagagaaatgcatatcaaaaccacaatgagacaccatctcacatcagttagaatggcgatcattaaaaagttaggaaacgactggtgctggaggggatgtggagaaataggaagacttttacactgttggtgggactgtaaactagttcaaccattgtggaagtcagtgtggcgattcctcagggatctagaactagaaacaccatttgacccagccagcccattactgggtatacacccaaaggattatagatcatgctgctataaagacacatgcacacgtatgtttactgcagcactattcacaatagcaaagacttggaaccaacccaaatgtccatcaatgatagactggattaagaaaatgtggcacatatacaccatggaatactatgcagccataaaaaaggatgagttcatgtcctttgcagggacatggataaagctggaaaccatcattctcagcaaactatcgcaaggacaaaaaaccaaacaccacatgttctcactcataggccttgcagtattaaaacatgtgctaacaccacgaataaaggcaactcacgttgcttttgattgcatgaagaattatttagatgcaatttatgatgttacggtggtttatgaagggaaagacgatggagggcagcgaagagagtcaccgaccatgacggttgactggattgttgctgacatcttggccatcaggcagaatgcgctaggacatgtgcgctacgtgctgaaagaagggttaaaatggctgccattgtatgggtgttactttgctcagcatggaggaatctatgtaaagcgcagtgccaaatttaacgagaaagagatgcgaaacaagttgcagagctacgtggacgcaggaactccatgctatagacagcccaggaataagaagctggagcctgcttctaagtccatactcacctctctgaaaggacccgcaaatgcctaccaccaccagccccatcctaatgggtcacctgtcaccatggtgactgctgcctccccaccagactgcgagctccacaggggccctaaaggaaacctggtctggctcaacgaaggcacctcccctgacctggcacaaaagctgggcaactcaccaaggcgcctgaaaattcctaaactttgcttggtcgcctga

SEQ ID NO: 126097 - DNA, 4282 bp, Homo sapiens
atggaatactatgcagccataaaaaaggatgagttcatgtcctttgtagggacgtggatgatgctggaaaccatcattctcagcaaactatcgcaaggacgaaaacccaaacgccgcatgttgtcactcataggatcacaactcctcaccaacaagggaacaagctggatggagaatgagtttgacgaattgacagaagtaggcttcagaagaactctccaccccaaatcaacaacagaatatacattcttctcagcacctcactgtacttatttgaaaattgaccacataattgcaagtaaaacactcctcagcaaatgcaaaagaacagaaatcataacaaacggtctctcagaccacagcgtaatcaaattagaactcaagattaagaaattcactcaaaactgcacaactacatggaaactgaaaaacctgctcctgaatgactactgggtaaataacgaaattaaggcagaaataaagatgttctttgaaaccagtgagaatgaagacacaatgtaccagaacctctgggacacatttaaaccactgtgtagagggaaatttatagcactaaatgcccacaagagaaagcagagaagatctaaaatcgacatccaaacagcacaattaaaagaactagagaaggaacagcaaacaaattcaaaggctagcagaagacaagaaattactaagatcagagcagaactgaaggtgacagagacacgaaaaacccttcaaaaaatcaatgaatccaggagctggttttttgaaaggatcaacaaaattgatagactgctagcaagactaataaagaaaaaaagagagaagaatcaaatagacacaataaaaaatgataaaggggatatcaccaccgatcccacagaaatacaaactaccatcagagaatactacaaacacctctacgcaaataaactagaaaatctagaagaaatggataaattcctcaacacatacactctcccaagactaaaccaggaagaagttgaatctctgaatagaccaataacaggagctgaaattgtggcaataatcaatagtttaccaaccaaaaagagtccaggaccagatggattcacagccgaattctaccagaggtacaaggaggaactggtaccattccttctgaaactattccaatcaatagaaaaagagggaatcctccctaactcattttatgaggccagcatcattctgataccaaagccgggcagagacacaaccaaaaaagagaattttagaccaatatccttgatgaacattgatgcaaaaatcctcaataaaatactggcaaaccgaatccagcagcacatcaaaaagcttatccaccatgatcaagtgggcttcatccctgggatgcaaggctggttcaatatacgcaaatcaataaatgtaatccagcatataaacagagccaaagacaaaaaccacatgattatctcaatagatgcagaaaaagcctttgacaaaattcaacaactcttcatgctaaaaactctcaataaattaggtattgatgggacgtatttcaaaataataagagctatctatgacaaacccacagccaatatcatactgaatgggcaaaaactagaagcattccctttgaaaactggcacaagacagggatgccctctctcaccgctcctattcaacatagtgttggaagttctggccagggcaatcaggcaggagaaggaaataaagggtattcaattaggaaaagaggaagtcaaattgtccctgtttgcagacgacatgattgtttatctagaaaaccccatcgtctcagcccaaaatctccttaagctgataagcaacttcagcaaagtctcaggatacaaaatcaatgtacaaaaatcacaagcattcttatacaccaataacacagacaaacaagagagccaaatcatgagtgaactcccattcacaactgcttcaaagagaataaaatacctaggaatccaacttacaagggatgtgaaggacctcttcaaggagaactacaaaccactgctcaatgaaataaaagaggatacaaacaaatggaagaacgttccatgttcatgggtaggaggaagaatcaatctcgtgaaaatggccatactgcccaaggtaatttacagattcaatgccatccccatcaagctaccaatgactttcttcacagaattggaaaaaactactttaaagttcatatggaaccaaaagagagccctcattgccaagtcatccctaagccaaaagaacaaaactggaggcatcacgctacctgacttcaaactatactacaaggctacagtaaccaaaacatcatggtactggtaccaaaacagagatatagatcaatggaacagaacagagccctcagaaataatgccacatatctacaactatctgatctttgacaaacctgacaaaaacaagcaatggggaaaggattccctatttaataaatggtgctgggaaaactggctagccatatgtagaaagctaaaactggatcccttccttacgccttatacaaaaattgattcaagatggattaaagacttacatgttagacctaaaaccataaaaaccctagaagaaaacctaggcaataccattcaggacataggcatgggcaaggacttcatgtctaaaacacaaaaagcaatggcaacaaaagccaaaattgacaaatgggatctaattaaactaaagagcttccgcacagcaaaagaaactaccatcagagtgaacaggcaacctacaacatgggagaaaatttttgcaatctactcatctgacaaagggctaatatccagagtctacaatgaactcaaacaaatttacaagaaaaaaacaaacaaccccatcaaaaagtgggcaaaggatatgaacagacacttctccaaagaagacatttatgcagccaaaaaacacatgaaaaaatgctcatcatcactggccatcagagaaatgcaaatcaaaaccacaatgagatactatctcacaccagttagaatggcgatcattaaaaagtcaagaaacaacagatgccggaggggatgtggagaaataggaacacttttacactgttggtgggactgtaaactagttcaaccattgtggaagacagtgtggcgattcctcaaggatctagaactagaaaaaccatttgacccagccatcccaatactgggtatatacccaaaggattataaatcatgctgctataaagacacatgcacatgtatgtttactgaggcactattcacaacagcaaagacttggaaccaacccaaatgtccaaaaatgatagactggattaagaaaatgtggcacatatacaccatggaatactctgcagccataaaaaaggatgagttcacgtcctttgtagggacatggatgaagctggaaaaccatcattctcagcaaactatcacaaggacaaaaaaccaaacaccgcatgttctcactcatagtattggaagttctggccagggcaatcaggcaagagaaagaaataaagggtattcaattaggaaaagaggaagtcaaattgtccctgtttgcagatgacatgattgtatatttagaaaaccccatcatgtcagccccaaatctccttaagctgataagcaacttcagcaaagtctcaggatacaaaatcaacgtgcaaaaatcacaagcattcctatataccaatatcagacaaatagagagccaaatcatgagtgaactcccattcacaattgctacaaagagaataaaatacctaggaatccaactttcaaggaatgtgaaagagctcttcaaggagaactacaaaccactgctcaaggaaataaaagaggacacaaacgattggaagaacattccatgctcatggataggaagagtcaacattgtgaaaatggccatgctgcccaaagtaatttatagattcagtgctatccccatcaagttaccaatgactttcttcacagaattggaaaaaactactttaaagttcatatggaaccaaaaaagagcctgcattgccaagacaatcctaagcaaaaagaacaaagctggaggcatcacgctacctgacttcaaactatactgcaaggctacagtaaccaaaacagcatggtactgggtaccaaaacagatatatagaccaatggaacagaacagagacctcagaaataataccacacatctacaaccatctgatctttcacaaacccgacaaaaacaagcaacgaggaaaggattccctatttaa

SEQ ID NO: 126098 - DNA, 648 bp, Homo sapiens
atgaagacagaaataaaggtgttctttgaaaccaatgagaacaaagacacaacataccagaatctctgggacacatttaaagcagtgcgtagagggaaatttatagcactaaataccctcaagggaaaggaggaaagatctaaaatcaacaccctaacatcaggattaaaagatctagagaagcaagagcaaacaaattcaaaagccagcagaaggctgtacaagcatggcatccacatctgtttggcttctggtgagagcctcaggaagcttactttcatgcgcgtctgtgtgaagagaccaccaaacaggctttgtgtgagcaataaagctgtttatttcacctgggtgcaggtggctggagtgcttaagattcactattatgaatatggcaatgttcagtcggttagtcataaagatgtacaggattcactaactgtttcgaatgaagtccaaactgccaaggagtttattaaaatcatagggaatgcagaaaatgaccatcagacagcaaccagtgaaaactatcaaacaatgtcagataccacattccaggccttgcgccggcagcttccagttacccgcaggaaaatcgactggaacaagatactcatctaccagattggcaaagaaatgcagaatgcttaa

SEQ ID NO: 126099 - DNA, 395 bp, Homo sapiens
  misc_feature (1)...(395): n = a,t,c or g
acctcgaccagctgctggacatgtcctacgagcactgatgcagctgtacagttgcgcccagcggcggcggctgaacccggggctgcggcggaagcagcactccctgctgaaagcgcctgcgcaaggccaagaaggagcgccgcccatggagaagccggaagtggtgaagacgcacctgcgggacatgatcatcctacccgagatggtgggcagcatggtgggcgtctacaacggcaagaccttcaaccagcccgagatgatcggccactacctgggcgagttctccatcacctacaagcccgtaaagcatgncggcccggcatcggggccacccactcctcccgcttcatccctctcaagtaatggctcagctaataaaggcgcacatgactcca

SEQ ID NO: 126100 - DNA, 522 bp, Homo sapiens
atggcagaagtagagcagaagaagcagaccttccgcaggttcacctaccgtggcgtggacctggaccagctgctggacatgtcctacaagcggctgatgccgctgtacagtgcgcgccagcagcggcggctgaaccggggcctgcggcggaagcagcactccctgctgaagtgcctgcgcaaggccaagaaggaggcgctgcccatggagaagccggaagtggtgaagacgcacctgcgtgacgtgatcatcctgcccgagatggtgggcagcatggtgggcgtctacaacggcaagaccttcaaccagcacttcagggagcatctggacaaacttttcgccaaaggaattggaatgttggatatagctctgaatgaggccttcaacattctgagtgataagtgtggaggaggctacccaagaagaactgtgactatggagggaaggacctgtcctgtggaagttggaactatggaggagacacagtcacggccagaaaatgcctatcccctgagagcgtag

SEQ ID NO: 126101 - DNA, 646 bp, Homo sapiens
  misc_feature (1)...(646): n = a,t,c or g
cccccccccccgctcttctgaggatccggcaaagatggcagaagtagagcacgaagaaggaagcggacccttccgcaagttcaccttaccggcggccgtggacctcggaccagcatgctggacattgtccctacgaagcagctngatgcagctgtacaagttgccgcccagcggcggcggcttgaacccgggggcctgcggcggaagcagccactcccctgcttgaaagcgcctgcgcaaggccaagaagggaggccccgccccatggagaaagccggaagtggtgaagacgccaccctgcgggactatgatcattcctaccccgagatggtgggcaagcatggtgggcggtctacaacggcaaagaccttcaaaccaggtgggagatcaaggtgtgtgcggccgtccctgccggctggggtgggctggggtcgcctgatgcaggcgggatcagctgacacccagctttgctcttggtctcccgcagcccgagatgatcggccactacctgggcgagttctccatcacctacaagcccgtaaagcatggccggcccggcatcggggccacccactcctcccgcttcatccctctcaagtaatggctcagctaataaaggcgcacatgactccaaaaaaaaaaaaaa

SEQ ID NO: 126102 - DNA, 337 bp, Homo sapiens
  misc_feature (1)...(337): n = a,t,c or g
gagatagagaacagcgtcttaccccagaaggttcccttgggatcatctcctcatttgcccctgtcagcagttactgatttgctttctgtcactatggattagacttgtctttactaaagtttcatgtacgtgaaatcataacaacatgttctcttgtgtttggcttctcttgctcagcatgatatttttacggttcacccatattgcatgtatcaggaatataannnnnnnnnnnnnnnnnnnnnnnnnnnnnnnnnnnnnnnnnnnnnnnnnnnnnnnnnnnnnnnnnnnnnnnnnnnnnnnnnnnnnnnnnacattgcgccgttacctatagacc

SEQ ID NO: 126103 - DNA, 358 bp, Homo sapiens
  misc_feature (1)...(358): n = a,t,c or g
ctttctgtcactatggattagacttgtntttactaaagtttcatgtacgtgaaatcataacaacatgttctcttgtgtttggcttctcttgctcagcatgatattttnacggttcacccatattgcatgtatcaggaatataatccttttnattattgagtagtgttctattgtatgtatataccacagtttatttctcccntcatcctttgctagattttggggtttttcacattgcgctattcagtataaaccngctctcaacattcatgtgcaagctttgagtggcatatattgcgttnccttgggggatnacctngttgggcacgnggctaacctaaaaaatttaacactgtgg

SEQ ID NO: 126104 - DNA, 2582 bp, Homo sapiens
gcctactactactactatacggctgcgagaagacgacagaagggagaaataaactgtggtatatacatacaatagaacactactcaataataaaaaggattatattcctgatacatgcaatatgggtgaaccgtaaaaatatcatgctgagcaagagaagccaaacacaagagaacatgttgttatgatttcacgtacatgaaactttggtaaagacaagtctaatccatagtgacagaaagcaaatcagtaactgctgacaggggcaaatgaggatgatgatctcaagggaaccttctggggtaagacgctgttctgtatctcgatcgtattggtggtcacacaagtgaagacatgttagaactcatcaaacccttacaccttagaatggtgtaatataaacctcaataaagcaaaatttaaaaaaaaaaaaccacctttaattttctcttacaaaaaaaaaaaaaaaaggaaaaccacttaacttttaattttcctccaacaactgattctggtacatagtataccttactgcctgcatccacggcctcacatcatgctgtttacatgaacgtaaagcttcaccgaagagtggaataagacagtcctctgtttaaagtctgttagaaactgtgttctccaaagcaggtgagcaatacagctgcaaggtacttagaactggcaaagactgtgaaactgttaaagtagaaagtctcagaggtccaacagcgatgcgggatgtttgcttcaagtactttaccacattttcagttatagactgccacttctgatcttgttctatcgggttttaaagcagttgccaaacaaacagaacttcttaacaattgaacttcaatggatttctgaagttccctcggatccggacttaacatgttaggaagcagttttttcatgtctattttttcttttgatcctccagcaagtagattgatattttcgtcctggtaacaattctaattgctcgggtacattcaacaaattttccagactcaaagctgccttaatggattttatatagttgaagtcagctttcaggttgagggaagtgctactggtactctttttcaagtcatggatagcgttctgccatttcctgcacagcagcccaatcggcagttgagatgtagcactcacatgctttgtttcctaaataatttataaccctcagggggaagagtcaagtcgggtttgggacagcacactttttctgggattcacccattccagacaatgtttccaggctgggcactccttacaccccagcactgggctaagggtgagcacccgatttgtcaaagctgggagatgcagccaatcaacacctgtcatggggcacacagggtgttccctggtactccacagaggccttttcaaacctcccttcagcctgttgagccactgagttaatccacagaagatgttttccaacaatagatgatgaccagacagcaattccctgtatagcttcaggacaatgaagttcacatagtgcttctaccaccatcataatgcttacttccaattcattcccctgagataggctggttgttttcatctctgtaagcaagtcaaagccatgtctcactgtcactgcaggctggcctgccaacaatcctaccctcatgatggagagtcgaatccgcgttagccagtcctgacaagtttggcgattggtatacaaaaaagtttttaatagccttgaggagggtaaagttaagccatatagcccatcgcctcgtgagcatttagcattaattttctccagattttccagatactgcagaagagaagcaagtctaagttgggtggttaccatggccttcatcactgtctgcagttgtccactgactaacatcctgatcagggtttaatgtgtgacctgcgagacttcgaatgataccttcaattgtctggaaggtgtcttgagctctgcccagtggggttctcagcttagaaagaacagtgaattgtgcagcttcccatatggcccactgccaaaggatagcatctgtcttcaggagattgcgtggaattgttgactggtcacgcttatccagtctctggcagctatagaacagtctttccaaccaattgtccttccctgttctatgagagttcccatacaaaataaaactaataacatcagagaaatcttgggggtggaatgtattacttggtgctttactcatgtgacttcttaatgctaaagaaatttcttgaatttctgtgtgattgttatcgcttaggaaaacacctaaaggaattgatttcaacagttttccaaatgcttgtcgaatacaagttccacggtgcactagttggacacggcaaacatcaacacatctctgtaaaagatcatctggcaaggaagaggatagagcatgtagactgctgcatgcctgcagacagatattcacatcttcaacgagagtgtcggctaaaaggcctttgcaaaatttatggaaagacggaagacagaataaaggtgcatatgtttcggacttcttcattacaacagctacttccaaagcccaagtcattaacagtttcctcgtgtcctg

SEQ ID NO: 126105 - DNA, 689 bp, Homo sapiens
cccacgcgtccgatcagaaagagataattattgagccttttcaggctgtggatgaagtggaacgggtacctgaggactattatacaggaccagtatatttaacagaggtaacaacccttcagcagcgtctgttacagcctgacttccagccagtctgtgcttcacagctctatcctcgccacaaacatcttctgatcaaacggtccctgcgctgccgtaaatgtgaacataatttgagcaagccagaatttaacccaacgtcaatcaaattcaaaatccagctggtcgctgtcaattatattccagaagtgagaatcatgtcaattcccaaccttcgctacatgaaggagagccaggtcctcctgactcttacaaatccagttgagaacctcacccatgtgactctcttggagtgtgaggagggggaccctgatgatatcaacagcactgctaaggtggtggtgcctcccaaagagctcgttttagctggcaaggatgcagcagcagagtacgatgagttggcagaacctcaagactttcaggacgatcctgacattatagccttcagaaaggccaacaaagtgggtattttcatcaaagttacaccacagcgtgaggagggtgaagtgaccgtttgcttcaagatgaagcatgatttttaaaaacctgggcagcccccatttcgcccc

SEQ ID NO: 126106 - DNA, 885 bp, Homo sapiens
atggagagtcgggtcctcctgactctgacaaatccagttgagaacctcacccatgtgactctcttcgagtgtgaggagggggtccctgatgatatcaacagcactgctaaggaagtccaccccgccctccacatctggatggaatttaccccccaaggcaactcaattaccagtgatctgatcaggacggttcatgtgtcagagggggccctggtgaaggttgctctgccagagatgaaggttcctgggccagtgatctacccctcccacagcccagggtaccttcttgaggtccctgggtcccagaatgggtctgcctgctccagacagagcgcgagtgaggagcaggcgggcaggcggcgggcagccgggcagccgtggacagaggcccgggcacagccagttgctgtgccagagggtgtggtgtccggctacagcgaagggaggcctaccccctgcgccttccagatccctgatggaagctacaggtgtctggctctggaagccgaggagagcagcggtgaggagggcctgcagggagaggtggggcctaccgacctggaagaggatgagggggtcagcaggagtggggacgactctgcctgcagagtcacccaggggacaccgcagctgcccaaagccctgggcatccaaccacccagctgctccagagaggaacaaggggcgtcccagcacgacgacagggccagccaggactgggatgtagtgaaggccgggcagatgatgacagccagccccagccctggccctgggcccagagtggcccagaaaccagagcagggcgggacagggaagcccacgctgaatcacctccacagccagcccatggaaacgctgaagtgggtccagatggggaggacgtga

SEQ ID NO: 126107 - DNA, 404 bp, Homo sapiens; identical to SEQ ID NO: 120409
  misc_feature (1)...(404): n = a,t,c or g

SEQ ID NO: 126108 - DNA, 398 bp, Homo sapiens; identical to SEQ ID NO: 120203

SEQ ID NO: 126109 - DNA, 286 bp, Homo sapiens
ggccttagaactgatgaccaagtactttaacaactggaactgggtctatgacaacgtaataaatcacgatgaaagtgaattgaacttgaagcatattaaaatagacctagataaattctcagataaccctgatggctatattgatgttttacaagggttaggacaatcctttgatctgacatggagagatataatgttactgctagatcagacactaaccccaagtgagagaagtgccgccataactgcagctcgagagtttggcaatctctggtatctcagtcag

SEQ ID NO: 126110 - DNA, 482 bp, Homo sapiens
tggtgtgtgatgttccccttcctgtgtccatgtgttctcattgttcaactcccacctatgagtgagaacatgcggtgtttggttttttgtccttgtgacagtttgctgagaatgatggtttccagcttcatccatgtccctacaaaggacatgaactcatcattttttatggctgcatagtattctgtggtgtatatgtaacatgcttgtcaatttaaaaacatgataagatgaacaccagtgaacacatcacctagagaatgaagcaaacatcaaaaattctattgcagcttcccgtgtggccctccgccatcccagctctctattccatgccagggatatcccattttgaacttcgtatttaccatgtcaatgtgctgttgacatttataggtaattttacatgtaaaactctatatatctctatgtgttgccaaacaataaatatttggccttgcttattttacagttttacaacaaaa

SEQ ID NO: 126111 - DNA, 1165 bp, Homo sapiens; identical to SEQ ID NO: 126082

SEQ ID NO: 126112 - DNA, 687 bp, Homo sapiens
atggaatactatgcagccataaaaaatgatgagttcatgtccttcgtagggacatggatgaagctggaaaccatcattctcagcaaactactgcaaggacaaaaaaccaaacaccgcatgttctcactcataggttctattattgtcaaggtcccatcttcacttcaagctcatttacagttatcagggaaagaggttgatgtgaactcagaagtccatgttcaggaaatggctgaagctcgtaaagatgatgttgtaacagtgactgatgcagaaaaagcattagacaaaatccagcatctctttatggttaaaactctcagcaaaatcggcatacaagggacatacctcaatgtaataaaagccatctatgacaaacccacagctaacataatactgaatggggaaaagttgaaagcattccctctgagaaatgaaacaagacaaggatgccctctctcaccactcctcttcaacacagtactgaaagtcctagccagagcagtcagacaagagaaggaaataaagggtatccaaattggtaaagaggaagtcatactgtcactgtttgctgatgatgtgattgtttacctcaaaaaccctaaagactcctatagaaagctcctagaactgataaaaggattagcaaagtttccagatacaaaattaatgtacacaaatcagtag

SEQ ID NO: 126113 - DNA, 309 bp, Homo sapiens
atgaaatactatgcagccataaaaaatgatgagttcatgtcctttgtagggacacggatgaagctggaaaccatcattctcagcaaactatcgcaaggacgaaaaaccaaacaccgcatgttctcactcatagaaagggcgtccccctctgcaccacaaatccaatatctgcagggagctgccgtgacccacagtggacttgctatagatgtggctgggatttacaccattggcatccttggttctcaggcctttggacttggactgaattacagcactagctttcctgggtctccagcttgcagatag

SEQ ID NO: 126114 - DNA, 873 bp, Homo sapiens
atggaatactatgcagccataaaaaaggatgaattcatgtcctttgtagggacatggatgaagctggaaaccatcattctcagcaaaatatcgcaagaacaaaaaaccaaacaccgcatgttctcactcatagaccaggggtccccaacccctgggccacggacctgtgtcagtccatggcccgttagggactgggctgcacagcaggagatgagtggtgggtatggtataagaaacagtttacttattgccccgatgcctacagcttccactgctcagatcctggggaataatgagtccattgaaccttacaccagcaacatctatactcgcagagtcttgtcaggagaatttcagcgcctgaattctgctattatctatgaccgagatttctcttacaattacttcggctttaagaatggccagcagtcccagcagctgggaggtcatcaggtcagaaaagcagagtgggtggcagatggcaaagtaaccagtccagggccagggccagaggaagttgtagtccaggaggagggtgaagtagataaagaacacctaggccaggcggccatgcagcgatatggggttagcataatatacaaagccctccagcattttaggcatcacggctgtggcagcacgaatattgacagccaggagcacagtgatgagcatacacgtaggctgatgcagattttgccgggcaaccactgtgtggatgaccagggcattggcagagatgatggtcacaaagaggaagacaagaggcaggaccagaaggggccaccactctcgaagtccagggaaacccaccaggaagaacttggtgcaggagatgttgaaggtgcttgtatttccatcctcacccattag

SEQ ID NO: 126115 - DNA, 939 bp, Homo sapiens
ctagccaaaggctggcttctcaagccgctggatgaatggggagcctggagatgttgaacaagtcacgtacgtctctgattgcctcgatttccccattttggccgatggcatcgctaaagcatttgatgattccaccgtcaagtgtgagagctgagcagttgctctctgatgtctcaccgagccatccaccatcccagcgaagaaagggccaccaccaccaacaacaatcggagcctggcagttggtgagggtgggtgggggcgaacagatggtgccacaagatgtcctcgggcggctcactggggaccgagccttgtggctcctgccttgcgtgctcagcttggactgtaacagtacaagcccagtgacagctggtgcctggaaaccatcttgctgctgtttcctgtgagtggagaggatcttcttctcaattgcaaaatgaagatcaacagcactgatcttgcttggttccagggatgcttggttccagggatgagatggttgtgattttatagctaaatatgagccgggtgcgttgatggagccatttttgacatatttcaattgcactgattgcctgacatcattgaagtcacccacgtttccccagcacaggccacacactcgggtagattcagttattttcacaaggacagcctccccagccctgcagaagtcattgtctttttctgggcagcccctgtggatggattcagcaatcccacatttgggggtgcaggagaccccgaaatgtgggctgtctttggaaagagtagaacactccgcgtggggctggcgggctgctgctatgagtgagaacatgtggtgcttggttttttgtccttgtgatagtttgctgagaatgatggtttccagcttcatccatgtccctacaaagggcatgaactcatccttttttatggctgcatagtattccat

SEQ ID NO: 126116 - DNA, 2244 bp, Homo sapiens
ttactcgtttccttccccatcatacacccatctagtagtgccaattccttcatagtttgaagcccagtaataaacacaggcattaatgtgcagaataaacagcaagtatccagttgttcgaataactacagggtcaggatcatcaatatcactgtcttccacatccacatcttgccccactggaaggtcttcaggctccataacatgggtggagctgtcatttcctataataacaatgccttcttctggaatgcctccagctcctgcagctcctgcagctccagcagctccagcagcttcaccttcatctcctccttgtcctgggccaggctgctgatgtattccttctggtgccacgtcttcagcactgacctctagctctggtacagtgtgatgtatgatgacgtctgtctctccagacagctggatgcagcgacgttccagtttttccatctgctccttcaggtccaccttctcctgcatgagctccataaagtggctctgcagcttctccatggcccccctttgctccttcagctgcccacgtggccatgcctgctcctcctcggcactggccacagctgagtttaaaaatgccaccatggcctcccgactctccagttcctccgggatgcttggcatgagcggaagcgcctcctcctcactgtccagtccatctcccagcttctcgctcggctctttcttgatgtgctgctccgactgtggtgtgctggtgatctccatgttctcattgttcagcttcatgaagccagtctgcaacttggccagctgctctttgagctcaccattctggaagactgcatgactgatggtggtgaggtcattctgcatggtctccagggtttgcctgtgcacctccacctgctcctcccagagctcagccttctgctctagctccagcagcctctcctcctgctctcggttcaggagactcaagccctcattgtcttgcacgcgccaggaatactgcaggcagctggccagatcctttgactctccttcaaactgcctggcagcatgctgagtgtaatacagagctgtccataactctgccttctcggacatgaggatccctatggtctgaatttgaacctgtaaccactccctttggctccctgctttcagttgcttgctttcttttcttcttccagttgatccagaatttcttggttttgttgtttctccagatcccaaacaccacatcacatttaaatggccttgactttgagtcttcctaattttctctaatgttgccaaattttctttttcaattccttcatcctccaactttttcccactaataagttcttctttcttcatcttacagtgatttaagtattttatatctccagccatctcttcttcctcttcttctgaagtcacttctattttcccattctgacccatgggtagtggttgatctagcatctcaaacatccaggtgcacttcaattgctgacgaaggtaattgttgttctcagtatcttctggacgttccagaactgatgtcagatttgggtcatcacagtccacaaaccatattggtgaaaaagatggataggattcttggaatcttattatgtctcctcctcttacaaactggagtctgggctggataaatagcatatcataaaggtagatgatatcacatatgatgtccgcaataagccagtagtgtatgttgtctgcggtttgatatgggaagacgaggcgcagtggtataaaacagcagttccagttataggcaagagtgacaagcaagagccacaggagatagagtcgatctgtgtatgaatctatgctgtttggaagtttaattcgctttaagtactctgttaaaggcatctttttgactttgaaccacaacagcctgtagtaatgttctgttggcttatcatcgctttcttttactggtggtacagccgtgggctttgcagtttgtgggctggcttcgggtgaggagagatctccctctaccaactttttcttgtagagggctgttctttgacgcattcttttcaccaggttgtgtagctgggcatcggcatactcatttataacaggagctgcaggcggtttgttttgtgggctgttgtgtgagaacatgcggtgtttggttttctgtccttgtgatagtttgctgagcatgatggtttccagcttcatccatgtctctacaaaggacatgaactcatccttttttatggctgcatagtattccat

SEQ ID NO: 126117 - DNA, 789 bp, Homo sapiens
ctaaattttaatactttcggttccatatacgttgtaaccttctctataggttgctaaattctgggtattctgcgaggaagttgggttaaaagtctgtgcactctttgccaccttcattctcttcgcttctgccctggacttgtaacagaactctatcaaagccaccagcattgccaagcccaagccgccaaccagaatgtagaagacgcctgctacattgctcaggctcaaggcactcgtcttgtccttcctcctcctcttccccttccttttcctcttccccttccccctcctcctcttcttctgcttctgcttctcctcctcctcctccttctccttctcctgctcctccataattgtggttacaaccactgttctgttctcaatagcagctgtgtcattgccaagagttggtacatcttgaatcaagactaacttatccatatcattccagtaaccaacctttctaggtcctgtgcttttcagctcaaacacatccattgtgtaattgactctacgtccatagtggtcaaactgaacattccctgtcagcccttgaattcgaacccttgtaacagcagcactgacagacttatctttataatccttaaatctcttagccttaatcgtataggtaggaagtactccattggcatttgttgaactaaattgaaagtgtttggttttttgtccttgtgatagtttgctgagaatgatggtttccagcttcatccatgtccgtgcaaaggacacaaactcatcattttttatggctgcatagtattccat

SEQ ID NO: 126118 - DNA, 474 bp, Homo sapiens
atgggatactatgcagccataaaaaaggatgagttcatgtcctttgtagggacatggatgaagctgaaaaccatcattctcagcaaactatcacaaggacaaaaaaccaaacactgcatgttctcactcatagcctgggctgtcctcatagagcacagcaagtgtgggccctgcagtgacatccccgcttctgccctcttatttcagccacagccacagcagacacttccgtacaagatcacctcgggcttgcagcctcccacctaccagggaagaggtctaggaacaatgagcagccctgtcacaatgaacaacaagaacactcagattgtggtctctaaacaccacatcctatcagtagaaacagggctcctgggagaaatggctgattccaagcctggacctggaaatatactagatgagcatggaatatcttgcataccagacagcttcaaagctatcaaaggctactaa

SEQ ID NO: 126119 - DNA, 423 bp, Homo sapiens; identical to SEQ ID NO: 126090

SEQ ID NO: 126120 - DNA, 384 bp, Homo sapiens
atgatcatcactggccttgaagactatgaaatgggtcttcgaatggaaggaacacttgagatcccaggacactaccagaaagacaaattcttagcacaaagtacaccagatttgctactgcctaagactagtctcacaaatcctttttctattaatcaaatccttgcagagagacaaatagtgacatttactgtttacccagacacagaaagagatagagagactagaaacttggctgacttgaagcaaattaaaatagacctaggtaaattctctgataaccctgatggctatattgatattttacgagggttaagacagtcctttgatctgacatgggagagatataatgttactgctaaatcagacactagctccaaatga

SEQ ID NO: 126121 - DNA, 1344 bp, Homo sapiens
ttaacagctcttgacgcgggcctgggtgatatccgatgttttcttgatgacgctggcccgggtctcccggtctggccgactgctgctggatgctggggtcatggaggaagaaagggggaggtcttgaaaagggggccaggagctgttgtaaggcaccggattgctctcctctttgatggtgacctggaggtccggtttgttggaagtgacgaaggacgccatgccgggcagcaggtaggagcctcgagtccccatgttgctgaggtactgtttgccttcaatattcctcttccgccagtgtggccgcccctcggcactctcttcatcgctgggcacactatcagtcgtttcgctttctttactgagctgcagttttctcctctgtaaaatgagggcactgccaccatctgaaaggctttttgcactctgacattctgctacactttctggaaggctcttgttcagcaagtttgatttgaatttctttctattgatcatattctcaattactttcaccaggagtaaattattttcaaatcggaatcctcttaatctcaaagcgattgtgtctttgctcttgttaagccacttgagccccgggatcgtgttggagtttatctgctcctccagccacgggcgcatgcgcatcctttccaccggcatggtgccatcttcaggctccactggtaattctagttctcttgctatctccaccacaactgtggttacttcctctgctaaggtcttgaacccctcaaagtcatttgtgagggttggaatcaacttcttccaaactcttattaatgctgcaatttttacctcccctcgtgaaccatgaatgttcttaatggcatctacaatagtgaatcctttccagaaggtttctaatttactttgcccagatccgtcaaaagaatcatgatctacattgacagtccattgttcagcatagccactttcatcaatgatcttagccagatcttctggataacttgctgaagcttctacatcagaacttgcagcttcatcttgtgctattatatcatagagatgtcttcctttcttaaacctcatgaaccaacctatgctaacttcagacttttcttctgtagcttccttatctctctcggccttcataaaattgaagagaattagggctttgctacggattaggctttggcttaagggaatgttgtggttggcctggtcttctatgagtgagaacacgcggtgtttggttttttgtccttgcgatagtttgctgacaatgatggtttccagcttcatccatgtccctacaaaggacatgaactcatcattttttatggctgcatagtactccat

SEQ ID NO: 126122 - DNA, 1356 bp, Homo sapiens
tcatccatctggaggtccttgctgtttgtacacatttaaaaatgcgatgaagctagctatgtcttcctttggtgttgcgtgtaggtaacttttctcactcgatttccctttcaaatgggaaggttcactatgttctgtgtttgtgagcacagcttgtccactggagggcttctctgctgctacagccagtatcacaccagatgccttgagctccaagttacagtacactgcgccaccaccctcgccgccgccgtcttcatccatcttgaggccactcccgcagccggcgagccgggggccggcagcagaggggccgcgggctggggacgccgccggagggagcgcgcaggcgaccgggcggctcctcagcgcgcggcccgggtcgcggccgggcctcctcccgccgggcggggcctcgctggtcggcgtgccgtcacgtgacccatgccccgcctctgcccgcggtgggcggggcgtgaggccgcgcagccccgccctcgggaaccggccgggccggcggcgtctgcgctggggaaggctgtagacctggcccctgaagtgcaggccgatccggtgtgcgtggagcgaagcctcctcgccctcagcattccagtagccctttagcacactccagaggaaatacatactcaggtttaaagcttgaccttggctctggtaacgggacagttcatcgaacaaggggtgattcatgagaacatcctgtaccgccccctctccctctagagccactgggggcctcaaaacgtgagagcggaaccgctcgaggaatggaggcaggttttgcaagcgtctgtctccagtcatgggcaggaagtggctgttttcctgccaggcctgtgaggtcccctggagatgagctgggaagggtactcctcgtcctgcttcacaatagaacttcaacgccttcattttaaggcgattttcttccatttggaagcgcagcgtgcttttccacaatgaggttcctagaagagacagctccggagagacagtaagtagaacgatggctgccaggggctgagtatgtggcctggcagttctgtctgtcggttttctggaagcaaccaggagctgtcccagcctctgtggggcaggtacagcaagaatccacctccccgagtcaccacttggagagccttcaagtctgtggacatcctgtcccatttcaactttagtgttaacaggatgtgtcagacatgacactatgagtgagaacatgcggtgtttggttttttgtccttgcgatagtttgctgagaatgatggtttccagtttcatccatgtccctacaaaggacatgaactcatcattttttatggctgcatagtattccat

SEQ ID NO: 126123 - DNA, 507 bp, Homo sapiens; identical to SEQ ID NO: 126091

SEQ ID NO: 126124 - DNA, 663 bp, Homo sapiens
tcagtcagtggccttgttgagaaagtgacatttgagcaaagactcaaaggaggagagggagacagcactgtgggcagcagtggtaatgagatcttcaggcagtggccatgttgggagttgagcaatggatgctctcttcagggtgacgcaggctgcagctgccttgtagttcatgttactttcccagctggttctctctccggtgatggcttgcccacggcccaatggctccagtcccttctcgtgctggctggagggagaagagtcaacagcacccaagggcacagatgccatcactgggggagtgtagcagagccctgcgtcctggtgaaaagacaccacgctgcccaagaaggcttgtgcagttttcagaaaactccccgctcgcaggtcccctttcacttgttctgggaccctggccaccacacccttttgtgttcctactgcccttctgtgcgtggcgggcacccagccagcggtgcaggctgtaagcacagctgtgtagaccgcggcggagggagagccgctccctatgagtgagaacatgcggtgtttggttttttgtccttgcgatagtttgctgagaatgatggtttccagtttcatccgtgtccccacaaaggacatgaactcatccttttttatggctgcatagtattccat

SEQ ID NO: 126125 - DNA, 987 bp, Homo sapiens
atgctggtattgggctacaaccggaaaaatactgaaggtacacaaaagcagaaaggtactaatgcttcagactttcatttcctatcccaagtattagagcaagttgtatctccaaagggatctaaggaagctcaatgctgcgtcctcaggcatctaggctgtgaatccagtgagtctgcccctggtatccctcccaatttaggtatacagctcttgacatgggcagttatgtgggacccgttccccaccacccttgccagggccccaagtttggccttagagctgatgacccagtactttaacaactggaattgggtctacaacaacataacagatcagggtgaaagcaaaatgagtaaattaaagggaaaagagagaaggcagagagagggagagagaagagagagaaaaagggagagagagaaaagagagagagaaagtcagagaaaagaaagaaagagagagaaaaaagggaaaaagagggaaagagagaaagatagaagtgacttgaagcaaattaaaatagacctaggtaaattctcagatacccctgatggctatattgatgttttacaagggttaggacaaccctattatctgacatggagagacataatgttactgctagatcagacactaaccccaaatgagagaagtgccgccataactgcagtccgagagtttggtgatctctggtatctcagtcaggtcaatgataggaagataacagaggaaagagaacaattccccacaggccagcaggcagttcccagtgtagaccctcattgggacacagaatcagaacatggagattggtgccacagatatttgctaactgacgtgctagaaggactaaggaaaactaggaagaagcctaataaattagtcaatgatatccactataacacagggaaaggaagaaaatcctactgcctttctggagagactaagagaggcattgaggaagcatacctcactgtcacctga

SEQ ID NO: 126126 - DNA, 1379 bp, Homo sapiens
aacgttttctgaatttaaagactgtacaactcaacactaaaacaaaaaccaatcacctaagcagaaagccaaatttgtcaaaatgtcaacaattgttaaatatggacaatggaccaacaacgacagactggattaagaaaatgtggcacatatacaccatggaatactatgcagccataaaaaatgatgagttcatgtcctttgtagggacatggatgaaactggtaaccatcattctcagcaaactatcgcaaggacaaaaaaccaaacaccgcatgttctcactcacagaaatacaaaaaaccctcagagactattatgaacacctctatgcacacaaactagaaaacctagaaaaactagaaatggacaaattcttggaaacatgcaacctcccaagattgacccaggaagaaattgaatccctgaacagatcaataacaagttctgaaactgaatcagtaataaaaagcctaccaaccagaaaaggcccaggaccaggtggattcacagccaaattctatcagagcccatcccttactggcaagaatgacaaagagcctgagattttaccctacttccatgctgacttccttgtggttcctggaacgcaccaagcatcccctgtccttatggtcttggggcataagtcatttcctcataggaactctcctccaagcgtctgcatggctaacttctttactcaaaagccaccttctcaatctattcacaacgctgtgaacacccacacggatcctccactgtttctggtgctgctgaaggacagaggattgcttgtcatctggtgccatgagtcacaaggagacgaattgtggcacttggtacttctagattccaagtgctgcttcggcagcatgacacacagaatggaatggtcaggaccctcggctgcaggtctgttggagtttgctggaggtccactccagaccctgtttgcctgggtatcagcagtggaggctgcagaacagcgaatattgctgaacagcaaatgttgctgcctgatcattcctctggaagctttgtctcagaggggtatctggccgtggcagggatccccagtccccaggccctggaccactaccactctgtggcctgttaggaaccaggccacacaacaggagacctccttaatgccttgccagctggaaggaaaagagcctcttgcattgcccacaaaggaagcagagattgaggggagaagaactggagaaattaaaaaagtggaaagagacagcaacacaaataaagaggagctactgctggatttagccttcaaagtctcctcattatttgacaagttagaagaggtagtggaactactagtaattggggaactacaactctatcccagcaagtga

SEQ ID NO: 126127 - DNA, 867 bp, Homo sapiens
atgaggcagattcagatgaggaagaggaagacgagtgtaaaaatcgaacttcagattctgaatgaacccagcccagctctaggactcacccctgagcacaaaggcaatgttgggcacactggtaaaggaccactagaatccagcagcccggacccttttctttgtggtcaagaaaggggaaaacaggtgcaggactgctacatcgatgggaaatgttccccccaaggcaaaaacgcccttaagatgtattctggagaattcgacccagtcagagtgtgtgtacctttttccctctcagatttgaagcaacttaaaatagacctaggtagattctcagataaccctgatggctatattgatgttttacaagggttaggacaatcctttgatctgacatggagagatataatgttactgctagatcagacactaaccccaaatgagagaaatgccaccataactgcagcccgagagtttggtgatctctggtgtctcagtcaggtcaatgataggatgacaacagagcaaagagaacgattccccacaggccagcaggcagttcccagtgtagaccctcgctgggacacagagtcagaacatggagatgggtgccacagacatttgctaacttgcatgttagaaggactaaggaaaactaagaagaagccgatgaattactcaatgatgtccactataacacagggaaaggaaaaaaatcctaatgcctttctggagagactaaggcaggcattgaggaagcatacctctctgtcacctgactctattgaaggccaactaatcttaaaggataagtgtatcactctgtcagctgcagacattagaaaaaacttcagaagtccaccttag

SEQ ID NO: 126128 - DNA, 1115 bp, Homo sapiens
ttttttttttcagttgcaagatttaatagagtgaaatagagtgaaaacagagctcccatacaaggggaagggacccaaagtgggtagccattgctggcttgaatgcctgagtttatatcctgatcattgtcccgccccttgtgctgtcaggcgatagatgactggctatttctttacctcctgtttttgcctaattagcattttagcaagctctctttactacctgattggtcgggtgtgagctaagttgcaagcctagtggttaaaggtaggtgtggtcacctttcccagctaggcctaggaattcttagtcagcctaggaaatccagctagtcctgtctctcagtcccctctctcaacaggaaaacccaagtgctgttggtgaggttggttgacgatcactcttaactgcttcctgctgaattggggcgtagtaggtgtcatgcagttgagatttccttgggaggggtgacttcgatgtcattaacattggagcatggactagcaggccagttcaggggtacacagtagatcttagtcatggactgcatctgggactccatttgaagaatgatttgtagttttgcagtttcaatggtggaagaggcaaaaggcttcttcctagttttcctaagtccttctagcatgcaagttagcaaatgtctgtggcaccaatctccatgttctgattctgtgtcccagtgagggtctacactgggaactgcctgctggcctgtggggaattgttctctttcctctgtcgtcatcctatcattgacctgaccgagataccagagatcgtcaaactctcgggctgcagttatggcggcacttctctcatttggggttagtgtctgatctagtagtaacattatatctctccatgtcagatcaaaggattttcctaacccttgtaaaatatcaatatagccatcagggttatctgagaatttacctaggtctattttaattcgcttcaagtctatgagcgagaacatgcggtgtttggatttttgtccttgtgatagtttgctgagaatgatggtttccagcttcatccatgtccctacaaagaccgtgaactcatcattttttatggctgcatagtattccat

SEQ ID NO: 126129 - DNA, 3052 bp, Homo sapiens
atgtactcacatgtgatcacggtgtgccggcatgtgaagaatggggacattctgctactgaaccgacagcccacactgcacagaccctccatccaggcccaccgtgcccgcatcctgcctgaagagaaagtgctgcggctccactatgccaactgcaaggcctataatgccgactttgatggagacgagatgaatgcccatttcccccagagtgagctgggccgggccgaggcctacgtcctggcctgcactgatcagcagtaccttgttcccaaggatggccaaccattggcgggactgatccaggatcacatggtttcaggggcaagcatgactactcggggttgctttttcacccgggagcactatatggagctggtgtaccgaggactcacggacaaagtggggcgcgtgaagctcctttctccttccatcctgaagccctttccgctgtggacaggaaaacagcatataaacagaaccaaagacaaaaaccacatgattatctcaatagatgcagaaaaggcctttgataaaattcaacaacccttcatgctaaaaactctcaataaattaggtattgatgggacgtatctcaaaataataagagctatctatgacaaacccacagccagtatcatactgaatgggcaaaaactggaagcattccctttgaaaactggcacaagacagggatgccctctctcaccactcctattcaacatagtgttggaagttctggccagggcaatcaggcaggagaaggaaataaagagcattcagttaggaaaagaggaagtcaaattgtccctgtttgcagatgacatgattgtatatctagaaaaccccactgtctcagcccaaaatctccttaagctgatgagcaacttcagcaaagtctcaggatacaaaatcaatgtgcaaaaatcacaagcattcttatacaccaataacagacaaacagagagccaaatcatgagtggactcccattcacaatcacttcaaagagaataacatacctaggaatccaacttacaagggatgtgaaggacctcttcaaggagaactacaaaccactgctcaaggaaataaaagaggatacaaacaaatggaagaacattccatgctcatgggtaggaagaatcaatatcgtgaaaatggccatactgcccaaggtaatttatagattcaacaccatccccatcaagctaccaatgactttcctcacagaattggaaaaaactactttaaagttcatatggaaccaaaaaagagcccacattgccaagtcaatcttaagccaaaagaacaaagctggaggcatcatgctacctgacttcaaactatactacaaggctacagtaaccaaaacagcatggtactggtaccaaaacagagatatagaccaatggaacagaacagagccctcagaaataatgccgcatatctataactatctgatctttgacaaacctgacaaaaacaagcaatggggaaaggattccctatttaataaatggtgctgggaaaactggctagccatatgtagaaagctgaaactggatcccttccttacaccttatacaaaaattaattcaagatggattaaagacttacatgttagacctaaaaccataaaaaccctagaagaaaacctaggcaataccattcaggacataggcatgggcaaggacttcatgtcgaaaacaccaaaagcaatggcaacaaaagccaaaattgacaaatgggatctcattaaactaaagagcttctgcacagcaaaagaaaccaccatcagagtgaacaggcaacctacagaatgggagaaaatttttgcaacctactcatctgacaaagggctaatatccagaatctacaatgaactcaaacaaatttacaagaaaaaaacaaacaaccccatcaaaaagtgggcaaaggatatgaacagacacttctcagaagaagacatttatgcagccaaaaaacacatgaaaaaatgctcatcatcactggccatcagagaaatgcaaatcaaaaccacaatgagataccatctcacaccagttagaatggtgatcattaaaaagtcaggaaacaataggtgctggagaggatgtggagaaacaggaacaacttttacactgttggtgggactgtaaactagttcaaccattgcggaagtcagtgtggcaattcctcaggaatctagaactagaaataccatttgacccagccatcccattactgggtagatacccaaaggattataaatcatgctgctataaagacacatgcacacgtatgtttattgcagcactattcacaatagcaaagacttggaaccaacccaaatgtccaacaacgatagattggattaagaaaatgtggcacatatacaccatggaatactatgcagccataaaaaaatgatgagttcgtgtcctttgtagggacatgggatggagctggaaaccatcattctcagcaaactattgcaaggacaaaaaaaccaaacaccccatgttctcactcatagacttgcaacaagcggttcacgctggtttgccccagcaggcgaaaatcctgtttgatggtggttccgaaatcggcaaaatcctgcccgctttccagtcgggaaacctgtcgtgccagctgcattaatgaatcggccaacgcgcggggagaggcggtttgcgtattgggcgccagggtggtttttcttttcaccagtgagacgggcaacagctgattgcccttcaccgcctggccctgagagagttgcagcaagcggtccacgctggtttgccccagcaggcgaaaatcctgtttgatggtggttccgaaatcggcaaaatccaggaaatccctagaggagtcaaattcataaaggcagaatgcagaatgatggctgccaggggctatgagtgagaacatgcgatgtttggttttctgtccttgtgatagtttgctgagaatgatggtttccagcttcatccatgtccctgcaaaggacatgaactcatccttttttatggctgcatagtattccat

SEQ ID NO: 126130 - DNA, 496 bp, Homo sapiens
  misc_feature (1)...(496): n = a,t,c or g
gggaaagaaaaaaattttgaaaaccctttttngacccgcgctgcaggaattcggcacgagggaaaacctgaaaagactggtctcaaacgaaactttacgaacgttgcaggaaaagctagacttctggctgaaggagtacaacgtcctccaggagccggtctcccagccctgcccctcgcagccgtagctgcagccgcagcagatctgccagcccctccaccgctgtcaaggtcaggagaccgtccccaaaccgctccaagctgtccaatgtggcgcgcaaggctgccctcttgtcccggttcagcgattcctattcccaggcccgcctggacgcgcagtgcctgctgcggcgctgcatcgacaaggctgagaccgttcagcggatcatctacatcgccacagtggatgtgatccgagccatgaatgtcaatcccaagatttcattccctcctgtcgttgacttttgccttctcagtgacttcatccaggagatatg

SEQ ID NO: 126131 - DNA, 2040 bp, Homo sapiens
tcagaagctcttcagtttaatgagatcccatttgtcaattttcacttttgttgtcattgcttttggtgtttcagacatgaagtccttgcccatgcctatgtcctggatggtattgcctaggttttcttctagggcttttatggttttaggtctaacatttatgtctttaatccatcttgacttaatttttgtataaggtgtaaggaagggatccagtttcagctttctacatatggctagccagttttcccagcaccatttattaaataggaaatccgttccccattgcttgtttttttcaggattgtcaaagatcagatagttgtagatatgcggcattatttctgagggctctgttctgttccattgatctatatctgtgttttggaaccagtaccatgctgttttggttactgtagccttgtagtgtagtttgaagtcaggtagtgtgatgcctccagctttgttcttttggcttaggattgacttggcgatgcgggctcttttttggttccatatgaactttaaagtagttttttccaattctgtgaagaaagtcattggtagcttgatggggatggcattgaatctgtaaattaccttgggcagtatggccattttcacgatattgattcttcctacccatgagcatggaatgttcttccatttgtttgtatcctcttttatttcattgagcagtggtttgtagttctccttgaagaggtccttcacatcccttgtaagttggattcctaggtattttattctctttgaagcaattgtgaatgggagttcactcatgatttggctctctgtttgtctgttgttggtgtataagaatgcttgtgatttttgtacattgattttgtatcctgagactttgctgaagttgcttatcagcttaaggagattttgggctgagacgatggggttttctagataaacaatcatgtcgtctgcaaacagggacaatttgacttcctcttttcctaattgaataccctttatttccttctcctgcctgatcgccctggccagaacttccaacactagagcatttttccggttcataaattggggggtcaaacctccaagtttacagtttccatgaggaagcgcccgtctctcaaggagaattcgttggacggcagaagctatgaattcattagacacccttcgcaaaggcgcatacgagccaaacgttggaagattcgacaaaagtccgtcctcacgcccatgccgtctcttgggaaatattgccactgcccgatgattatttatggccatggcgttccaagttgtaaacactcttgcttcattttccctgagacccactggggtctgtcccttaagaaacccagtcctttctgatttcttgtttctctctgatccttctttcagggtccttccttggagtgcacttttctcagcagacagaacagctatctcctccttcaggtttcggagctgtttcttataatcggacatggcttctgtgtcctgctggtctgcattctgcttgagtgagttccactgctcacgcttccgctcctccaagctccaaggctctgaccgcctattctctgagctcctctgatctgtgtttctgtggcgggcatcctcctgagcttgaagagatttaagctttatttcattaatttggtcttcaatcactgatatcctttcttccgcttgatcgaattgactcatgaagcttgtgtatgcttcacgcagttctcgtactgtggctttcagctccatcaggtcatttaagcttttctctacactggttatgctagttagccattcctctaatcttttttcaaggtttttagcttccttgcgatgggttagaacatgctcctttagcgcggagaagtttgttattactgatcttctgaagcctacttctgtcaactcgtcaaactcattctccatccagttttgtttccttgctggcgaggagttgtgttcctttggaggagaagaggcattctggtttttggaattttcagcctttctgctctggtttctccccat

SEQ ID NO: 126132 - DNA, 543 bp, Homo sapiens
tcaggacttcatccaggagatatgttgcattgcctttgcaatgcaggccttagaaccacccctagatattgcatatggagcagatggagaagtttttaatgattgcaaataccgccgcagctacgactcggatttcactgctcccttagtcctctatcacgtgtggcctgctctcatggagaatgactgtgtcattatgaagggagaagctgtcaccaggagaggggctttttggaattcggtgcgatctgtaagtcgttgtcgaagcaggagtttaagtcccatttgcccccgtagccaaattggtttaaacacgatgtctcgaagtcggagtccttctccaataagatgtggattgccaagattttaaaagcaccagacctgctcctttgacccagtgcgtggaaacagctgctttctccagtgccgccatctgtcttctgtgtctgcctcagacctcacttaagataatgtcaaaaggcaattctgtgtatcaccccacacagagagttaaatgttttggcttggcgcatttgtaaaaaa

SEQ ID NO: 126133 - DNA, 1615 bp, Homo sapiens
cgagtccaacccagctgcgaacgacccgccattatacagccagcagccgtccgccgtggcgcaagcaccgggcgacaacaggcaacgggcagcaatcatccgcgaatggacaaatacagcggccgaaacgggggaaggcatcgtcgacgaccaacaccgcgtggccaacgtgacggcagccgtggccaccgcaacgcttaaatctcttcaagctcaggaggatgcccgccacagaaacacagatcagaggagctcagagaataggcggtcagagccttggagcttggaggagcggaagcgtgagcagtggaactcactcaagcagaatgcagaccagcaggacacagaagccatgtccgattataagaaacagctccgaaacctgaaggaggagatagctgttctgtctgctgagaaaagtgcactccaaggaaggtcctccaggagccggtctcccagccctgcccctcgcagccgtagctgcagccgcagcagatctgccagcccctccaccgctgtcaaggtcaggagaccgtccccaaaccgctccaagctgtccaatgtggcgcgcaaggctgccctcttgtcccggttcagcgattcctattcccaggcccgcctggacgcgcagtgcctgctgcggcgctgcatcgacaaggctgagaccgttcagcggatcatctacatcgccacagtggaggcattccatgtagcaaaaatggcattcagacacttcaagatccatgtgagaaaatcgttgacaccatcttatgtggggtcgaatgactttgagaatgctgtcttggattatgtcatttgtcatcttgatctatatgattctcaaagcagtgtcaatgatgtgatccgagccatgaatgtcaatcccaagatttcattccctcctgtcgttgacttttgccttctcagtgacttcatccaggagatatgttgcattgcctttgcaatgcaggccttagaaccacccctagatattgcatatggagcagatggagaagtttttaatgattgcaaataccgccgcagctacgactcggatttcactgctcccttagtcctctatcacgtgtggcctgctctcatggagaatgactgtgtcattatgaagggagaagctgtcaccaggagaggggcttttgtacggtggccttgcatagtgacaattcatcccaagtgtttgattcacaagttcgagaacatttataaacccagagattctataaaagaagtttataaagagttgataagatttcatacaaaggagagcgtgaggggaaatctgggatgtctgcatattggagatggcagaaacaaaaaacaaagatggcaagctgacaccggggcaacagctgacccgtttcttgtaagaggagccttctcgctggggctgcggttatttttatccaaatctctgctggcggctgaacggggatgttaccttgaacaccttgtcatcctgaggggaggaatgccaagcccctatgacctgaacagctctcaaaaggcaacaccacccaatgctgttgcattggagattaaatttccgaacatgaatttttggggacacattcacatcatagaaggaaatgatgggtga

SEQ ID NO: 126134 - DNA, 255 bp, Homo sapiens
atggtggcaagcctcgtgttctctgacctggggttcttggcctcacggattccaaggaatggaatcttgggccatgcaccgtgtgggaacagtggcaagcctttagcccgactgggagctgtaatgggcgcctcgctggatcaggagcacagcagacaccttgccggatctggacggatggaagtcagcagcaggtctgcgacagcggcaaacagcagtggtggacggcgagagaaagctcagctcgaaccatga

SEQ ID NO: 126135 - DNA, 510 bp, Homo sapiens
tcagatggacagccaggaaagtgggctttccacacagatgatataatacagtacttccaaaggcatgcctatgcggaagtctgatttgttggatgaactaaagtcattcagaccagaatatgcaggtgtctgtagaacggagtaacctccgtgtgcggttgtatgcctgctgtggattgctgctgtgtactgcttatccacaacattttgcgcaccgttatgtggacaaaatacctggttacccaagccgtgccggcacgttaaccgggctgcatccaatgcaagtgtgtcgctgtcgacggtgaccctgttttcccgcctttcttgaccacaaagaaaggggtccgagctgctggattctagtggtcctctaccagcatccccatcattgcctttgtgctcaggggtgagtcctagagctggcctgggttctgcatggccgaagattccattccttggaatccgtgaggccaagaaccccaggtcagagaacacgaggcttaccaccat

SEQ ID NO: 126136 - DNA, 6040 bp, Homo sapiens
ttttttttttttttttataaatatatgtatatattttatttacattatatacatggcatatctatacagttacatttacacttgacttagagtcaaagtcatatacacacacacaggacttggactcaaagcttttaatgacaagcatgcaaaatttcttagtatagaccctaagagtacccttaatataagtatgtttatttaaaaattctatgtatctactactgttaccagggggtccttgctcccagagctcccaagatggtggcaggccacttccaaaatggtggcaagcctcatgttctctgacctggggttcttggcctcacagattccaaggaatggaatcttgggccatgcggtgagtgttatagctctattagaagccatggatcacagaagagaaccgtggaacccagcaactagtgttcagctcaattgggacgaacccaaggacttagctgcgcaggaacaatggaccctcagctgcaggtctgttggagtttgctggaggtccactccagaccctgtttgcctgggtatcagcagtggaggctgcaaaacagcggatattggtgagcagcaaatgttgctgcctgatcgttcctctggaatttttgtctcagaggagtacccggccatttggaaatgcagaaatcacccgtcttctgtgtcactcatgctgggagctctagactggagatgttcctattcggccatcttggtaaaccgaatccagcagcatatcaaaaagcttatccgcgatgatcaagtgggcttcatccctgggatgcaaggctggttcaccatatgcaaatcaataaacgtaatccggcatataaacagaaccaaagacaaaaaccacatgattatctcaatagatgcagaaaaagcctttgacaaaattcaacaacgcttcatgctaaaaactctcaataaattagtgttggaagttctggccagggcaatctggcaggagaaggaaataaggggtattcaattaggaaaagaggaagtcaaattgtccctgtttgcagatgacatgattgtatatctagaaaaccccatcgtctcagcccaaaatcgccttaagctgataggcaaattcagcaaagtctcaggatacaaaatcaatgtgcaaaaatcacaagcattcttatacaccaataacagacaaacagagagtgaaatcatgagtgaactcccattcactattgctttaaagaggatgaaatacctaggaatccaacttacaagggatgtgaaggacctcttcaaggaaaactacgaaccactgctcaatgaaataaaagaggatacaaacaaatggaagaacattccatgctcatgggtagaaagaatcaatatcatgaaaaaggccatactgcccaaggtaatttatagattcaatgccatccccatcaagttaccaatgactttcttcacggaattggaaaaaactactttaaagttcatatggaatcaaaaaagagcccacatcaccaagtcaatcctaagccaaaagaacaaagctggaggcatcacactacctgacttcaaactacactacaaggctgcagtaaccaaaacagcatgggctggaaacaggattgttgaaatactccctgaacatctgaaagagtttcagtcccttgaaactttggaccttagcagcaacaatatttcagagctccaaactgcatttccagccctacagctcaaatatctcgaattgaaccgaaacaagattaaaaatgtagatggactgacattccaaggccttggtgctctgaagtctctgaaaatgcaaagaaatggagtaacgaaacttatggatggagctttttgggggctgagcaacatggaaattttgcagctggaccataacaacctaacagagattaccaaaggctggctttacggcttgctgatgctgcaggaacttcatctcagccaaaatgccatcaacaggatcagccctgatgcctgggagttctgccagaagctcagtgagctggacctaactttcaatcacttatcaaggttagatgattcaagcttccttggcctaagcttactaaatacactgcacattgggaacaacagagtcagctacattgctgattgtgccttccgggggctttccagtttaaagactttgatactccaaggaaatcggatccgttctattactaaaaaagccttcactggtttggatgcattggagcatctgcatttaaatacatcaagccttttgtgcgattgccagctaaaatggctcccacagtgggtggcggaaaacaactttcagagctttgtaaatgccagttgtgcccatcctcagctgctaaaaggaagaagcatttttgctgttagcccagatggctttgtgtgtgatgattttcccaaaccccagatcacggttcagccagaaacacagtcggcaataaaaggttccaatttgagtttcatctgctcagctgccagcagcagtgattccccaatgacttttgcttggaaaaaagacaatgaactactgcatgatgctgaaatggaaaattatgcacacctccgggcccaaggtggcgaggtgatggagtataccaccatccttcggctgcgcgaggtggaatttgccagtgaggggaaatatcagtgtgtcatctccaatcactttggttcatcctactctgtcaaagccaagcttacagtaaatatgcttccctcattcaccaagacccccatggatctcaccatccgagctggggccatggcacgcttggagtgtgctgctgtggggcacccagccccccagatagcctggcagaaggatgggggcacagacttcccagctgcacgggagagacgcatgcatgtgatgcccgaggatgacgtgttctttatcgtggatgtgaagatagaggacattggggtatacagctgcacagctcagaacagtgcaggaagtatttcagcaaatgcaactctgactgtcctagaaacaccatcatttttgcggccactgttggaccgaactgtaaccaagggagaaacagccgtcctacagtgcattgctggaggaagccctccccctaaactgaactggaccaaagatgatagcccattggtggtaaccgagaggcacttttttgcagcaggcaatcagcttctgattattgtggactcagatgtcagtgatgctgggaaatacacatgtgagatgtctaacacccttggcactgagagaggaaacgtgcgcctcagtgtgatccccactccaacctgcgactcccctcagatgacagccccatcgttagacgatgacggatgggccactgtgggtgtcgtgatcatagccgtggtttgctgtgtggtgggcacgtcactcgtgtgggtggtcatcatataccacacaaggcggaggaatgaagattgcagcattaccaacacagatgagaccaacttgccagcagatattcctagttatttgtcatctcagggaacgttagctgacaggcaggatgggtacgtgtcttcagaaagtggaagccaccaccagtttgtcacatcttcaggtgctggatttttcttaccacaacatgacagtagtgggacctgccatattgacaatagcagtgaagctgatgtggaagctgccacagatctgttcctttgtccgtttttgggatccacaggccctatgtatttgaagggaaatgtgtatggctcagatccttttgaaacatatcatacaggtacctttggaaaagctctcaggagacctcacctagatgcctattcaagctttggacagccatcagattgtcagccaagagccttttatttgaaagctcattcttccccagacttggactctggtggttttatgattgccttgtggtaccacgggactcttagtccagaaccagcttttgtattaaaagctagggatgatgtaggtacctgtcatagtcatagagctggccagcattggctcaagtactacctccttcaagcacttgcagaaggaaatgtggtgccggagcccccacacagagttccccctggggcaccacctactggagctgcgagaagagagctactgtcctccaatcctcagaatggtagatccactgacagcttgcgctctgtgcctgcaaaagccgcagacactcaatgccaatctgtgaaagcagccaggagggaggctgtaccctgcaaagtcacagggccggagctgcccaaggccacaggagcctatctcttgcatcagtgtgacctggatatgagacatggagtcaaaacagatcattctggagctttaagaattggaggaaaataccgagcacctgtcggccagttaaaaacgattagtgtggccaccggacttaagactcagctttcctatcaaaaacccttcattaaccctgtaacccgccgatgcattcaatctgtagcggcaactgctttgctaacagaagaaagtagaaaagaaacttttagaggaaacctcattgtgaggaaacctcattgcaagcggactttggagcctctggaaaagggaaaagctgggaaaattgaatgcctaatagggcttgcttccagtgtggtctacaaggacactttaaaaaagattgtccaagtagaaataagccaccccctcgtccatgccccttatgccaagggaatcactggaaggcccactgacccaggggatgaagctgtacctaacccttacactctgctttcccaaataccagagaaagcagagtggtttatactcctggaccttaaggatgcccttttcttcatccctgtacatcctgactctcaattcttgtttgcctttgaagatccttcaaactcaacatctcaactcacctggactgttttacccctagcgttcaggaatggcccccatctatttggccaggcatcaacccaagacttgagccagctctcatacctggacactcttgtcctttggcatgtggatgatttacttttagctgcctgttcagaaaccttgtgccatcaagccacccaagcactcttaaatttcctcactacctgtggttacaaggtttccaaaccaaaggctcaactctgctcacagcaggttaaatacttagggctaaaattacccaaaggcaccagggcccccagtgaggaatgtatccagcctatactggcttatcctcatcccaaaaccctaaagcaactaagagcgttccttggcataacaggtttctgccgaatatggattcccagcatactcactgctaaaggagacttgtggctgtcagataaccatttacttaaatatcaggttctattacttgaagggccagtgctgcaactgcgcacttgtgcaactcttaacccagccacatttcttccagacaatgaagaaaagatagaacataactgtcaacaagtaattgctcaaacctacgccactcgaggggaccttttagaggttcccttgactgatcccgacctcaacttgtatactgatggaagttcctttgtacaaaaaggacttcaaaaagcgggatatgcagtggtcagtgataatggaatacttgaaagtaatcccttcactccaggaactagcactcagctggcagaactggtagccctcacttgggcactagaattcggagaaggaaaaagggtaaatataaatacaggctctaagtatgcttacctagtcctccatgcccatgcatcaatatggagagaaagggaattcctaacttccgagggaacacctatcaaacatcaggaagccattaggagattattattggttgtacagaaacctgaagaggtggcagtcttacactgctggggtcatccgaaaggaaaggaaagggaaatagaagggaactgccaagcggatattgaagccaaaagagcctcaaggcaggaccctccattagaaatgcttatagaaagacacctagtatggggtaatcccctctgggaaaccaacccccagtactcagcagaagaaatagaatggggaacctcatga

SEQ ID NO: 126137 - DNA, 4535 bp, Homo sapiens
atgcagtgggaagaggctgagaaagacccttctggcagttgtgtgttccagcggcctcctgtggcccttgtcttccccctacactccaagtggacgttggtgaacagcccaccaagctcaggcgatccctacgtgccaggacgaccagcacagtcaggacagctttccctcagccctgcacctccatatgttcttcctggccccgggaaaataaagcaagcaggcaacaacccatcactgacaagcatctaccgttcagaagtcttctgtgcccaccgccacctccaccccccgcagctggtgtgtgcccgtggacacattggatcagcgcatctcagtgtggacaggggcagcctcatctgggaagtgttagaaagcacagtctgggcgcgcaccaatgagtggagtccagtgacccggacggttctcatttcagctttggcatctacacacattccacagccctgcgagtctcgtccacccgtccctccagaatatgaggtgacagtccttcggagtcaaggcactgctcagctcccgccctggtcctcttccaccagctggaggctgacagatccttcctgcccaaaacatgctgcctggctgactgaccttgcctccagcaaaggcccagcggctggtggaactggctccttctcccagccaggcaccttgacatccacaagaacaaatcctcttaagaaagaaaaaagtcccgaggacttaaagcaaattaaaatagacctaggtaaattctcagataaccctgatggctatattgatgttttacaagggttaggacaatcctttgatctgacatggagagatataatgttactgctaaatcagacactaaccccaaatgaaaaagtgccaccattactgcagcctgagagtttggcgatctctggtatctcagtcagagatcaggaggagcaggcagaacaggacaaacaggataaaaaaaaggccatcactttagtcatggccctcaggcaagtggactttggaggctctgtaaaagggaaaagctgggcaaatcgaatgcctaatagggcttacttccagtgcggtctacaaggacactttaaaaaagattgtccaagtagaaagccccaggtatgcttgaccattgagagccaagaggttaactgtctcctggacgccggtgcggccttctcagtcttactctcctgtcccggacaactgtcctccagatctgtcactatccgaggggtcctaggacagccagtcactagatacttcttccagccactaagttgtgactggggagctttacccttttcacatgctttcctaattatgcctgaaagcctcactcccttgttagagagagagattctagtaaaagcaggggccattatacacctgaacataggagaaggaacacccatttgtcgtctcctgtttgaggaaggaattagtcctgaagtctgggcaacagaaggacaatatggacaagcaaagaatgcccattttgtccaagttaaactaaaggattccacctcctttccctatcaaaggcagtaccccctcagacccgaggcccaacaaagactccaaaagattgttaaggacctaaaagcccaaggcctagtaaaaccatacagtagcccctgcaatactccaattttaggagtacagaaacccaaaagacagtggaggttagtgcaagatctcaggattatcaatgaggctgtttttcctctatacccagctatacctagcccttatactctgctttcccaaataccagaggaagcagagtggtttacagtcctggatcttaaggatgcctttttctgcatccctgtacatcctgactctcaattcttgtttgcatttgaagatccttcaaacccaacatctcaactcacctggactgttttaccccaagggttcagggatagtccccatctatttggccaggcattagcccaagacttgagccagttctcatacctggacactcctgtccttcagtgcatggatgatttacttttagctgcccgttcagaaaccttgtgccatcaagccacccaagcgctcttaaatttcctcactacctgtggctacaaggtttccaaaccaaaggctcagctctgctcacagcaggttaaatgcttagggctaaaattatccaaagtcaccagggccctcagtgaggaacgtatccagcctatactggcttatccttatcccaaaaccctaaagcaactaagagggttccttggcataacaggtttctgccgaatatggattcccaggtacggcaaaatagccagaccgttatatacgctaattaaggaaactcagaaagccaatacccatttagtaagatggacacctgaagcagaagcagctttccatgccctaaagaaggccctaatgcaagccccagtgctaagcttgctaacggggcaagacttttcctcatatgtcacaaaaaacaaacaaacaaagaaaaaaaaaaacatgaatagctctaagagtccttgcgctggtctgagggacgagtttgcaacccgtggcatacctgataaggaaattgatgtagtggcaaagggtcagcctcattgtttacgggtagtggtggcagtagcagtcttagtatctgaagcagttaaaataatacagggaagaaatcttactgtgtggacatctcatgatgtgaatggcatactcactgctaaaggagacttgtggctgtcagacaaccatttacttaaatatcaggctctattacttgaagggccaatgctgcgactgtgcacttgtgcagctcttaacctggacacatttcttccacacaatgaagaaaagatagaacataactgtcaacaagtaattgctcaaacctatgccactcgaggggaccatttagaggttcccttgactgatcccaaccctaacttgtatactgatggaagatcctttgtagaaaaaggacttcaaaaagtggggtatgcagtagtcagtgataatggaatacttgaaagtaatcccctcactccaggaactagtgctcagctggcaaaactcactcgggcactagaattaggagaaggaaaaagggtaaatatatatacagactctaagtatgcttacctagtcctccatgcccatgcagtaatatggagagaaagggaattcctaacttctgagggaacacctatcaaacatcaggaagccattagggaattattattggccgtacagaaacctaaagaggtggcagtcttacactgccggggtcatcagaaaggaaaggaaagggaaatagaaaggaaccgccaagcagatattgaagccaaaagagctgcaaggcaggaccctccattagaaatgcttatagaaggacccctagtatggggtaatcccctctgggaaaccaagccccagtattcagaagaagaaatagaatggggaatctcacgaggacatagttttctcccctcaggatggcaagccaccgaacaaggaaaaatacctttgcctgcagctaaccaatggaaattacttaaaaccactcaccaaaactttcacttatgcattgatagcacccatcagatggccaaattgttatttactggaccaggacttttcaaaactctcaagcagatagttggggcctgtgaagtgtgccaaataaataatcccctgccttatcaccaagctcctccaggagagcaaagaacaggccattactcaggagaagactggcaactagattttacccacatgcccaaatctcagggatttcagtatctactagtctgggtagatattttcactggttgggcagaggccttcccttgtaggacagaaaaggaccaagatgtaataaaggcactaattcatgaaataattcccagattcggacttccccgaggcttacagagtgacaatggccccgttttcaaggctacagtaacccagggagtatcccaggcattaggcatacaatatcacttacactgcgcctggaggccacaatcctcaggaaaagtcaagaaaatgaatgaagcactcaaacgacatttaaaaaagctaacccaagaaacccaccttgcatggcctgctctgttgcctacagccttactaagaatccaaaactctccccaaaaagcaggacttagcccatacaaaatgctgtatggatggcccttcctaaccaaggaccttgtgcttgaccgagagatggccagcttagttgcagacatcacctccttggccaaatatcaacaagttcttaaaacattacagggaacctgttcccgagaagagggaaagtaattattgcaccctggtgacatggtatttaaaatagagccccagatgcagtccatggctaagatctaccacggacccctggaccggcctgctagcccatgctctgatgttgatgacattgaaggcacggcttccgaggaaatctcaactgcacgacccctactacaccccaatttagcgggaagcaattagagcagtcattggccaacctccccaacagc

SEQ ID NO: 126138 - DNA, 992 bp, Homo sapiens
ctatttcactctattaaatcttgcaactgcacactcttctggtctgtgtttgttacggctcgagctgagctttcactcgctgtccacccctgctgtttgccgctgtcacagacccgccgctgtcacagacccaccgctgactgccatccctccagatctggaagggtgtccgctgtgcttctgatccagcgaggcacccattgccactcctgattgggctaaaggcttgcccttgttcctgcatggctaagggcccagggttcatcctaatcgagctgaacactagtcactgggttccacagttctcttccgtgacccatgacttctactagagctaacagagctataacactcaccgcatggcccaaggttccgttccttgtaatccgtgaggccaagaaccccaggtcagagaacaaaaggcttgccaccatcttggaagcggcccgtcgccatcttggaagcggcttgccaccatcttgggagctctgtgcacaaggacaccctggcatctaggctatcaacccacttatccctctgcaatagcaatctccaagccttggctccttggccagggccttagaactgatgacccagtactatgggtctacaacaacataatagaacaggataaaagcaaattgacaatatggagagaaagggaattcctaacttccgagggaacacctatcaaacatcaggaagcctttaggagattactactggctgtacagaaacctcaagaggtggcagtcttatgctgccagggtcatcagaaaggaaacgaaagggaaatagaagtgaactgccaagcggatattgaagccaaaagagccgcaaggcaggaccctccattagaaatgcttacagaaggacccctagaaatcatagaagaacacattgataagatgtcaaaaagatcaaagcagctgaaatatggagccaacacatggaagaaaactgtccgcagattcatccatacccatagctga

SEQ ID NO: 126139 - DNA, 550 bp, Homo sapiens
ccactgcaagaggggaagttgctactgtgatgaattctgccatgtggcaccagactgccacccagaccacagtgtcctctgcaaccctggtaactcacatacaggcccgattccaccgacagcaaagctggatgctatggctggcagaggcaaaccctttgcctgcacttcaggccaaagccgggatgtggcctagatggttcctaaggtccctgacaatcctgagatcttgcatcttgtctatttcagggcaaagcttctcacatgaccaagatggtgctgcagatggtgctgaggatggagaacccaccaagccccgctaggagccacctagactggatgcagagcatgctttacaaagggaagccccacaaaaggacacaggtggcaaatccggggacctggatgctgggtcaccgacttcatgttcttgctgacttcctggcctcggttttcttctccttaaggctgggtgaatggaatgagtttagatccctggacctccaggccctcctgtgccccggggtggccctgcttcacagggatgccc

SEQ ID NO: 126140 - DNA, 863 bp, Homo sapiens
  misc_feature (1)...(863): n = a,t,c or g
gggcagaagtcagcaaactatggtctatgggccaaatctggccactgcctgtttttgtgcaactcataggctaagaatgttttctacatttttagatggtaggagaagaacaaaagaggaagaatgttttgtcacaaaagtatatgagattcaaatttcagtgtccacagacggcaatcctggctcctacccctaaaacaatcattgcagtggagctctgccctagctacggcccctttcttcttttggttccctgactttggggcctggagggcacaaaggcaaggagcaggctgccatccaccccttctcagagaacctgcagggagctcaccatgctctgcatccagtctaggtggctcctagcggggcttggtgggttctccatcctcagcaccatctgcagcaccatcttggtcatctgagaagctgagagaaacacaaggtaaatgttccctgtccctcattttctgccctcccnaacccccactgctgctgcctcaatgtcccccagtatctctctgcagactccctgtgtgccctcaaaagtctacacggtaccagtcaagagacatccatactgcaagatgatagaaaggtaagtggaacccaaccacctcactctctaccctcatgtctaccacggacagctgaacctctccctgtggaacctggaaaagtagctcagagaggagtagcaggtggcaaggaacatcagggaaacaaagctagaaggagcatgtaggcacctttgacctgaaatagacaagatgcaagatctcaggattgtcagggaccttaggaaccatctaggccacatcccggctttggcctgaagtgcaggcaaagggtttgccacgaaa

SEQ ID NO: 126141 - DNA, 664 bp, Homo sapiens
tttttttttttatgtttcacaatttgtatggctgattctacgcacatttaaatgtgtttatcgacaattgtagatttcggttttcctctggttaaaccaatgtggaagtacacaggatgggagctgagagacaagcatcctgggcccagccatgctgccatcagtgggccaagctggggacagatgacctctgctccgtggatcctgctggctcagggtggggaaggggcctcaggagaggagtcaggctctcttctttattctccttacagcccatggaagaatggcaattcctggggaagctggtttggagaactcgctgaaccatgctctgcatccagtctaaggtgggctcctagcgggggcttggtgggttctccatcctcagcaccatctgcagcaccatcttggtcatgtgagaagctgagagaaacacaaggtaaatgttcctgtcctcatttatgcctcccaaccccactgctgctgctcaatgtccccagtatctctatgcagactcctgtgtgccctcaaaagtctacgcggtaccagtcaagagacatccatactgcaagatgatagaaaggtaagtggaacccaaccacctcactctctaccctcatgtctaccacggacagcatgaacctctccctgggaggctggttgg

SEQ ID NO: 126142 - DNA, 2049 bp, Homo sapiens
atggctgcaaacaggaaggattttattcaccgtcgatgcggccccgagttgtcccaaagcgaggcagtgccccaaggtctatgcagagcagaacgcagctccgccctcgcaatgctctccgggtctgtgccgaggagaacgcagctccgcccttgcaaaggcacacagcgccggtgccggcgtggcggagaagcggacagcggcggagaggcggtcggcggcggcgcggcggagaggcggtcggcggcggcgcggcggagaggcggtcggcggcggggcggcggagaggcggtcggcggcggcgcggcggagaggcggtcggcggcggcgcggcggaggcgaggcgggcggcggcggcgcggcggaggcgaggcgggcggcggcggcgcggcggaggcgaggcgggcggcggcggcgaggcgggcggcggcggcgaggcgggcggcggcggcgcggcgggcggcggcggcgcggcgggcggcggcggcgcggcggatagcggagagcggcggagaggcgcacagccgcggagaggcgcacagcggcggagaggcgcacagcggcggcgcaggcgcggagaggcgcaggcccaggctccactccccagctctgaaaactcatcctggtcagagttcagaaggacatgtggagtataagctgaatcacgtagaatttgaagatcaagatgatgaagccagagttcagtatgagggttttcgacctgggatgtatgtccgcgttgagattgaaaatgttccctgtgaatttgtgcagaactttgaccccctttaccccattatcctgggtggcttgggcaacagtgagggaaatgttggacatgtgcagatgcgtctgaagaaacatctctggtataagaaaatcctcaagtcccaagatccaatcatattttctgtagggtggaggaggtttcagaccatcctgctctattatatcgaagaccacaatggaagacaaaggcttctaaagtatacgccacagcatatccattgtggagccgccttttgggatattgtcttcatgcgaacttggtatcctgtttccatcccagccttctataacccagtaacatctttgttgaaaccagtgggtgagaaagacacctggtcaggaatgtggaccacgggccaactcaggctcgcccatggtgtcagactaaagacaaacaaggactctctgtataagtggtgggacacagcagcatctcagtctctgaaaggccaggcacagcatcagcaaggaccccagaatggtggagcactactgtggcttgagccctcgggggcagggaccagtacagcaactacttctctccctggggaggcagatatttccttttccaccatagtcctcaaagcactccaaatgtccaattgcaaatcctacaaaaagagtgtttcaaaactgctcaatcgaaggactcaaagggctcctaatgtgcacttgcagattctacaaaaagagtgtttaaacctgctcaatcaaaagaaatgttcaacccggcctcaaagcgaacaaaatgtccgcttgcagattctacaaaaagagtgtttccaaactgctcaaccaaaaggcaggagtgtgtgcttcttcccagcaaaggcagaggcagggcctacagaaactgtgcccgcagcctatagtgatggggtctatgaggtaattcaggcagatgaggcagacatttcttctgcctccaggatggaggtagagaatcttggccttggaccacgcactgtggaccatgctgggctgccgtggacagtgacggactcatgttctcaccaggatccccaaaataggcccctgaaaaaaatgttaccatcagggcaagttgctttggcagatatcattctcattaataaaacagacttggttccagaagaagatgtaaagaaattaagaacgacaattaggagccgctcatctgctggcagaggtagccgaagaatgccctttagtgtaagtcctctacaaccatacaccaaatgtgctccctgcatttcaaattccattgtagaaagtctctga

SEQ ID NO: 126143 - DNA, 1803 bp, Homo sapiens
atggagaacagtatggaggttcctcaaaaaagtaaaaatagaactaccatgtggtccagcaatttctttactggatatatatccaaaataaaggaaattaatgtatcaaagacatatctacatgccgatgtgtactgcagcgctattcacaatagacaaaatatggaatcaacgcagacagtaatccagataaataaatgcaagggcaaattaggggaaaaattggaatggagagctcagaatgtggccccagagaagggcagagggaaaggggacccagttcagaatctcgacacaagaatcagggagcacaccctgatggtaacatttttttcaggggcctattttggggaccctggtgagaacctgagtccgtcactgaccatggcagcccagcatggtccccagccctacatgtctgtgggatccctgcgtgaccaggtgatctacccggactcagtggaggacatgcgaaggaagggctactcggagcaggacctggaagccatcctggatatcgtgcacccacaccacatcctgcagtgggagggagcccccactgctgggtgcgagatggccctgggcaaggacctcgccttgctggagctccccttcatggttcaagggcacaggcaccaagccctccctcggtggcaacatgagaaaaagtggctcctgcaggaaatgaccagggtgttgtcacctgcctgtggaggaagcgggaacacaggttgggaggctatgtgtgactggaaggacatcctgccaggtggtgagaagcagagaatcggcatggcccgcatgttctaccacaggcccaagtacgccctcctggatgaaggcaccagtgccgccatgagaatcaacgtggaaggcaagatcttccaggcggccaaggacgcaggcattgccctgctctccatcacccaccagccctcctgtggtagggagtaccacacacacttgctacagttcgatggggagggtggctggaagttcgagaagctaggctcggctgcccgcctgagcctgacagaggagaagcagcggctggagcagcagctggcgggcattcccaagatgcagcggcacctccaggagctctgccaaatcctgggcgaggccgtggccccagcgcacgtgccggcacctagcccgcaaggccctggtggactccaggcccggcatctctgtcctgcagaccaaacacaaaactcattgccatccctcttcaacctggcttcctttctgacttcccttcaggtgccccaggcagaaccatggggatcatctgaccctctgtctgcctcatccttccctatcccaccagtccatgtcctactgactcagtccttaaagtccctctcgctccccaccggatcctcagtgtctggtagtacggcgcctgacatgggagcccttactctcctttcacggaaaggtcgcagccggtggccctaccggcagacaggtgcagagccccaggttaccatgcagcagcctgctgttcatgtaaaaggtcaagaacctttgacttccatgatggcatcttttcctcctcaaaagcaaaaggaaacgagtgaatggctgtttcctttttcttcaagccacgccctagtcgggctggtaaaatcattggcatgttggtggagatgggtaattaaaaactccttcataagcctggaatctccagatcctctctatactaaggtggacaaaggtatagctgtactacaagagccccaagctaaagaggctgcccaaaaagcagttaatggtgccactggtgttccaattgtttaa

SEQ ID NO: 126144 - DNA, 516 bp, Homo sapiens
atgaaatctacttctggtgaagatgctgtgaacattattgaaatgacaacaaaggatttagaatactacataaactcagttgatacggcagcaccagggtttgagagaactgaatgtaattttgaaagaagttctactggagggacgctacagacacttccccggcccctaccgctgaggcacttccgcttccgccgccgctcgcatatttccggagtgttgtcatccggggctggagcctcaaacccgtgtccatattgtgtgtgtgaagaagcatcgaagcgcggcagccatgttcagcgtggcatttcggaaggcttgtcaggggtggagaagcggggcgggttgctgttctttcacctgacactaaagcgccatgccggaagcactgagtctgatacgtcggaaccagtctccaccgtgtggtttggtcttgatttccactggtactctggggtcttggataagtctctggacctcgcctttgtcatttgcgaagtcgataggttccaatag

SEQ ID NO: 126145 - DNA, 384 bp, Homo sapiens
atggatgcggtgaacagggaacacttctacactgctggtgggaatgcaaacaagtacaaccaccatggaaaacgtaatcatcaatcaaggagagaaacttccagctcatatgccgaagtggctgatttcctggtgcaccgtgatgaggacgtggaactgcatgtgggtagatgggaaggagggcaagagcaaatcctggtgtctacaatagcagggggtgctgaggaccccctctcaccaccctcagtcaaagataatgaagaaggccaacagcaaaaactcaatgactacacatgtgcccaagaagatgggcagatggaaactgatgaaaatatgacggacatgcaccaaggggtatacagcccccaccttgcggatatctga

SEQ ID NO: 126146 - DNA, 3336 bp, Homo sapiens
atgaggccaagagacatatggtcctgttctcctgaggctgcagtctacgcggagctgaaggatcccagccggcaccaaggacagcagcagcagcgtggtgactcctcgttcctgagctgctgtagtgagagggcagactccgcgagcagcggctacctggtcctcttggctctgcaccgctttctccccctggtaactgtgcactggggaaagggaaatgatcagacatttcggggactactggacactggctctgagctgatattgattccagggcacccaaaatgtcattgtggtcctccagttaaagtaggggcttatggaggtcagaagacagatgaatcttggagaatgtcagtggattatcgtaagcttaaccaagtggtgactccaattgcagctgctgtactagatgtggtttcattgctcgagcaaattaacacatcttctggtacctggtacgtggtcattgacttggcaagtgcctttttctccattcctgtccataaggcccgccagaagcaatttgcctgcagctggctgggacagcaatatacctttactgtcctaccccagaggtatatctattctctggctttgagtcataatcttattcggagagaccttgatcgctttttgcttccacaagatatcacattggtccattacattgatgacattatgctgattggatccagtgagcaagaagtagcaaatgcagtggacttattgaaagggatgtttgcaataagtcagaaagttgaggcatgtcgaagaattgtctgtgaaagtcgtgaaagaaaaaaaatgtgctataaaaagcaacttatgcaagaaatgctgtataatttcaaagtaattaggcctcctgaatgtaaaactattgaagaaacagtttatatgcaagagagcccagttgaacataactgtgtagaggtgttggactcagtttattctagcaggcccgacctccgagaccatctttggacatcagtagactgggagctgtacgtggacgggagcagcttcatcaacccacaaggagagaggtgtgcgggatatgcggtggtaatcctggatgctgtcattgaagccaaatcattgccccagggcacttcagcccagaaggccgaactcattgctttaatttgggccttagagctgagtgaaggtccaaccgtcctgtctggcatacaagcttatggagaagccccctttgaagatctcaatatagacttcaccaagatgcccaaatgtggcagtaacaagtatttgctagttccagtgtgtacatactctgggtgggtggaggcctatccaacacgaaccaagaaagctcgtgttcttctccgagatctcatcgctaggtttggactgcccttatggatcggctcagaaaatgggccggcgtttgtggctgacttggtacagaagacagcaaaggtgatgagtgtggatcaaagactggaacgtagcccccttgcagccacggtggaaaggaccccagactgtcatcttgaccactcccacagctgtgaaggtagagggaatcccagcctgggtccaccacagctgcgtaaaacctgcagcaccggagacctggtaggtacttttggggaatgtgattcagaggtcgatgtgctacactggtccaggtacaactgcttcctgctgtatcagatggggaccttctccaccttcctggagctactccacatggaaattgacaacagccaggcctgtagcagtgcccttcggaaaccagctgtctccatagctgatagcacagagctcagggtgctgctgagtgttatgtacctaatggtggaaaatattcgcctggagcgagagacagacccctgtgggtggagaacagcccgggagaccttccgcactgaattaagcttctccatgcataatgaggagccttttgcccttttactcttctccatggttaccaagttctgcagtggcctggctcctcacttccccataaagaaggtcctgctcctgctctggaaggtggtcatgtttaccctcggtggatttgagcatctgcagactctcaaagtacagaagcgggcagaattgggcctgcctccactggctgaagacagtatccaggtggtgaagagcatgcgtgctgcctccccgccctcttacactcttgacctgggagagtctcagctggcacccccaccctccaagctgcgaggccgccgtggctctcgaaggcaactcctcactaagcaggacagcctggacatctacaatgaaagggatctcttcaagactgaggagcccgccacagaggaggaagaggagtctgctggtgatggagaacgaaccttggatggagagctagacctgctagagcaggaccctctggtgccacctccaccctcacaggcacccctctctgctgagcgggtggcttttcccaagggcctgcctgggccccaaagacagaaggacattgagcacttcttggagatgagcaggaacaagttcatcggattcaccctggggcaggacacagatacattggttggattacccaggcccatccatgagagtgtgaagaccctaaagcagcacaagtatatctccatcgcagatgtgcagatcaagaatgaagaggagctggagaagtgccctatgtctttgggggaagaggtggtaccagagacgccatgtgaaatcctctaccagggaatgctgtacagccttccgcagtatatgggctctgtggactgtcccactctggagtttgagtatggagatgcagatgggcatgcagccgagttgtcagaattgtatagttacactgagaacctggaattcaccaataacaggaggtgctttgaagaagatttcaagactcaagtgtttaaatcggcaccaatcttaaagcgggccctcaaggtcaaacaggccatgctgcaactttatgtcctaaagctactaaagttacagaccaagtacctggggcgccaatggaggaaaagcaacatgaaaaccatgtcagccatttaccagaaagtgcgtcaccgcatgaacgatgactgggcttacgggaatgacatcgatgccagaccatgggacttccaagcagaagaatgtaccttgagggccaacattgaggcttttaacagccgtcgctatgacagaccccaggactctgagttttcacctgtggataactgcttgcagagcgtactggggcagaggttggatctgcctgaagatttccactattcatatgagctctggctcgagagagagatcaatgctaaggctttcttccgtgcaaaggctgaagatccatttggttga

SEQ ID NO: 126147 - DNA, 363 bp, Homo sapiens
atggccctcattgacgtgggcttcgtgggtgagaaacgggctgatgggtcgcctctttcagggcagttgttcactattccagggaggagggccaagctggcagtgggcaacatgatctatgcatattacccagagctctccattcatgggctctactgcagtctctgtctccccagtgccgagctccctgatgattttccaaatggacagtctcctgggctccacaagactgagttcctgattccagaagagctgaaaaaatgccagcaactcttgaattatgtgaaggaggggcacacgcaggtggcttcccatgtgcagaggctgtttatggagtgtgcaggattcagcccagaagtgtga

SEQ ID NO: 126148 - DNA, 5030 bp, Homo sapiens
ccatgttaagaatattttatttgttttttgagattacatagtcattattgctgatctaatacaatcacttagacataaagatttccaagaacttctcagaaatggtgatctttagaagtgttattcctttcagtaagatgacagaactagatgattacgtatatagatatatagatatatatatatatatgtatatatagagtttagaacctgtccacatataatttgctggtgttgcctattttccttccgtaattttcctttattgaaaaagcttaatgcaacaatgcattttgattcctttttaaaaaccacggcaaagttaattttgagaaaaccacaggagcagcaatatcagatctgtttagagaaaagcgaagcagcataaaagctttgcaggagtatgtggccatggggagccgtgctcatatgggcaagtaggatagggagggaggagagcagagggaaggtagagtagatacattttttttctttgtttaaatgaaaaaaagaaaactgaatatctccattaagaaggcaaaaaagtgccaggcacggtagcacacacctgtggttccagctactcaggaagctgaggcaggaggattgcttgagcccaggagtttgagaccagcctgggcaacatagtgaaaccctgtctctaagggtgaaaagaaaagaaagaaagaaggcaaaatattagcacagattcattgtagagaaaatgttatgtatcctcacagactggagccacatacaaagagataagtagccttctttcccatgcttccagataaccaggatgcatctaaggtaagaggttggaggaaagaagacacattgctctgattccaagggtagagggaataatgaccagatttcaaccctaagatagaacccaaatacttgggaggcttgtggttctttcttcttaatggttgataacacagtgtccctacagagaggtcatctgaaactcagaggcaaataactcatcatgggcagcaacactggcaacctaacttagaagccccgtgtggccccttttttatttggagtgggtctcttcactacagcaaggcagaatgtactctttaagtaccagcacatagtaagctccagagagcaaggctttgctgagaaacagcaggttatgatttttggtctaagaatacaataggctagagaccatctatctgccaaatggaatctgctctggatataagataaggtacaaagatctgaatcccttgctaaagggaaccaattaatacaaaaatcaggactaggtaggcaaaaggaagaactgaatggcttagtggaatttttagcatttatgatcttccttacaaaaaaagaatataaccagtacttgctgagacatatggcctctgaagaactgtagtctatgggctgagcctgtatactattaaatgaggcaaacagtcatttaccaaagttccacttccctacttccgaaagtaaggtcactttcagactagctttgagagtatatgtgaagaccaggagaagttggagagggtagaggtagaagaagagaatcaggatgggaaggttttggtgatcatgcgtggtctggtgttatcttgagtcaccttggtcttgagactttgaggcagaccagcataggaaaaaagtgggaaacaaacaaacctgagagtgttaaaaaggatcggtaaggggaagaggcttatttaattcaagtttcctagggccagtccagactaactcttagaaccaatctggtcctaatgaaatgcctgagaccaacagatcagtctccaaaaggaatccaatttttgggtgggacataaaatgtcacgctgcccacaccacattactaattctttttgtagcactggagttactcaagaaactgactctgaaatacagaatcatcaaatggaagaggttaaatcataaaagatatgccagcagagaagtccacagatcagactgcagatctcggtttcatccatggcaatggccaaaggaatgaatgtctgacgaggttcaaactagtcaaattagctttgataatctggatacagtttacaatttcatctctgtatccctcagccagtcaaactgcaatggccttcctgggaaacaaataaatatactctgctttgttagggtatcaagctgtgagtctgaaagacctgtcccatttccaaagcctatccccctaagtccctggaaaagtatgcctttccctactcagtttcagacgtagctttaggcaatagcaggaagtttcaggaagcagtgtttcacaacaagctctccttttctgagatagtgccaatctggaggggcttccttggaaactatccaatcaaatgacaaggaagtaaaactatgggtcccagtggagctggccccacttcctgagcagacgttggctggattagaaagacagcagaacaaatgtctgacaaataccaaaactgtggaggaaataatggaggcacatccctcttgcaaccaggaagtgttaaaatggacataaatattcaaggagaagaaaggagtcctgggtaagaaaggagacccctggtaggcacagcacagctgagttcttgatgtagcttggcaaagccataaataacactccttccttattagcctttatataaagaaggcagtgatagtgatggtcaagattgggaacccaatcttgtgtgaaacactggccatgttaattccaaacggcctcacccggggaagggccaagctgagaaaagcaggtgctgaaaatttattccagaaaactccagggaatagggagtatggaatccctggactaactcgtgagcctggacaagaggaaaaacggccactgctgaggattcagtcaatggggaatgatgcaaatgatgcactgggagcagtaaccccatttctttccttcctcagcccatcctctgtggctttcatggccctcagggcagtaaccacactctgggccaacactacaggcacaggattcttgattttaataaataaataacctaacacacagggtgagcacggcaggcagctttgattggagaagcagcttgctgaattctttcttgtatagtagtggagaaaaggcttggaggttctattccttaaaaattctggtttgagttacaggaacttaatacctgtagtaattaggcttgaagggcccattcttattgagtcccagatacttggcctgttcatctgtcagctctgtcaagtgggcatcaaaggtaggcaggtggtaagctggccacatactcatccatcttcttgggcaacaggtagacatcctgcttatagcgaccctcaggagcattgtaaagctctatcaaggcaagagccttgagtagtagcagtgattgagagcacaaatgtaggcactgtggagcagctaaggttcagcaggcggccctctgccagcagtactatcctcttgccatcaggccatatcacatggtcaacttgagatctcactcgctccccagtcagtttctggtgtccgcagactcgccacgtcaatctctgtgttggaatgtcccatgttacaaacgatgcagctattcttcatacggtccaagtgctctctggttaccacattcttgttacctgtacaggtaataacaatgtccaacttgtcggatgacctcatttaatttcaccagtcgaaatccatccatacaggcttgcagggcacagatggggtcaatttcagttacatacacaatggagcccatggctttcagggcagcacagcaccctttccccacctctccatagccacagactaccacttgctttccaccaaacatcatgtctgttgtccttttaagtccatcaagaattgattcacggcaacagtagaggttgtcaaatttctgtttggtgactgagtcattgacattcatggctggaacacacagcttcccagctttggacagttggtacagcctgtgaactccagtaacactctcctctactatgcccttgattttcttaaacatgttgggatactttttataaatccagtgggtaagatcccctccatcatccaagatcatgtttggctgccagccctccacattcacacatctatcgatacaccaccaaaagtcatcttctgactctcccttccaggcaaaaacaggaaatccactttctgctagagcagcagccacttcattgagagtggaatagatgttgcaggcagcccatcggcactgggcccccagagcacccagagtttccataagcacagcagtctgagcagtgatgtgtgtgcaacccacgattttggctccagccaaaggcttttctccttgagctctcttcctcaaagccatcaatgcaggcatttcttgttcagcaatttcaatttctcttcgtccaaactctgcctgtttgatgttcttaacacagaagtcactgcttcccttagagttcttttgctgcttgtccctgggcgatgtctcatcatcagagctatctgtatatgaagccgctgagctgtagctgtcagtagatgactgagaaatggaacgagacaaagagcgacgtccaattttggtgggacgtttgttgaattcttgcttctggtcagcaaactggatcttcttgactgtgcgcggcgcctcggtgacggtgccgtcggggctgaccagggcctcgccgccgtcgcggtgccgctggtgctggtgatgtgggtcgctccgcttcatggccgacgcctgaggcaccttcccggcggcggggctgagagcggcggcgggccccgagcccgggccggggaccgggggccgctccgcggcgggagctggagcctcagggtctccaccgcccgccgggggggccatggcgcccacggcggccgtgctcagtcctagttgcgactccgcctcggaggggctcaggtccttcagctccacctcaggcaccttggcggcagccgcggctgacacaacctgcaccgacatcaccgcctccgctgcaaccaccggctc

SEQ ID NO: 126149 - DNA, 939 bp, Homo sapiens
atgaggccaagagacatatggtcctgttctcctgaggctgcagtctacgcggagctgaagagtcatggagccttggagattaccctccagccctcagagcagtgtgcagccaaagttggtccctggaagctcgcacacaggcccaacccagaccccgggtcctgcctctatggctgcaggcagatctttgcattttacccagagccctccattcatgggctctactgcagtctctgtctccccagtgccgggggcgtcctgcgcgtcacctgtctgcctcttacattaggactatttatagtttggaatggtagtgagagtaacagtatgatgacccaggacaatgacaacactgatcaaattgacagagcatgtgacatgggctggttctttcatcgcagagtagccgcacagtggggcttgctatggctaatgctgtacttgctgtatgtgttccaggcgagtctgcggacaccagaactgacctgggagcgagtgagatctcaagttgaccatgtgatatggcctgatggcaagaggatagtactgctggcagagggccgcctgctgaaccttagctgctccacagtgcctacatttgtgctctcaatcactgctactactcaggctcttgccttgatagagctttacaatgctcctgagggtcgctataagcaggatgtctacctgttgcccaagaagatggatgagtatgtggccagcctacacctgcctacctttgatgcccacttgacagagctgacagatgaacaggccaagtatctgggactcaacaagaatgggcccttcaagcctaattactacaggtgccttgggctccccagaaatcagggacacctgggcagtgatgagcttcctgcactggaattggtctttgcatccccaaccacatatgcttacatgaactcagaaaaatga

SEQ ID NO: 126150 - DNA, 2594 bp, Homo sapiens
  misc_feature (1)...(2594): n = a,t,c or g
atggagccgatctacagggtactctccagaaagaaaataagcatcaccaacctcctcacaactgacttccactgctgctacgaaaacaccatgggcactaaaaagtcctcagccatgaaaaaaaatgagccaaagaacaacaaagatgtggccttgggctctcttcccaaccacaaggagctatctacctctggggaacaagggaacccagagccagcactcaaggacaaacctggccacacagaggcgggttaccggctaactcttctgtgccacctgcacattcacccagtcctgcagacattctttccaaggaatgtatatgtggaagtcatcatcgatccacgcacagtatttgtccctgcaaatgaggaaactcagagtgctctgggaaagaagtgcttacattcagaagggatccaacaacttccgaaggagcctttgccatttgtgtccaggggcttcctggtatctccgcagctcacacaagacgatcccatcccaagcattgatgcagcctgtgtcaacaaatggatgttgtctctctctctagcccctgatgaacagtgtgctggacctcagttcgacgaggatgacngctactctcctctgccagaaaaagaccccaccccaagccttggtgcagtctgtgtcaacaaatggatgttgttcctctctctcgagcccctgatggagcagtgtgctggacctcagtttgacgaggatgacggggcctcatggcatctcaaagatcacacaagacgaagaccatccttcttggacaagggccttccttccatgccaatgacaccaggaaggtgcagaggaaatgagtgtgcttcagaaagacagacaggcacatctggcggaaaaccaaccaaaacctgtgctggaaggcacctgcccaatgctcagaatgttgcactgatacatgacgtcaaagccagaggtggtcttcccaccctagccaaacgacctcaagaaacagcttcctccgctccattcagtccgcgtaagcacacgtgccctcaggatgcatgaagagaatggctgtttctccaacagcacgtccgcgcctgatgccccaaaagcggagtgttcaagacacaccgcctaacattgtccttgcgctggtcacctcacagggcttccctgcattgacctcagaggcaatgtcccatcgtgcagtcagcttggctgcattcccacccacaacaatgcctgcaagtcaacaccacatcaacaccagcaccagaggaaatgttcctaacctgtgtgtgatgggagactttggcctgtggatgccctgggaggtggaacctatgggaactagtggaagttgtccctcaatcctacagtccccggcagaggcaaatgtgctggacctcagttccgatgagaacgacggatgtagcagaatccaatactggaacatcgccaacacacaaaggcgaggaggcaacccaaatcaagagactctccacggcagtgcccctggtattgcacatgtgttgcctggaatgcacaaggacctccatgaatacgccaagtgtgactggaccccatcggagagtcccaggccagggccagggccagggcacattccctctggacgcctttgggatggaagctgctttcaaagcgggaaatgggatccagagcagtatttgctcacacgagctgcagcaggacctgcccttgaagacccccaatggccaacctgtcatccaccagagaaatccctggaaagcccatcaccaccaaatgacagcccaagaccactgatggcatgcatgtccactccatgtacctgcaccatgtcctcaggacacccaaagggaatggctgcttttcccatgggacatccctgcctaacgccccaaacaccaggcagacaggacacagtgccttccatcatccttgcatcgatcacactcaaaggccttccttgcaccgacctccgacgcaacatcccaccacgcagccaacttggatgcaggaccatcctccccaacacctgctcaacgacatctgacaaccaccaccaggtctacatgcacatggctactaactcaccaagccaaggccagccgcacactcccctaggtctgcatttccacccacttctacagttgccacgacatcacagagcagccaatccccccatgactctcctacttgtatacctcacacagagggaatatttctattgtgcctgtgatgtgagactttcatccatggacgccctgagtggtagaacctctgggaaccagtggaagttgtccctcgctcctacagtccccgggggaggcaatgtgctggacctcagttccgatgagaacgacggatggaagctgctttcaaagcaggaaagaggatccagagccatatttgctcacacgagctgcagcaggtgtggccgctcggcaatggcgggccaagagacgacttccaggaagatgtgcccaacagtggagcccactactctgtcaggaagacgagaagtgaccaagggccacgagcacaagtctgacccttgtattccctggaacctgccctctgacacctctgctggccaacttgtcatccactag

SEQ ID NO: 126151 - DNA, 517 bp, Homo sapiens
gttgggaaatcaagcatcgtgtgtcgatttgtccaggatcactttgaccacaacatcagccctactattggggcatcttttatgaccaaaactgtgctttgtggaaatgacttcacaagttcctcatctgggacactgctggtcaggaacgggccgccagatcccacccttggacccccatgaaaatggaaacaatggaacaatcaaagttgagaagccaaccatgcaagccagccgccggtgctgttgacccaagggccgtggtccacggtacttgaagaagccagagcccacatcctgtgcactgctgaaggaccctacgctcggtggcctggcacctcactttgagaagagtgagcacactggctttgcatcctggaagacctgcagggggcggggcaggaaatgtacctgaaaaggattttagaaaaccctgggaaaacccaccacaccaccacaaaatggcctttagtgtatgaaatgcacatggaggggatgtagttgcatttttgctaaa

SEQ ID NO: 126152 - DNA, 1845 bp, Homo sapiens
tctcaggtgccgattttcttctgatagcttcatcatttctccctgaagtcttttacactcttccattagtttccttgtttcggtatcattaagtgaaacactgtgtggttttggcataggtccatcttgcttagatgcattcagtggaacagctttgctaggttccatatcattcttcaaagaatcgaaagtctgtttgggaacagtgaagtgaacactcagggcatagttatgagagaaatcaggctgtgcagggctgagctcaagagagcaggggctctggaaaggagagatccatgtgggctgaactccaggggcaaagggggcggctggggctcctcccttcctcaaaaaataaaatgtggggccatctaagtctcctctgtgtgacttggctagccacacacacaacgaccgccctagtcgctggggtttttgagctgagtttttggcagctcccagtggtagtctgggaatgtcaccatcctcttggaaagtccgtggtgagttctttacagctggcaggacctctgaggtgtcaccctgaggcttagcagtcttctcatcatcttcactccctaatgtgctcagggtgtctgattcctggccagtgtcttggatgtcctgggtcagcccacgtacgccagtgcatgttggaaggggagagttgattccctctcccaagccaggaggtccgtcggcatgggctctttcataagcatgctttcctacagaaggtgtgccttcccccgtttccttctcacttcctaccatggcggtgtagagactctcaaaatcaagagggaaaagaaggaagctcagtacttcttgcggcgagagaagccagtgccggtgcggacactcttggctggtggaatctgtggtgggggtggggggtgccctcactggcagggagcttacagatgcattgggtggtgtgaggagatcacagatgtacttggcctctgtctgtgagcccccaccgtgtgtgccgtggcccctacacttatcccgcccccccgttgtgctccacagagctggcaaacaaaaggcccagctcttgggttcagaaaacgaactgcagatgtctgaggtgtggccctgagatttagcgggagcaggagtaaaacgggttaaagtttggttgagaataaagttaatattcagcactggtgtattgtggctgccaagaatacgagctgtggccgtgttaataaaagtgcagtgtttagagggagtgagtgatcgtcttgctctggctctgtgggaccacccgtggagcttggctgggctctgtgaggggcacctcacagcttccatatctgaagtgtttggtggagcaaaaattgtctgtaccataaacttgtgtttactcttttcattcggatcatagtcaaagggctgtagcattactgaacttcctaagcccatgaattgggcttcatgcagcagaaccttggcctcctttttgttgcaggccgccagatcccacccttggacccccatgaaaatggaaacaatggaacaatcaaagttgagaagccaaccatgcaagccagccgccggtgctgttgacccaagggccgtggtccacggtacttgaagaagccagagcccacatcctgtgcactgctgaaggaccctacgctcggtggcctggcacctcactttgagaagagtgagcacactggctttgcatcctggaagacctttgctccagttgccaacaagttccccatctccatctaagaccacctccgcctggactttattgtccatattgctatcagcattttgggcaaagccgttcaacaagtctctaggaagttccaaactttcccacat

SEQ ID NO: 126153 - DNA, 1458 bp, Homo sapiens
tcaacagagttccaaggtgatcaccttggtacagaaagccatggccattttccaaaaccatgcctttgtgtaagtgccttgaaccttccggtaaattctgaataccttaggccctaagatcggggtttgcgttcggcgtttgctttcttgttttgcgttctggtttcctggtgcaggctcccttctccttttaaaggtgccggcctcattgttatgatctggcttttctctttctctgcgtggaagcatttccttctccctgtgtttaaggttggcatgtgtgtgacttatcccaggtgttactgttgaagtcacggtaccatgaaagccgctcattaaaccaggatgggtctctgaacttcctaagcccatgaattgggcttcatgcagcagaaccttggcctcctttttgttgcaggccgccagatcccacccttggacccccatgaaaatggaaacaatggaacaatcaaagttgagaagccaaccatgcaagccagccgccggtgctgttgacccaagggccgtggtccacggtacttgaagaagccagagcccacatcctgtgcactgctgaaggaccctacgctcggtggcctggcacctcactttgagaagagtgagcacactggctttgcatcctggaagacctgggagatactgggtgggagtgtgaacatttggctccacattacttatgcaaatttctgcagccagcttggatttctcctcagaaaatgggattttcttttctatcacattgccagactgcaaattttctaaacttttatgctctgcttcccttataaaaccaaatgcctttaacagcacccaagtcacctcttgaatgcttctctgcttagaaatttcttccgccaggtaccctaaatcatctctctcaagttgaaaattccagaaatctctagggcaagggcaaaatgctgccagtctctttgctaaaacataacaagagtcacctttgctccagttgccaacaagttccccatctccatctaagaccacctccgcctggactttattgtccatattgctatcaggcttttggtcaaagccattcaacaagtctctaggaagttccaaactttcccacatcttcctgtcttcttctgagtcctacaaactgttccaacctctgcctgttacccagttccaaagtcgcttccacattttcaggtatttttacagtagcaccccactctctgcagcaccaatttactatattagtctgttcttacactgctaaataagacatacctgagactgaacaatttataaacgaaagaggtgtaattaactcacagttcagcatggctggggaggcctcaggaaacttacaatcatggcagaaggggaagcaacatgtccttcttcacataatggcgggaaggagaagaatgagtgcccactgaagggggaagcccctataataccatcagt

SEQ ID NO: 126154 - DNA, 985 bp, Homo sapiens
ccctcggacggccccggaggatgctgctgagccccggcactgcctggctgcgagcacatgatggcgatacgggagctcaaagtgtgccttctcggggacactggggttgggaaatcaagcatcgtgtgtcgatttgtccaggatcactttgaccacaacatcagccctactattgggggcatcttttatgaccaaaactgtgccttgtgaaaatgacttcacaaagttcctcatctgggacactgctggtcaggaacgtttttattcattggctcccatgtactatcgaggctcaggtgcagctgttatcgtgtatgattttaccgaggccggattccattttcatcccttgaagaaatgggtccaagcggctgaaagaacttggtccggaaaaacattgtaatggccatcgctggaaacaagtgcgacctctcagatatttagggaggttcccctgaagggatgctaaaggaatacggctgaatccataggtgccatcgtggttgagacaagtgcaaaaaatgcctattaatatcgaaagagctctttcaaggaaatcagccgcccagatccccacccttggaccccccatgaaaatggaaacaatggaacaatcaaagttgagaagccaacccatgcaagccagtccgccggtgctgttgaccccaagggcccgtggtccacgggtactttgaagaagccagagccccacatcctgtggcactgctgaaggaccctacgcttcggtgggcctgggcacctcactttgagtaagagtgaggcacactggctttgcatcctggaagacctgcagggggcggggcaggaaatgtacctgaaaaggattttagaaaaccctgggaaaacccaccacaccaccaccacaaaatggcctttagtgtatgaaattgcacatggaggggatgttagtttgcatttttgctaaaaaaaaaaaaaaaaacctttaaaaattgttggatgtgta

SEQ ID NO: 126155 - DNA, 1665 bp, Homo sapiens; identical to SEQ ID NO: 119499

SEQ ID NO: 126156 - DNA, 1566 bp, Homo sapiens; identical to SEQ ID NO: 119501

SEQ ID NO: 126157 - DNA, 1452 bp, Homo sapiens
atgaagcttccagaggaaggattagcagcaatatttgctgttctgcagtattactattctgcatcctccgctggtgataaccaggcaacacggtctggagtggaactccacaaatccaggagactgctgctgagggacctgatgttgaagaaaccacaacagaaggagtactcattcacaaagggcttccgaatccccggtggccccatcaaacaggttgtaacccaaatgaaaactaccatcagagaatactataaacacctctacgaaaataaactagaaaacctagaagaaatggataaattcctggacacatacactctcccaagactaaaccaggaagaagttcaatctctgaatagaccaataacaggctctgaaattgaggcaacaattaatagcctaccaaccaaaagaagtccaggaccagacggattcacaactgaattctacccgagaaccaatgacaaaaaccacatgattatctcaatagatgcagaaaaggcctttgacaaaattcaacagcccgtcatactaaaaactctcaataaactaggttttgatggcatgtatctcaaaataataagagctatttgtgacaaacccacagccaatatcatactgaatgggcaaaaactggaagcattccctttgaaaaccagcacaagacaagggtgtcctctcttaccactcctgttcaacgtagtgttggaagttctggccagggcaatcagacaaacagagagccaaatgatgagtgaactcccattcacaattgcttcaaagagaataaaatacctaggaatccaacttacaagggacgtgaaggacctcttcaaggagaactacaaaccactgctcaatgaaataaaagaggatacaaacaaatggaagaacattccatgctcatgggtaggaagaatcaatatcgtgaaaatggccataccgcccaagatgttcttccggcttcaattgccacctgtgaatagtgaagaaacttctcactatgagattccattgcccggaaggagggtagagctacggtacccactaaggcagggaacagaagcaacagacggacaggtctgtggaaatgaggatatgctaataagggaccgagtcaggaaaactagagggtcagcaccgcccccagcccacaacctggcacccacggaagttgctttagaggacgtcctgcgtatcttcacctctgcgtggcgtggggtcgacggcgctctggagaagggaggaacttcctgtcccgcgcgcgcacaacttccggcagagccggaagaccctctctttcgctgtttgagagtctctcggctcaaggaccgggaggtaagaggtttgggactgccccggcaactccagggtgtctggtccacgacctatcctaggcgccatgactgggtaaaccatcggatgtggggaagaaagcagcagtattag

SEQ ID NO: 126158 - DNA, 1607 bp, Homo sapiens
aaatacaaactaccatcagagaatactacaaacacctctacgcaaataaactagaaaatctagaagaaatggataaattccttgacacatacactctcccaagactaaaccaggaagaagttgaatctctgaatagaccaataacaggatctgaaattgtggcaataatcaatagcttaccaaccaaaaagagtccagaccagttggattcacagccgaattctgccagagaaaaagagggaatcctctctatctcattttgtgaggccagcatcatcctgataccaaagctgggcagagacacaaccaaaaaagagaattttagaccaatatccttgatgaccattgacacaaaaatcttcaataaaatactggcaaaccaaatccagcagcacatcaaaaagcttatccaccatgatcaagtgggcttcatccccgggatgcaaggctggttcaatatatgcaaatcaataaatgtaatccagcatataaacagaaccaaagacaaaaaccacatgattatctcaatagatgcagaaaaggcctttgacaaaattcaacaactcttcatgctaaaaactctcaataaattaggtattgatgggacgtatttcaaaataataagagctatctatgacaaacccacagccaatatcatactgaatgggcaaaaactggaagcattccctttgaaaactggcacaagacagggatgccctctctcaccactccttttcaacatagttttggaagttctggccggggcaattaggcaggagaaggaaataaagggtgttcaattaggaaaagaggaagtcaaattgtccctgtttgcagacgacatgattgtatatctagaaaaccacattgtctcagcccaaaatctccttaagctgataagcaacttcagcaaagtctcaggatacaaaatcaatgtacaaaaatcactagcattcttatacaccaataacagacaaacagagagccaaatcatgagtgaactcccattcacaattgcttcaaagagaataaaatacttaggaatccaacttacaagggacgtgaaggacctcttcaaggagaactacaaaccactgctcaatgaaataaaagaggatacaaacaaatggaagaacattccatgctcatgggtaggaagaatcaatatcgtgaaaatggccatactgtccaaggtaatttacagattcaatgccatccccatcaacctaccaatcactgtcttcacagaattggaaaaaactactttaaagttcacatggaaccaaaaaagagcccacattgccaagtcaatcctaagccaaaagaacaaagctggaggcatcacgctacctgacttcaaactatactacaaggctacagtaaccaaaacaggatggtactggtaccaaaacagagatatagatcaatggaacagaacagagccctcagaaataacgacacatatctacaactatctaatctttgacaaacctgagaaaaacaagcaacggggaaaggattccctatttaataaatggtgctgggaaaactggctagccatatgtagaaagcagtgtgttttcattgtacctccaacagaagggtag

SEQ ID NO: 126159 - DNA, 402 bp, Homo sapiens
acaaacagagagccaaatgatgagtgaactcccattcacaattgcttcaaagagaataaaatacctaggaatccaacttacaagggacgtgaaggacctcttcaaggagaactacaaaccactgctcaatgaaataaaagaggatacaaacaaatggaagaacattccatgctcatgggtaggaagaatcaatatcgtgaaaatggccataccgcccaagatgttcttccggcttcaattgccacctgtgaatagtgaagaaacttctcactatgagattccattgcccggaaggagggtagagctacggtacccactaaggcagggaacagaagcaacagacggacaggtctgtggaaatgaggatatgctaataagggaccgagtcaggaaaactagagg

SEQ ID NO: 126160 - DNA, 380 bp, Homo sapiens
tcacgctgcttggtcttcactgctgtatgttgactttttcactgttaattctaaggctcctttagatgatgttatgttgtcaagctctgtaacagggtttccttccctatcatagccaaaccaacgtggagggtcattagtgttgtattcctgctgctgaactttagatgacattctttgagctgccttcttggaaatatttgtgcagtattgcatcttaaggatccggagttgtttgcagcctatctgaaggtcctcaaggatttggtcagtaagcaagacacaaccagagatatccaaaatgtgcaggtaatggcattttgccgataacatctccatcgctgagtcagtaatctgcaattggtgtcttggaaataacc

SEQ ID NO: 126161 - DNA, 723 bp, Homo sapiens
atggacaaagctacaattggtaatgaaacaaagataatgttggaagttctggccagggcaattaggcaggagaaggaaataaagggtattcaattaggaaaagaggaagtcaaattgtccctgtttgcagatgacatgattgtatatctagaaaaccccattgtctcagccccaaatctccttaagctgagaagcaacttcagcaaagtctcaggatacaaaatcaatgtacaaaaatcacaagcattcttatacaccaataacagacaaacagagagccaaatcatgagtgaactcccattcacaattgcttcaaagagaataaaatacctaggaatccaacttacaagggatgtgaaggacctcttcaaggagaactacaaaccactgctcaaggaaataaaagaggatacaaacaaatggaagaacattccatgctcatgggtaggaagaatcaatatcgtgaaaatggccacactgcccaaggtctctgagtctctcagaagagagggtagctcctctctgcagctggtcatcccacagtctgtctgtcctctgctctggctgagccccaggcttattatggacctcacaggggaggaagtgcatgccaatcagtccctgggcagccataggcaggcctggaagaggaaccacatgtccccacttaggtcctcaggactggcagctcagcccccagcctttaggccctacctggcctga

SEQ ID NO: 126162 - DNA, 365 bp, Homo sapiens
ctcatttaatgcagtgtgatgggacagaatcgaaatgagctgcatgttgaaccccagccatgggtgaagtgcccactggtatatgcatttctttaatgtcctcattccttattccctgtcccccttaccctagctctgctctccagtccacccacagacagctttagtgaaaccaaacatcagtgggtccctgactattggaagtgatgcttactgactggaggggagcaaaggatcagatctcagacccactctccttccagactcaagttctgggaggttaaggcttcctccacctggtatgtctttagggcctgttttagtctgaagtgctttcacagcaagggtggtcctagggaaaaact

SEQ ID NO: 126163 - DNA, 1248 bp, Homo sapiens; identical to SEQ ID NO: 119552

SEQ ID NO: 126164 - DNA, 1422 bp, Homo sapiens
atgattatctcagtagatgcagagaaggcctttgacaaaattcaacaacccttcatgctaaaaactctcaataaattaggtattgatgggatgtatttcaaaataataagagctatctatgacaaacccacagccaatatcatactgaatgggcaaaaactggaagcattccctttgaaaactggcacaagacaaggatgccctctctcaccactccttttcaacatagtgttggaagttctggccagggcaattaggcaggagaaggaaataaagggtattcacttaggaaaagaggaaatcaaattgtccctgtttgcagacgacatgattgtatatctagaaaaccccattgtctcagcccaaaatctccttaagctgataagcaacttcagcaaagtctcaggatacaaaatcaatgcacaaaaatcacaagcatttctatacaccaataacagacaaacagagagccaaatcatgagtgaactcccattcacaattgcttcaaagagaataaaatacctaggaatccaacttacaagggatgtgaaggacctcttcaaggagaactacaatccactgctcaatgaaataaaagaggatacaaacaaatggaagaacattccatgctcatgggtaggaagaatcaatatcgtgaaaatggccatactgcccaagaattggaaaaaaactactttaaagttcatatggaaccaaaaaagagcctgcatcgccaagtcaatcctaagccaaaagaacaaagctggaggcatcacactacctgacttcaaactatactacaaggctacagtaaccaaaacagcatggtactggtaccaaaacagagatatagatcaatggaacagaacagagccctcagaaataatgccacctatctacaactatctgatctttgacaaacctgagaaaaacaagcaatggggaaaggattccctatttaataaatggtgctgggaaaactggctagccatatgtagaaagctgaaactggatcccttccttacaccttatacaaaaatcaattcaagatggattaaagacttaaatgttagacctaaaaccataaaaaccctagaagaaaacctaggcattaccattcaggacataggcttgggcaaggacttcatgtctaaaacaccaaaagcaatggcaacaaaagccaaaattgacaaatgggatctaattaaactaaagagcttctgtgcagaaaaagaaactaccatcagagtgaacaggcaacctacaaaatgggagaaaatttttgcaacttactcatctgacaaagggctaatatccagaatctacaatgaactcaaacagatttacaagaaaaaaacaaacaaccccatcaaaaagtgggtgaaggacatgaacagacacttctcaaaagaagacatttag

SEQ ID NO: 126165 - DNA, 1388 bp, Homo sapiens
atggataaattcctcgacacatacaccctcccaagactaaaccaggaagaagttgaatctctgaatagatcaataacaggctctgaaattgtagcaataatcaatagcttaccaaccaaaaaaagtccaggaccagatggattcacagccgaattctaccagaggtacaaggaggagctggtactattacttctgaaactattccagtcaatagaaaaagaagcaaccctccctaactcattttatgaggccagcatcatcctgataccaaagcctggcagagacacaacaaaaaaagagaattttagaccaatatccttgatgaacattgatgcaaaaatcctcagtaaaatactggcaaaccaaatccagcagcacatcaaaaagtttgtccaccatgatgaagtgggcttcatccccaggatgcaaggctggttcaatatacacaaatcaaaaaacgtaatccagtatataaacagaaccaaagacaaaaactacatgattatctcaatagatgcagaaaaggcctttgacaaaattcaacaactcttcatgctaaaaactctcagtaaattaggtattgatgggacgtatctcaaaataataagagctatctatgacaaacccacggtcaaaatcatactgaatgggcaaaaactggaagaattccctttgaaaactggcacaagacagggatgccctctctcaccactcctattcaacatagtgttggaagttctggccagggcaattaggcaggagaaggaaataaagggtattctattaggaaaagaggaagtcaaattgtccctgtttgcagatgacatgatcgtatatctagaaaaccccatcgtctcagcccaaaatctcccttaagctgataagcaacgtcagccaaagtctgaggatacaaaatcaatgtgcaaaaatcacaagcattcttatacaccactaacagacaaacagagagccaaatcatgagtgaactcccattcacaattgcttcaaagagaataaaatacctaggaatccaatttacaagggacgtgaaggacctcttcaaggagaactacaaaccactgctcaatgaaataaaagaggatacaaacaaatggaagaacattccatgctcatgggtaggaagaatcaatatcgtgaaaatggccatactgcccaagcctccgctgctgatacccaggcaaacagggtcgggagtggacctccagcaaactccaacagacctgcagctgagcgtcctgactgttagaaggaaaattaacaaacagaaaggacatccacaccaatacctcatctggacgtcaccatcatcaaagaccaaaggaaggcagctcctcgccagcaacagaacgaagctggatggagaatga

SEQ ID NO: 126166 - DNA, 821 bp, Homo sapiens
atgatcacaattgcttcaaagagaataaaatacctaggaatccaacttacaagggacgtgaaggacctcttcaaggagaactacaaaccactgctcaatgaaataaaagaggatacaaacaaatggaagaacattccatgctcatgggtaggaagaatcaatattgtgaaaatggccatactgcccaagattactgactcagcaatggagatgttatcggcaaaatgccattacctgcacattttggatatctctggttgtgtcttgcttactgaccaaatccttgaggaccttcagataggctgcaaacaactccggatccttaagatgcaatactgcacaaatatttccaagaccacccttgctgtgaaagcacttcagactaaaacaggccctaaagacataccaggtggaggaagccttaacctcccagaacttgagtctggaaggagagtgggtctgagatctgatcctttgctcccctccagtcagaaggcagctcaaagaatgtcatctaaagttcagcagcaggaatacaacactaatgaccctccacgttggtttggctatgatagggaaggaaaccctgttacagagcttgacaacataacatcatctaaaggagccttagaattaacagtgaaaaagtcaacatacagcagtgaagaccaagcagcgtgaccttcagcctcaagcaggaagaacaaaaaatcaagaacttggcaagttttctccatttgttgcaagtatgtttactagctgaatctcaataacaatgtaaacaagcaacaaaccatcttctgattcttattccaactaca

SEQ ID NO: 126167 - DNA, 4490 bp, Homo sapiens
atgaaggcagaaataaagatgttctttgaaaccgacgagaacaaagacacaacataccagaatctctggaacacattcaaagcagtgtgtagagggaaatttatagcactaaatgcccacaagagaaagcaggaaagatccaaaattgacaccctaacatcacaattaaaagaactacaaaagcaagagcaaacacattcaaaagctagcagaaggcaagaaataactaaaatcagagcagaactgaaggaaatagagacacaaaaaacccttcaaaaaaatcaatgaatccaggagctggttttttgaaaagatcaacaaaattgatagactgctagcaagactaataaagaagaaaatagagaagaatcaaatagatgcaataaaaaatgataaagggaatatcaccaccaatcccacagaaatacaaactaccatcagagaatactataaacacctctatgcaaataaactagaacacctagaagaaatggataaattcctggacatatacaccctcccaagactaaaccaggaagaagttgaatctgtgaatagaccaataacaggttctgaaattgaggcaataattaatagtctaccaaccaaaaaaagtccaggaccagacagattcacagctgaactctaccagaggtacaaagaggagctggtaccattccttctgaaactattccaatcaatagaaaaagagggaatcctccctaattcattttatgaggccagcatcatcctgatatcaaagcctggcagagacacaacaaaaaaagagaattttagaccaatatccctgatgaacatcgatgcaaaaatcctcaataaaatactggcaaaccaaatccagcagcacatcaaaaagcttatccaccaccatcaagttggcttcatccctgggaatgcaaggctggttcaatatatgcaaatcaataaatgtaatccagcatataaacagaaccaaaggcaaaaaccacatgattatctcaatagatgcagaaaaggcctttgacaaaattcaacaacccttcctgctaaaaactctcaataaattaggtattgatgggacatatctgacatatctcaaaataataagagctatttatgacaaacccacagccaatatcatactgaatgggcaaaaactggaagcattcccttttaagactggcacaagacagggatgtcctctctcaccactcctattcaacatagtgttggaagctctggccagggcaatcaggcaagagaaagaaataaagggtattcaattaggaaaagaggatgtcaaatttgtccctgttggcagatgacatgatggtatatcttagaaaatcccaatgtctcagccccaaaatcttctttaaggctggttaagcaacttcagcaaaagtcttcaggttacaaaatcaatgtgcaaaaatcacaagcattcttatacaccagtaacagacaaacagagagccaaatcatgagtgaactcccagttcacaattgcttcaaagagaataaaatacctaggaatccaacttacaagggatgtgaaaggacctccttcaaggagacctacaaaccactgctcaacgaaataaaaagaggacacaaacaaatggaagaacatttcatgctcatgggtaggaagaatcaatatcgtgaaaaatggccatactgcccaaggtaaatttatagattcaatgccatccccatcaagctaccaatgactttcttcacagaattggaaaaaactactttaaagttcatatggaaccaaaaaagggcccgcattgccaaggcaatccgaagccaaaagaacaaatctggaggcatcacactacctgacttcaaactatactacaaggctacagtaaccaaaacagcatggtactggtaccaaaacagagatatagatcaatggaacagaacagagccctcagaaataacgccgcatatctacaactatctgatctttgacaaacctgagaaaaatgagcaatggggaaaggattccctatttaataaatggtgctgggaaaactggctagccatatgtagaaagctgaaactggatcctttccttacaccttatacaaaaatcaattcaagatggattaaagacttaatcgttagacctaaaaccataaaaaccctagaagaaaacctaggcattaccattcaggacataggcatgggcaaggacttcatgtctaaaacaccaaaagcaatggcaacaaaagccaaaattgacaaatgggatctaattaaactaaagagcttctgcacagcaaaagaaactaccatcagagtgaacaggcaacctacaaaatgggagaaaactttcgcaacctactcatctgacaaagggctaatatccagaatctacaatgaactcaaacaaatttacaagaaaaaaacaaacaaccccatcaaaaagtgggcgaaggacatgaacagacacttctcaaaagaagacatttatgcagccaaaaaacacatgaaaaaatgctcaccatcactggccatcagagaaatgcaaatcaaaaccacaatgagataccatctcacaccagttagaatggcaatcattaaaaagtcaggaaacaacagtacgtttgactttggacaacatgagtttgaactacacaggtccacttatacgcggattgttttcagtaaaattacaccaatattggaagttctggccagggcaattaggcaggagaaggaaataaagggtattcaattaggaaaagaggaagtcaaattgtcccctctttgcagatgacatgattgtatatgtagaaaacccccttccgtctcagcccccatatctccctcaagctgataagcaacttcagcaaactcctcaggatacaaaatcaatgtacaaaaatcacaagcattcttatacaccaataacagacaaacagagagccaaatcatgagtgaactcccattctgttattgcttcaaagagaataaaatacctaggaatccaacttacaagggatgtgaaggacctcctcaaggagaactacaaaccactgctcaatgaaataaaagaggatacaaacaaacggaagaacattccatgctcgtaggtaggaagaatcaatatcgtgaaaatggccatactgcccaaggctatatggaatagcctgttgcttctaggatacaaacctgaacagcatgttactgtgctggatactgcaggcaactgtatcacattggtatctgtgtatcaaaacatatgtaaacatagaaaagataaacaggaaacattcatgggcaaagtacaagagggaccagtggattttaatgggaataagtatgaagagtttattgatatattttcagatcccatgttgcaacaaacctcgaagatactgccccttacaataactgcaatgtgctctgatgattggttgttagtcagaatgaaaataaggccttttgataagaacacagacattagaattggcgacatacacctgagagataactgtcctgtaacaagactgttgtcatttaactacgcgttttcttatcctgtcacttcttgtgggatcaagaaaattttcatttgcaacttagcaatgccattttcagctgttcaggatgatttcaaacaaattctcactatatccttatacttcttgaagggtggaaaaggtatcaacattttagctgtatttccaggatttcactcaagaatacctgtgaactggagaggggacctcaagaagtcaagatattggaataaaaaacaaccaagacagaaaatgagcaggttgtgtggaggcctacagtggcagttgtatggacgaagaagttttactggacaaaaattatctcatgaacttttcttcagcaacctggagacatacacattcatgacaaaatactttgggaaagcaaaattaaagcagattggggttttcaaagctgaaaccacagtgtttgtagagtgtactgaatcttggcttctggttgaaattagaggagcacctcttgtggaaaacctgcaacctaagcataatgagctgtctctaggaaatgggtgtcctgtaaccaggatgacgaatgatatctttgagttcacttatgctcttgagttttctggcatcatgaaatatgaatgcccatggggcattcttgttgagagtttcgtcaaatatcaaccagcgtttttgaatttcagaacttacatcccagtaagatgcgcccttgaaagaaagccttcctcatttgaacaaaatgtaatacagaataatactgataaatctaagaaaatagtccaaactcagtattatcaagcaggaaattggggtatcgaggaatgttacttaggtattccagaagaagacattgttatcacaggagatgacaactccttgtgtgttattgcccacgaagaccttccagtgggacaatatgtggagagggaagacggtgagattgaggatcctgaccctgcatag

SEQ ID NO: 126168 - DNA, 382 bp, Homo sapiens
  misc_feature (1)...(382): n = a,t,c or g
agcagggcgccgtgctgcaccccacctgcgtcttcgctggcagccccgaggtgctgcacgcacaggagctggaggccagcaactgcgacggaagccgagacgacaaggacaagatgagcagcaaacaccagctcctcagcttcgtgtccctgctggagaccaacaagccgtacctggtgaactgcgtccgcatccctgccctccagtccctcctgctttttagccggnctttggacaccaatggtgactgctcccgcctggtggccgatggctggctggagctgcagctagcagacagtgaaagtgccatccgactcctggcggcttccctgcggctccgtgcccgctgggaaagtgccctggaccggcagctggcgcacca

SEQ ID NO: 126169 - DNA, 1590 bp, Homo sapiens
cccaggggccagtgatggcgtggacatccaggatgtgaagttcaagcttcggcatgacctggcgcagctgcaggccgctgccagctcagcccaggacctgagccgcgagcagctggctctgctgaagctggtgctaggccggggcctgtacccacagctggccgtccccgacgccttcaacagcagccgaaaggactcagaccacgattttccacacgcaggccaagcagggcgccgtgctgcaccccacctgcgtcttcgctggcagccccgaggtgctgcacgcacaggagctggaggccagcaactgcgacggaagccgaggcatggctgcgtgctgggagtcacattcagatttggctgaccttcttgtctgagccaggccaccaaagccatgccacgacaaggacaagatgagcagcaaacaccagctcctcagcttcgtgtccctgctggagaccaacaagccgtacctggtgaactgcgtccgcatccctgccctccagtccctcctgctttttagccggtctttggacaccaatggtgactgctcccgcctggtggccgatggctggctggagctgcagctagcagacagtgaaagtgccatccgactcctggcggcgtccctgcgggctccgtgcccgctgggaaagtgccctggaccggcagctggcgcaccagtgcccagcagcagctggaggaggaggaggaggatacgccagtcagccccaaggaggtggccaccctgagcaaggaactcctgcaattcacggcatccaagattccttacagcctccggcggctcacagggctagaagtccagaacatgtatgtgggaccccagaccatcccagccaccccccatcttcctggcctctttggcagctccaccctgtccccccaccccacaaaggggggtctacgcagtcactgacttcctcacctacaactgcctcacggaatgacacagacctgtacagcgactgtctccgaaccttctgggacctgcccccactgtgggcctgcatgcgcccctcacgccctgggagcgcattcgcccattgagggaacaacttgcccccaggggccccacagggttggggcccccaggggctgaggaagctgccctcgaaaccctccagaagaacatctgtcctgcagaggccctaccactgcgaggcctgcgggaaggacttcctctttacacccacagaggtgctgcgccaccggaagcagcacgtgtgagctgggccaggagccctgcccacctccgtgcagctgacctgccctccagcccaggactaggggcaggactcttgcctgaacccccagcctgggcttagccctgtggtcctgtcccagtgcagagggcctggagcacggattgtgaataaagcctcacatgctgatacacactgttaggcctgcacctgcccatccagaaagcagcagctgccttgttagtcctccccagggtctagctttccttcttcctgctgcagggggctgcctgaggggtcctgggtaggaggggcgttagagccagcagggacctcccatgtctccagattccaggtgcagggtctt

SEQ ID NO: 126170 - DNA, 442 bp, Homo sapiens
  misc_feature (1)...(442): n = a,t,c or g
nctgagtcatgactaccggcacgaattcccgtgtcgagccacgcgtccgcggccgggtgtataagaagaaaatggataaaaagaggcaggagaagataacagaagctaaatccaaagacaaaagtcagatggatgaggagaagacagatatgaaaagcccaagctgcaggtggagctggagcaagaataccaagacaaattcaaaagactgcccctcgagattttggaattcgtgcaggaagccatgaaaggaaagatcagtgaagacagcaatcacggttctgcccctctctccctgtcctcagaccctggaaaagtgaaccacaagactccctccagtgaggagctgggaggagacatcccaggaaaagaatttgatactcctctgtgaatgctcctgccaggccttcagaaattgcatgggcactccagcgtcatcgga

SEQ ID NO: 126171 - DNA, 5150 bp, Homo sapiens
tgactgtaaaaaatcttcaatggatgaggggactgctggaagtgaggctatggccacagaagaaatgtctaatctggtgaactatattcagccagtcaagtttgagtcatttgaaatttcaaaaaaaagaaataaaagttttgaaatgtcttccttcgtggaaaccaaaggacttgaacaactcaccaagtctccagtggaatttgtagaatataacaaaatgcagcttagcaggatatatccaaaaggaacacgtgtggattcatccaactatatgcctcagctcttctggaatgcaggttgtcagatggtggcacttaatttccagacaatggacctggctatgcaaataaatatggggatgtatgaatacaacgggaagagtggctacagattgaagccagagttcatgaggaggcctgacaagcattttgatccatttactgaaggcatcgtagatgggatagtggcaaacactttgtctgttaagattatttcaggtcagtttctttctgataagaaagttgggacttacgtggaagtagatatgtttggtttgcctgtggatacaaggaggaaggcatttaagaccaaaacatcccaaggaaatgctgtgaatcctgtctgggaagaagaacctattgtgttcaaaaaggtggttcttcctactctggcctgtttgagaatagcagtttatgaagaaggaggtaaattcattggccaccgtatcttgccagtgcaagccattcggccaggctatcactatatctgtctaaggaatgaaaggaaccagcctctgacgctgcctgctgtctttgtctacatagaagtgaaagactatgtgccagacacatatgcagatgtcatcgaagctttatcaaacccaatccgatatgtgaacctgatggaacagagagctaagcaattggctgctttgacactggaagatgaagaagaagtaaagaaagaggctgatcctggagaaacaccatcagaggctccaagtgaagcgagaacgactccagcagaaaatggggtgaatcacactacaaccctgacacccaagccaccctcccaggctctccacagccagccagctccaggttctgtaaaggcacctgccaaaacagaagatcttattcagagtgtcttaacagaagtggaagcacagaccatcgaagaactaaagcaacagaaatcgtttgtgaaacttcaaaagaaacactacaaagaaatgaaagacctggttaagagacaccacaagaaaaccactgaccttatcaaagaacacactaccaagtataatgaaattcagaatgactacttgagaaggagagccgctttggaaaagtccgccaaaaaggacagtaagaaaaaatcggaacccagcagccctgatcatggttcatcaacgattgagcaagacctcgctgctctggatgctgaaatgacccaaaagttaatagacttgaaggacaaacaacagcagcagctgcttaatcttcggcaagaacagtattatagtgaaaaataccagaagcgagaacatattaaactgcttattcaaaagttgacggatgtcgcagaagagtgtcagaacaatcagttaaagaagctcaaagaaatctgtgagaaagaaaagaaagaattaaagaagaaaatggataaaaagaggcaggagaagataacagaagctaaatccaaagacaaaagtcagatggaagaggagaagacagagatgatccggtcatatatccaggaagtggtgcagtatatcaagaggctagaagaagcgcaaagtaaacggcaagaaaaactcgtagagaaacacaaggaaatacgtcagcagatcctggatgaaaagcccaagctgcaggtggagctggagcaagaataccaagacaaattcaaaagactgcccctcgagattttggaattcgtgcaggaagccatgaaaggaaagatcagtgaagacagcaatcacggttctgcccctctctccctgtcctcaagaccctggaaaagtgaaccacaagactccctccagtgaggagctgggaggagacatcccaggaaaagaatttgaatactcctctgtgaatgctcctgccaggccttcagaaattgcatggccactccagcgtcatcggactctctcttattacaaagatcactgcccaggaccatctttccgaaaagcattcctttagcctaaaatccccaccaaagggagagttccagaggaatccatgaagaattcccatgcccaggctccatgtgtcatgtggaaacctccacaggtctgctagtgaagaatgcatgtatgtgagatttttgttttctttccaatagcaaattcaaagcaagcaacttgcaggctccatggaacttttaatgaaggacagtgtcttctttgaagaaaatcaagctcgtgtttttattcgaagctctggtgtaaaatatttcaaagtcatagaaatagtttgagaaatgcatagcattatttaacactattgaacagccgactttgagcattgtttcttctaactgcccctcaactaccattatcttcaagtcaacatgcatattacattttcatcctttgctttgcaagcactggtggcttgcagtttgctaatttatttatcatagagtcatcaatgtatttgttgctgacatggttttattagatactgtagtgattcaaataagttttctatttgaaaaaaaaaatcacttgattgtatccttgcccagtgaagccatcctaagacttagcaatatggattgtacatttggctgcatgagcaagtcggccgcacacttccagacagtgtgctgtttgaattgactatttgcactcaaagtctgggtattcattggttattggcctgaaatgatcaaataactacaaatgatctgttgaataaaaatagttgagctgatatatgttaagcagatattcaatcagaatgaacaggttccggtggttattttgccgtttgacattttttatggttcatttatttttaatatagagaggaagattgaatatttatctagagaatacaaagacccacatgtaaatgataggtattatctccatgtatatatgtacccacttagtcatgtaagtgcatatacacatacacacacatgagtgtagacatgtgtttattaattgacaatgacccaaatctcttccacaagacttaaaaccaaattcagggacaaatggatagagaagaaaagggtcaaacatcgagattacatggatgttaaattatatggagacgctaagaaataattgatggagccattgatgcaaaccgaagtagatttagaacttatatgaatttgatttatattttgcaagatcaaaaattagatgttaagtatcagattttaagcttgttttaatggtcaaaaaattaggacagaaataatatggacatttattagtatcttccataatttttaagtctgacacatttctattttattctaacataaaaaaacttccattatatatttactaagtatatttaattcacttaactctgtctttataagttcctattttagatggaataagagaaacaaattatatcaaggtaaaactgatcaaaagcataattgaaagttctgaaaaaagaaaaataataatatgtagaaaaatgtaacttagagagtaacacatgaacattgaagttaaaacccagaagccagatgctcacagttttattttaccttaaaataaacctgtctgactgtagctttgtgaaatatcttaaaacgcaaaaaccaattgtgtcctgaaaattgtttcaagaatttaatatttttatgaaaattattttatttaactttaagcaataactagagattacaattaaattttaatcaaaatgaaggcttagttcaaacataaggaaacagtgtttgattaaaaaaaacacatctagtaagacgtaaggggaaaatcacatcctctttggagatgattatattttgatctgaagggtttggggtgttcattagacacttaataaaacttaacttccaatgaaaaagaaatcttttgtaaatcattctacttttgcactttgaaagaaaggcgttaatcataaagaagcaagaatggtcaaaatcgaatgctgcatttttataaacaaaattacagactgtctgaaattgaagaagaatgaactaataatagcattcataaccaaacacaatgatgattattgcagaacattgtatcacattttagtccagagatagaataaagttgaataaccttgacttacacaaaactgttttggtagttggatttcattatcttagtgaatttagtcattttacaatatgtttgtatttggccatttactgtaatcacatttttatatctgtacaatgacactttttgcagttgtggggtagtgtgtaacactgtccatcttgcatcattgaaactactacaatgatactatcatttaataatattaatattacttgaaatagactaagataaagaaaaggggtctgtatgatgtgcagttttgtgcctttatgtatttgccttgttctttgtcgaatgtgtgaaattccgtactgtggtttttcctataatagaaagtagagctgtgtattaaattagactgtgtctctctgatacctttacactactgagaatagcatggttttggccatgtaaaccaattttcaaagttctaatgacatagccatgtgtttttggttttttatatttcattttaaaatttgagtatcaccatacattaattaatactcctgtagtagataagctgtcattaagtaattcccaaaaaaagggccatttgcttgcattactttgaatttaatgttgcgcttgtgcactgtgttaatattgtttgtgatggattggacgttgtgactcttgccttttaagaagaaaaaaaagataggacaaagtatttgaagctcttaaaatgtacatattttggttcttctatctcaaattatttaaaatgcataattcacatttttgtaataattctatgcaattttgtggcatgatgtttcttccacttgtaattttatgtgctttcatcacaaatccaaaggaaagaataaaaatttcttaacac

SEQ ID NO: 126172 - DNA, 1197 bp, Homo sapiens
atgctgcaggtggagctggagcaagaataccaagacaaattcaaaagactgcccctcgagattttggaattcgtgcaggaagccatgaaaggaaagatcagtgaagacagcaatcacggttctgcccctctctccctgtcctcagaccctggaaaacaaattcaaagcaagcaacttgcaggctccatggaacttttaatgaaggacagtgtcttctttgaagaaaatcaagctcgtgtttttattcgaagctctggtgtaaaatatttcaaagaaccattcttggatccaccaaagcttctgccaggccccttcatctattctcccaatgcaacctgtatcagtcacccactgctgcataacaagccacagcaaaacttgatgtttgaaataactaccacttactattggttgtgggcctatggatgggtagatggctctgctgatctgagctgggctgggcttatctcagctgggctcatctatgccgctacggcctcactggctccccatggagctgctggactctgggacgtcaccccaagtggattttggcctgctgtgagcgaaacacgtggctgtacaagaagcatggcactggcatctgcatccagtgagaggcttacggtcatggtagaaggtgaagggggagcaaatgtgtcccgtgtcatgacaagaaataattggcttgtgagaatcaacattgaagctggaaaaatgatggcatccgaacaagtagacacagccctagtcaaggcaataaactacactaaagacagaggagaaagactcaaagttgttctaacatgttctgctcatgaaacagagacaaccatgtgtggtgcctgcattcttggcctgcggggagtggaaaggagacaaagagtaaaacacggtgggaaagaagaaaaagaggttaagaaaagcaaatgtgcctactccagtgtagcattttggagaagacatggcttcaggaatgatttcccagaaattttgaaggtccttaaaactaaagaagaaagtcctgtgatatctgcaaaggctcatttgcagaaactggcccagcccaagtgtacagaaacaaagaaatgctacagccagtcaaaaccatttggctcactggttcttatttcaaatcagcagaataaacaaacttcagtccaagtaggaactggttctgctgtcctcttcttttaa

SEQ ID NO: 126173 - DNA, 2562 bp, Homo sapiens
atggagagaggaacgggagagactagaggggcggaagggacgttaggagggaggcagggaggcagggaggcagggaggaacggagggagagacagagcgacgcagggactgggggcggggccgagggagccggggacggacggggggaggaaggcagggaggaaaagcggtcctcggcctccgggagtagcgggaccgcccgcctccgggaaaacggtcagcgtccggcgcgggctgagggctgggcccacagccgccgcgccggccggcggggcaccacccattcgccccggttccggggcccagggagtgggcggtttcctccgggacaaaagaccgggactcgggttgccgtcgggtcttcacccgcgcggttcacagaccgcacatccccaggctgagccctgcaacgcggcgcgaggcccacagacccggccacggaggagccacacgcaggacgacggaggcgtgattttggtttccgagtggctttgccctcccgaaggcggcctgttgctcacgtctctccggcccccgaaaggctggccatgccgactgtttgctcccggagctctgcggcacccggaaacatgcagggaagggtgcaagcccggcatggtgccttcgctctccttgccaggttccaaacccgccacactgcagactcccccacgttgccgcacgcgggaatccatcgtcaggccatcacgccggggaggcatctcctctctggggtctcgctctggtcttctacgtggaaatgaacgagagccacacgcctgcgtgtgcgagaccgtcccggcaacggcgacgcccacaggcattgcctccttcacggagagagggcctggcacactcaagactcccacggaggttcagttccacactcccctccaccctcccaggctggtttctccctgctgccgacgcgtgggagcccagagagcggcttcccgttcccgcgggatccctggagaggtccggagagccggcccccgaaacgcgcccccctcccccctcccccctctcccccttcctcttcgtctctccggccccaccaccaccaccgccaccacgcctcccccaccaccccccccccccaccaccaccaccaccaccaccccgccggccggccccaggcctcgacgccctgggtcccttccggggtggggcgggctgtcccaggggggctcaccgccattcatgaaggggtggagcctgcctgcctgtgggcctttacaagggcggctggctggctggctggctgtccgggcaggcctcctggctgcacctgccgcagtgcacagtccggctgaggtgcacgggagcccgccggcctctctctgcccgcgtccgtccgtgaaattccggccggggctcaccgcgatggccctcccgacaccctcggacagcaccctccccgcggaagcccggggacgaggacggccacggagactcgtttggaccccgagccaaagcgaggccctgcgagcctgctttgagcggaacccgtacccgggcatcgccaccagagaacggctggcccaggccatcggcattccggagcccagggtccagatttggtttcagaatgagaggtcacgccagctgaggcagcaccggcgggaatctcggccctggcccgggagacgcggcccgccagaaggccggcgaaagcggaccgccgtcaccggatcccagaccgccctgctcctccgagcctttgagaaggatcgctttccaggcatcgccgcccgggaggagctggccagagagacgggcctcccggagtccaggattcagatctggtttcagaatcgaagggccaggcacccgggacagggtggcagggcgcccgcgcaggcaggcggcctgtgcagcgcggcccccggcgggggtcaccctgctccctcgtgggtcgccttcgcccacaccggcgcgtggggaacggggcttcccgcaccccacgtgccctgcgcgcctggggctctcccacagggggctttcgtgagccaggcagcgagggccgcccccgcgctgcagcccagccaggccgcgccggcagagggggtctcccaacctgccccggcgcgcggggatttcgcctacgccgccccggctcctccggagccggggcgctctcccaccctcaggctcctcggtggcctccgcacccgggcaaaagccgggaggaccgggacccgcagcgcgacggcctgccgggcccctgcgcggtggcacagcctgggcccgctcaagcggggccgcaggccaaggggtgcttgcgccacccacgtcccaggggagtccgtggtggggctggggccggggtccccaggtcgccggggcggcgtgggaaccccaagccggggcagctccacctccccagcccgcgcccccgggacgcctccgcctccgcgcggcaggggcagatgcaaggcatcccggcgccctcccaggcgctccaggagccggcgccctggtctgcactcccctgcggcctgctgctggatgagctcctggcgagcccggagtttctgcagcaggcgcaacctctcctag

SEQ ID NO: 126174 - DNA, 407 bp, Homo sapiens
gtcaccatcatcaaagactaaaggtggataaaaccacaaagatggggagaaaccagagcagaaaagctgaaaattctaaaaaccagagcacctcttctcctccaaaggatcgcagctccttgccagcaatgaaacaaagctggatggagaaggactttgacaagttgacagaagtagacttcagaaggatgtttgaacccatcacaaggaagctaaaaaccttgaaaaaaagattcaatgaatggctaactagactaaacagtgtagagaagaccttaaatgacctgatggagctggaaaccatggcacgagaactacgtgacccatgcacaagcttcagtagccaattcaatcaagtggaagaaagggtatcagtgattgaagatcaaacgaatgaaatgaagtga

SEQ ID NO: 126175 - DNA, 603 bp, Homo sapiens
tcatgccatggttttcagctccatcaggtcatttaaggtcttctctttactgtttattctagttagccattcatctaatcttttttcagggtttttagcttccttgcgatgggtttgaacatcatcatgtagctcagagaagtttgttattacccaccttctgaagcctacttctgtgaactcatcaaaatcattctccttccagctttgttccattggtggcaaggagctgcgatcctttggaggagaagaggctctctggtttttagaattttcagcttttctgctctggtttctccccatctttgtggttttatctacctttggtctttgacgatggtgacctactttagcctcagcaatggtggacgcccctccccctgccaggctgctgccccgcaggtcaatctcggactgctgtgctagcagtgagcaaggctctgtgggtgtgggacctggattggggaggcggttgccgccgctgctgctgacggtgtgacgttctctgttccggtcacaccacatacgttccgccattcctatgcgatgcacatgctgtatgccggtataccgctgaaagttctgcaaagcctgatgggacat

SEQ ID NO: 126176 - DNA, 995 bp, Homo sapiens
aaatctcagctagtgcttcagacaatgtgtttatgtccgtttcatctccgtcctgctccagctgtttctttaccttgtacaggtacctgtggaaaagtgaaaagccactctactactcatttgtcgacaaaccagtagcatataaaaaaagagaaatggtggtgaatctacagaaacaatttaagcacacgggccgagtccaaccagcaacctgctggaaaaaaaagccccttcaagttttcagttcaactggactgaagaggacactgatagaacgtgtttcccatggacacagccttcagggagtcctgaaagagaaaggccaatcactgctgactaagaattcattatattggcttagtacacagaaattctgaagatgctatggacaccatgtgccaccctatgaagaatcaatttattttctgagtaacaggtttaacctaaatctcttctccttcctgctcagaataaagacttcctttctccaatgaagaagtgagcttagttgagaaggaaactttttgaggaaaaaatacagtgtaaaaaggaaagaaatcaagatccaaggaaagtgaggacgacattgagaaaatgaaatagaaactttctggaaaaatattttaatagtgataataacatcagattttaatataacattccagagaattgtggaaaatactgcatatatatgtatagactctgacacatatttacatatatatcaagtgtgcttagaaaaatgtatattgtaaagcaggtgagcttcatttgattttatttttcagagtatgaacattctaagagaaagttaaaacaatagcaaattgtataattgtatccagaaatgtatactcatcgtattttaaagctaaatttattttttaaactagatcccttcattattctttatgccccagagtaaatcccagatggatcaaagatctaaacataatctttcatatgtaaaaatataaaagtattagtagaaaaca

SEQ ID NO: 126177 - DNA, 1090 bp, Homo sapiens
atggccccgaaaagcctcttgaactctgagcctcagccgcctgtctataaatataaacaagccctgagaccagctcagaaagaagacgtgaagaccaagcgcagcaccgtgggacgtgcccaacccagtgcccggctccaacgggctcgacacacggaggtgctgccctggccatcctcagtggcgctggccacacaccctggagtgtggagccatggcactgctgccaggcatgtggagggcaaagaagcctcagcaatggtggacgcccctccgcctgccaggctgctgcctcgcaggtcaatctcagactgctgcactagcagtgagcaaggctccgtgggcgagggaccagctgagccaggctcaggttataatctcctggtgtgccgtttgctaagaccattggaaaagcgcagtatttgggtgggagtgtcccgattttccagctattgtacacatgtgacaacctatgaagaatcaaattattctctgagttatcagtttatactaaatctcttctccttcctgctcagaataaagacttcccttctccatgaagaagtgagcttagttgagaagaaactttttgagaaaaaatacagtgtaaaaagaaagaaatcaagatccaagaaagctccagggtgggacagtcactggtgcttctgctggctgggacaacagggccccactgtggaacttgcagcccgtgaccccctcctaacggctcctctcagttcccgtggtcccaaaagccctctgtcccgtgcagggctgccccacagtggccttccacatcctcctgatagcagaggcccccgccacccccagggccaccttctgcagctgtgccggcagcttctctgcccagggcacctgcactgacacggagcaccctcagccctacggtcctgtaatattgtacaaaggacgacctggagacacacagaggttcaattacatccccagggccgtgttggactcttgctctatgccatctcccttcaaccctccctacctcagctccccaagcagagttcatggtttccgagcacagagctcagacctccatgccagtacccacaggcag

SEQ ID NO: 126178 - DNA, 362 bp, Homo sapiens
gctgctcgtggtacgcttgtagttcgccttcaacatgccggaaccagggaagatcgttcccgcgccctagaagggctcgaagaaagccgtgactaaggcgcagaacaaggacggcgagaagcgcatgctcagccgcaaggagagctactccgtatacgtgtacaaggtgctgaagcaggtgcaccccgacaccggcgtctcctctaaaggcatgggaatcatgaactccttcgtcgacgacatcttggaacgcatcgcgggtgaggctttccgcctggcgcattacaacaagcgctcgaccatcacctccagggagatccagacggacgtgcgcctgctgctgacccgggagatggtcaagg

SEQ ID NO: 126179 - DNA, 473 bp, Homo sapiens
attcttactcctttatcttgttgcaatgcctgatccagctaagtccgctcccgccccgaagaagggctccaagaaggcggtgaccaaggcgcagaagaaggatggcaagaagcgtaaacgcagccgcaaggagagctactccgtatacgtttacaaggtgctgaagcaagtccaccccgacaccggcatctcctccaaagccatggggatcatgaattcctttgtcaacgatatcttcgagcgcatcgccggcgaggcttcccgcctggctcattacaacaagcgttcgaccatcacctccagggagatccagacagccgtgcgcctgctgctgcctggggaactggccaagcacgccgtgtccgagggcactaaggccgtcaccaagtacaccagctccaaataaatggacgcatgttcaaacccaaaggctcttttcagagccacttaatgatttcaattaagagttttat

SEQ ID NO: 126180 - DNA, 563 bp, Homo sapiens
ctacacagtgctatgccagagccagcgaagtctgctcccgccccgaaaaagggctccaagaaggcggtgactaaggcgcaaaaaaaagacggcaagaagcgcaagcgcagccgcaaggagagctattccatctatgtgtacaaggttctgaagcaggtccaccctgacaccggcatttcgtccaaggccatgggcatcatgaattcgtttgtgaacgacattttcgagcgcatcgcaggtgaggcttcccgcctggcgcattacaacaagcgctcgacccatcaccctccccagggagatcccagacggccgtgcgcctgctgctgccctggggagttggccaagcacgccgtgtccgagggtactaaggccgtcaccaagtacaccagcgctaagtaaacagtggagtggctgaaacttctcagcaggcgcatctacactagtgacctgaggagagaaaccctaaccccacaatggctgcatcttctctgaagacgagactgatgctcatctttgaaatgaaaggcagtgtgtgcattcctccatgatagcatccacaaaca

SEQ ID NO: 126181 - DNA, 509 bp, Homo sapiens
ggcgggattgaatgctttaagatgcctgagccagccaagtctgctcccgccccgaagaagggctccaagaaggcagtgaccaaagcgcagaataaagatggcaagaagcgcaagcgcagccgcaaggagagttactctgtgtacgtgtacaaggtgctgaaacaggtccatcccgacactggcatctcttccaaggccatgggcatcatgaattctttcgttaacgacatatttgagcgcatcgcgggcgaggcttcccgcctggcgcattacaacaagcgctcgaccatcacctccagggagatccagacggccgtgcgcctgctgcttcccggagagctggccaagcacgccgtgtcggagggcaccaaggccgtcaccaagtacaccagctccaagtaaacattccaagtaagcgtcttaacacctaaccccaaaggctcttttaagagccacccagatacccactaaaagagctgtggccagacgccaaattttatttggcggcg

SEQ ID NO: 126182 - DNA, 728 bp, Homo sapiens
cccacgcgtccgcggacgcgtgggccgcgtttgtactgtgtcttaccatgcctgaaccggcaaaatccgctccggcccctaaaaagggctccaagaaagccgtcaccaaagcccagaagaaagacggcaagaagcgcaagcgcagccgcaaagagagctactccatctacgtgtacaaggtgctgaagcaggtccaccccgacaccggcatctcgtccaaggccatgggcatcatgaactccttcgtcaacgacatcttcgagcgcatcgcgggagaggcttcccgcctggcgcactacaacaagcgctccaccatcacatcccgcgagatccaaacggccgtgcgcctgctgctgcccggcgagctggccaagcacgccgtgtccgagggcaccaaggcggtcaccaagtacaccagctccaagtgagtccctgccgggacctggcgctcgctcgctcgagtcgccggctgcttgactccaaaggctcttttcagagccacccacctaatcactagaaaagagcttgttcacttattcccttagtttcttttcataaagtaagttattttagtgtgaaggtcatgggaaatggcatacgtagctttttaactatttggaactcgaggtccccagtgcgtcattggatttgcttttgaatctagagcgtgtctttactcattgtgctgcttagccttcccaggagtcggttctcaattaggctgttgg

SEQ ID NO: 126183 - DNA, 675 bp, Homo sapiens
cggacgcgtgggtaagcggtaggttgacagaactaccgtcttcctgtttttttcctccaattttccggcagttactcccagtcatgcccgagccctcaaagtccgctcctgccccgaagaaaggctccaagaaggcagtgacaaaggcccaaaagaaggacggcaagaagcgcaagcgcagccgcaaggagagctactccgtgtacgtgtacaaggtgctgaagcaggtccaccccgacaccggtatctcgtccaaggccatgggcatcatgaactccttcgtcaatgacatcttcgaggcgcatcgcaggcgaggcttcccgcctggcgcattacaacaagcgctcgaccatcacctccagggagatccagacggccgtgcgcctgctgcttccgggggagctggccaagcacgccgtgtcggagggcaccaaggccgtcaccaagtacaccagttccaagtaactttgccaaatttccaagttgatcgtgatgttgatccgggactcggtgtggtgacggcccgccctgagcacgaaagtgcacgctcttgacaacttccttatgtttggagctttctccaccaccacccccgcccattttcttgtaaaatttttaccatgcagatatgtaataactgcaagtaaaggctgaagacaatgtgagctgaacacg

SEQ ID NO: 126184 - DNA, 937 bp, Homo sapiens
cgcgcccctcgagatcgtcgacattagtccgtgcggtggaattctcgatctgctgctcgtctcaggctcgtagttcgccttcaacatgccggaaccagcgaagtccgctcccgcgcccaaagaagggctccgaagaaagccgtgactaaggcgcagaagaaggacggcaagaagcgcaagcaagccggcaaggaagagcctactccgtatacgtgtacaaggtgctgaagcaggtccaccccgacacctggcatctccttttaaggccatggggaatcatggaactcctttcgttcaacgacatttttcggaacggcatcgcggggttgagggtttcccgcttggggcgcatttaacaacaaggcgtttcgaccattcaccttccaggggagatccatgacgggccgttgcgccttgcttgcttgcccgggggagtttggccaagcaaggccgttttccgaggggcaccaaggcccttcaaccaagttaacaccagcgtttaagttaaactttgccaatggagggacttttctctgggaatttccctgataatggaccaagaaaagcttcttatcaaaaagaagcaacaattgccttcggttacctcattatctactgcagaaaaagaagaacgagaatgcaaccttaccttagaatggccttttccacaagctaaagctggcctcttgatctcattcagattccaaagagaatcatttacaagttaatttctgtctccttggtccattccttctctctaataatcatttactgttcctcaaagaattgtctacattacccatctcctcttttgcctctgagaaagagtatataagcttctgtaccccactggggggttggggtaatattctgtggtcctcagccctgtaccttaataaatttgtatgcctttttttttaaaaaaaaaaaaaaaaaa

SEQ ID NO: 126185 - DNA, 587 bp, Homo sapiens
ttctccctcgtggatctcttttctgtctgtgtcagtcaatgctgccatgtaacagccacctgcaaactcagtgtatacacatgcatttctctcacactgccaggtctgctggggtggctctgctgcctgggcctcgtcctggggctgggctggagagactgcagctccctgggcaccctcttcccacagtgtggaaggtggaggctcccagggcacaagcagaacacgtgccgccctaaggccagaggcggagctggctgctgtcgcttctgcccacattccatgggtgctgtcgagctgtaggtccaagccccacatcaggggagtgagtggggtacaatcctcccatgctgggccccactctggagataggcctggggaatgcccaagaaggaagcccagcccttctgggattttcacatcccacagagaatgggtgctggcagccaacggcaacgaggagaaaagctgaccgccttctcagatcaggatgaggtgtttttacaccaaccccgaggatctgcagccttctcaggttaaattaaacctgtcacagacacagggaggggaaagagcacctaaccacc

SEQ ID NO: 126186 - DNA, 404 bp, Homo sapiens; identical to SEQ ID NO: 120409
  misc_feature (1)...(404): n = a,t,c or g

SEQ ID NO: 126187 - DNA, 244 bp, Homo sapiens
atggataaattcttcgacacatacaccctcccaaaactaaaccaggaagaagttgaatctctgaatagaccaataacaggctctgaagttgaggcaataattaatagcttaccaaccgaaaaaagtccaggaccagatggattcacagccgaattccaccggacatggatgaagctggaaaccatcattctcagcaaactatcacaaggagaaaaaaccaaacaccgcatgttctcactcatag

SEQ ID NO: 126188 - DNA, 2142 bp, Homo sapiens; identical to SEQ ID NO: 121949

SEQ ID NO: 126189 - DNA, 1965 bp, Homo sapiens; identical to SEQ ID NO: 121511

SEQ ID NO: 126190 - DNA, 733 bp, Homo sapiens
gaatatggatgaagctggaaaccatcattctgagcaaactatcgcaaggatagaaaaccaaacaccgcatgttctcactcacaggtgggaatttaacaatgagaacacttggacacaggctgctgccctcgctaccgcaccgacttcgcccgtgtgctcgcctgcacttgcgctgcccgccatggccaccgcccagccgtcgcaggtgcgccagaagtacgacaccaactgcgacgccgccatcaacagccacatcacgctggagctctacacctcctacctgtacctgtctatggccttctacttcaaccgggacgacgtggccctggagaacttcttccgctacttcctgcgcctgtcggacgacaaaatggagcatgcccagaagctgatgaggctgcagaacctgcgcggtggccacatctgccttcacgatatcaggaagccagagtgccaaggctgggagagcgggctcgtggccatggagtccgccttccacctggagaagaacgtcaaccagagcctgctggatctgtaccagctggccgtggagaagggcgacccccagctgtgccacttcctggagagccactacctgcacgagcaagtcaagaccatcaaagagctgggtggctacgtgagcaacctgcgcaagatttgttccccggaagccggcctggctgagtacctgttcgacaagctcaccctgggcggccgcgtcaaagagacttga

SEQ ID NO: 126191 - DNA, 239 bp, Homo sapiens
atggatgaagctggaaaccatcattctcagcaaactatcgcaaagacaaaaaaccaaacactgcatgttctcactcataggcacctaagagagaaaatcttcatcctacccttgggtcaaccacttagtcacgaatctctcatagtggtgtggaatccccggtcaaactggacagctgtgcaagcttttggcttagtgaagtcccacttcttccctaaagatacagtgtcctactcaag

SEQ ID NO: 126192 - DNA, 270 bp, Homo sapiens; identical to SEQ ID NO: 125212

SEQ ID NO: 126193 - DNA, 214 bp, Homo sapiens
atggatgaagctggaaaccatcattctgagcaaactatcacaaggacagaaaatcaaacactgcatgttctcactcggcacaaaaatgctctccacacggcacccgcactacctgtcattccagatgcttaccgctttagtgcctctttcagcaatatgaagttaaatccaggtactgtgagtgctgacttgacttttggttcttatgaaggtg

SEQ ID NO: 126194 - DNA, 687 bp, Homo sapiens; identical to SEQ ID NO: 126112

SEQ ID NO: 126195 - DNA, 333 bp, Homo sapiens
atggatgaagctggaaatcatcattctaagcaaactatcacaaggacagaaaaccaaacaccatatgttctcactcataggctttttgtgaggcagcttcaaggatttctagagctcttggaatacagtttgaaaatcatggatctaagcaacctaaccttcattcccttggtttctcagaggattccaagcgtcctggggaccagggtccatggggtgactgaaaaggttctagatggcattggttcatctgatgaggatgctacctcctggctcctctatgagacatcaggggaaaggagtgcacttgaccttctagggcctgcttctggg

SEQ ID NO: 126196 - DNA, 189 bp, Homo sapiens
atggaatactatgcagccataaaaaatgatgagttcatgtcctttgtacggacatggatgaagctggaaaccatcattctcagcaaactatggcaaggacaaaaaaccaaacaccgcatgttctcactcatagttatactggagtttggaaatagttattcgaggaacagtaagctcagtgtggtttat

SEQ ID NO: 126197 - DNA, 420 bp, Homo sapiens
  misc_feature (1)...(420): n = a,t,c or g
atggaggtgagggtctacggaaattctaatctgattgcttcagttttctttgggaaacgggggtggaaccagcagcaggagctgcacagcctggggcagcagagacagccacagccccaccggcagctcactgataacctcgttgagccggtcgtcgtccgcctcgatgcctacgctgtccaggatcctcttgatgtctttggctctgagggnaggcacatggatgaagctggaaaccatcattctcagcaaactatcgcaaggacaaaaaaccgaacaccgcgtgttctcactcataggtgggaattgaacaatgagaacacacggacacaggaaggggaacatcacacactggggcctgttgtggggtggggggaggggggagggatagcattaggagatatacctgatgttaaatga

SEQ ID NO: 126198 - DNA, 525 bp, Homo sapiens; identical to SEQ ID NO: 125829

SEQ ID NO: 126199 - DNA, 229 bp, Homo sapiens
atggatgaagctggaaaccatcattctcagcaaactatcacaaggacagaaaaccaaacaccgcatgttctcactcgcaggtgtagaaacaggcataaagagatgaagtacttgccagggtcacacagctggtctatcatggagcaggacacaggaagaactgccctgtttaaagcagaggagagggcaggggtctgcagtcctgccactgatccttcccacagcacag

SEQ ID NO: 126200 - DNA, 268 bp, Homo sapiens; identical to SEQ ID NO: 125214

SEQ ID NO: 126201 - DNA, 278 bp, Homo sapiens; identical to SEQ ID NO: 118728

SEQ ID NO: 126202 - DNA, 274 bp, Homo sapiens
atggatgaagctggaaaccatcattctcagcaaactatcacaaagacagaaaaccatacaccacctgttctcactcatagcattattcacaatagccaaaaagtggaaaccacccaggtatctgtcagtggacaaatggataaagaaactgtggtatacacatacacaatggagtattattcagccttcaaaaaggaagcgatcctgccaattgccatagcatggatgggcctgaaggacattatgctaagtgaaataagccagacttggccag

SEQ ID NO: 126203 - DNA, 3312 bp, Homo sapiens
ctatgtagccataaaaacggatgagttcacgtcctttgtagggacacggatgaagctggaaaccaccattctgagcaaactatcgcaaggacagaaaaccaaacaccgcatgttctcactcataggtgggaactgaacaatgagaacaccatgagattcaagtccagctccctgtgccagtccattgtcataggacttttgatcaggcaattccactaccagaaatttaccctgaagatgtatcatactccttctaatataggtgatggcttttttcatatccatgcctgaccagttgttgagcatatagcaaatacaggaagcacagtacacaaatcgcatgtcattttcactgccttcaggtactgcacaaaaactcccatcttccagctgaagggctctcaagcccgctaagcaagcttctttatttactcggcttaagtcgtctccaagaataactaagcatgagaggccagtgtaggtcattgcaatgtggccactatcataaggatgagctgttccaggagcattctcttggcctaatctgtctcctagacgctcagtcaccactctcagtgacggttctatgtgataccacttggaatatctagttccttttaccacccagaattcagatgaaggtaatacagcatgaagtgagacctttgatggattgaacggaatacccaggtatgaagagcctcggaaaccacagcgatttagatttgatctgtcttctgtgggaaggacctgcagggaataaatccactctattatatcatctttgttcaccacatctaaggaatccaacatatccagcccggagagtgcaaaaaatgcaattgtcaacctgcttgtctcgagtgaagaatagcgctccggcaaaacctggaggcagcgctggaaaaatcgcacgtgccgatcccgtaagaaatccagccgctctccctcaccgctccctgctagcctctcatcctcagtggccgccatgctgctccggaagcgacgtccgccgcgacccggaatcagtgcccgcggagagaaagaaccctcctgtgcttttctactcaaagccctcgaggcttgtaaacacctcgcaggccttgtgaaaatcaagtccacaaatccctccgtcagaatttttatcttgggaagcgcaaggtcaaaagcatcaagtacgctttgagacaattctggctctgtagaacctgaggatggtatatccgatgttgtagccaccgctggagcctgggtcctctgcacggagactctggtgtgggtcttgaggaggtggtcagtgaattcctgatagggagacttggtgaatacagtctccttccagaggtcagggttcagcctgctgtagaccttagagatggcataaaaaatgaccatgacgaagttgcccaggatggcagtgcagcccctggctgaggtgtagcagtcattgatagctgccatcagcagcagcttcttggccatgggggccgagacgatgccagtgctcctgggcgcagggatgacccgcgccagcacagagccgtggcagcctgtcaccttgcaagggatggtgtggggcttgccgatcttgttcccccagtagcctctgcgcatgggcacaacggagagcttggccaggatgatggccccgcagatggcagtggccacctccttggagcacttaacacccagatcagtgtggccactgtccctgatggcaacaaacgccttgaacctggtgttctggccggtgcaggtctgcttctgcactggcacgtcttcaaaacctccttcctgcatgttgtttggctggttcatatgggcatgtaggtttgcaaccctcattaaggttttatttctagctctagctctcaaactatgtgggatatgtagaagtggcccagagcctgttggtcctatctttttggttcgttcttcccaacctttggtgggtttgtaaagcctagagggatctctactaacattgttttcaaccttttcttttaattttgccagtcttctttgtttttgtgacttttcatcttcctttgcctgtctatctagaattttcagttcaagtttatgtaaatctctttcttgaaatctggaaatttcatcagcagcatttttccttttttctgccttttctgccttttcccttatctccttttcaagcctcaaaaattcttcctgttctttcttctgctgggtataactttctagtagtaattttaacttaaactggcgctggcgttctttctgatgttttttctctttctcttcttcttcttttaactgggaagcacatttcattgacatttctatacttttctgtttcttccaagcttcaactgccaatttctgtttctttctttgttcctctttttgcttttgattatcctcttgtttattatgaaaaagcacaggtgtgttgtctgccttttcctttaacttgaaaatttcctcccttttttgctgctttttagttttccaaatctgaattgactctttttttctttcttctagagccagaaacttttgataccatttttcatgctgttgaacttcatcttgtgtttttccaggaaggtgttctagaacttcttccataaatgttggcttccctttatgtttgtttctcacctttacaaagttctggtgatcataatcatcccaggcaccttgtcgccctcctgtttgctgaaggaatttttcaaaatctagtacctcttctggaagagtacttggtgttactttgtctacaggaactttgcttgagattgctctgaaagctttctctgtttctgaattacccaaagcccatgtgtcaatttttcttgatatggcactcaactcattattagttgtcttctcttctttaattagctcttcatatatcaacctctgctcttctttaaaagtgttaattgcattttcaatttcttccatcatttctctgagcttctcaacaaaatcaggtgtaggcttcacatcttttaattgatgctgaagtttctttacattattatgtattttggccaattgttgctggatttttgctctttctgttttcctgctgtgaatcaatttattttccaattcttctagcatactatgctcaattctgaagtcacttttttggttgtagaaatgactgtgtttatctttttccatgttaattacttgatttttaaatttttctgctgtgcgtacaaattctgctttcttagtctgattaactttctgcttccagttctgaagatgaaaaggacgaattccacctgaagtactaaaacagccatcactctgcat

SEQ ID NO: 126204 - DNA, 289 bp, Homo sapiens
atggatgaagctggaaaccgtcattctcagcaaactattacaaggacagaaaaccggacaccgcatgttctcactcatagacttggtggtggcttgattttggaggtcagggtagagctggcaagaaatggttggattatcatggatggtatggttggatggcaagaagtggctgttaatcttttgaaggttgtcctaaaaggatttggtggtggactccaaggtgtttggcctgaacaactagaagaagagagccactattttttgagcactttatttgtgggctcag

SEQ ID NO: 126205 - DNA, 233 bp, Homo sapiens
atggaatactatgcagccatgaaaaaggatgcattcatgtcctttgtagggacatggatgaagctggaaaccatcattctcagcagactatcacaaggacaaaaagccaaacactgcatgttctcactcatagcttattatctgaagattctcaaacttatgatcagtgactacaacatagaaggaagttcaggtgttgtgggcctaataccaaatattgtctataaggctag

SEQ ID NO: 126206 - DNA, 804 bp, Homo sapiens; identical to SEQ ID NO: 120427

SEQ ID NO: 126207 - DNA, 2187 bp, Homo sapiens
atggatgaagctggaaaccatgattctcagcaaactgtcacaaggacagaaaaccaaacaccgcatgttctcagtcatagttgggaattgaacaatgagaacacttggacacaggacagggaacatcacacaccagggcctgttgtgcgcccgggtcctgacccatgggctgtgcttgaggagcctttggagtcttttgcaggaggacagccataccagcttgaggtagaccccactcaagaggcaaaagactcctcaacaagctcatattcaagcacattacaaagtactaacgtcccacaacagtccccagagtgtgatgttccccttcctgtgtccgtgtgttctcattggtcaattcccacctctcaccggctcctccgagtgctggttacagtcgaatgtgagctgtatgtcaggtggccccgttgcaatgctgacttgacttgcaccaaggcagtacagaatggatgggatttgctaaaggtgcccacctgcctccaccttttgctggcagttccaggtgttggactttttattgatgaaggtgtaaagcaaggattttcagtggagacattcagggacacacgtggagttttggtacatggatgtatcatgtcatgcctgtgcaacaacagagtgagaccctatctaggaaaaaaacagaaaagtaagaaaacaacagatgttggtgtggaagtggaggaaagtggccgtggatgcgctgctggtgcggaggaggtcttccagtgcatgcagcaggggagccactcagctgctgaggggcaggaatctagcagcaaggtggagagcggaaggcattcctacaacctgtatttgtgggtcattagtccccgaactccagcatccttgcagaatctgcaaattttaaagtgcatcaggttctggacgtggcatgaggagcgcttcctctacatgctcatggagtatgtgccgggtggcgagctcttcagctacctgcgcaaccgggggcacttctccagcaccacggggctcttctactctgcggagatcatctgtgccattgagtacctgcactccaaggagatcgtctacagggatttgaagccggagaacatcctgctggatagggatggtcacatcaagctcacggactttgggtttgccaagaagctgggcttacagattaatgtggaaaagtctcttgtcggaaaagaggtgggtatggagatgtggtggagaagcgaaggaaagataacagtaacaacaatttgggtgggttcctgcaagcaggaaggtgaggagctgaagccaagatacgtgcccacaccaccgcaaacagggcagactcaggacttggaccctctgtggaacacccgagtacctagcccccgaagtcattcagagcaagggccacggaagggccgtggactggtgggccctcggcatcctgatattcgagatgctttcggggtgggttttgtaagagtggcaagcctcgccaaccccaactctccccaggcatttctgggctctccctccactctcgctggcctgagctcttgccttgacggagatgcaggatacagctttctcacagtctcctgcatctcctgcctgcagtaccttttcgttgaagcagctgcagcccgtgtctgcacctttcctatcgcagctcgatttgctggattcccactcttagcaggatcaagcatttccaaagcacgtgtcttccaatgccagccctggtcttcagaactggggcagctgaatgtattgacacagggtcgccccccaaacccagagagaaacaggaatgcgactcccctaactactgttagaacgctgcgggcagtgtattggacagttcacatgtgtagttcgacgtatgaatgtcctgacgctgcagttagaaactatcacagactggaaggtttaaacaagagaactttatcctctcttagtcctggagaccagaaatttgagatcaaagtatctcaggactgtgctccaaggaaggatcctttctgcctctgccagctcctggggctccaggcatccctggacttgtggccgcatcactacagtctctgcctctgtccccatgtggccttctcctctgtgtgtgtgcctcctcttcagtcccttatgacaatacttgtcattggatttggacctaccctattccaggatgatttcgtctga

SEQ ID NO: 126208 - DNA, 891 bp, Homo sapiens
atggacgccatgaaatataacgatttacgcgacttcttgacgctgcttgaacagcagggtgagctaaaacgtatcacgctcccggtggatccgcatctggaaatcactgaaattgctgaccgcactttgcgtgccggtgggcctgcgctgttgttcgaaaaccctaaaggctactcaatgccggtgctgtgcaacctgttcggtacgccaaagcgcgtggcgatgggcatggggcaggaagatgtttcggcgctgcgtgaagttggtaaattattggcgtttctgaaagagccggagccgccaaaaggtttccgcgacctgtttgataaactgccgcagtttaagcaagtattgaacatgccgacaaagcggctgcgtggtgcgccctgccaacaaaaaatcgtctctggcgatgacgtcgatctcaatcgcattcccattatgacctgctggccggaagatgccgcgccgctgattacctgggggctgacagtgacgcgcggcccacatagagagcggcagaatgtgggccagctggaaaaagtggggttaaggattaagaaaatgtggcacatatacaccatggaatactatgcagccataaaaaaggatgagttcatgtcctatgcagggacatggatgaagctggaaaccatcattctgagcaaactatcacaaggacagaaaaccaaacaccgcatgctctcgctcataggctggtcaagagctggattgtctaccccgcccgacctgtttgcgaataaaagaaaaaggatatgcttccgaatgaaaaaagatgacctgtcttcggtaatcgccaggctctttggtagtctgaggtggcagaagatcgccttagactgggagttccagatcagcgtgggcaacata

SEQ ID NO: 126209 - DNA, 1197 bp, Homo sapiens; identical to SEQ ID NO: 117308

SEQ ID NO: 126210 - DNA, 1281 bp, Homo sapiens; identical to SEQ ID NO: 119783

SEQ ID NO: 126211 - DNA, 583 bp, Homo sapiens
atggggagaaaccagagaagaaatgctgaaaattccaaaaaccagaatgcctcttttcctccaaaggaacacaactccttgccagcaagtgaacaaaactgggtggagaatgagtttgacaagttgacagaagtagccttcagaaggtcggtaataacaaacttctccgagctaaagaagcatgttctaaaccattgcaaggaagctaaaaaccttgaaaaaagggacatggatgaagctggaaaccatcattctgagcaaactatcacaaggacagaaaaccaaacaccgcatgttctcactcataagtgggaattgaacaaggagaacacatggacacagggaggggaacgtcacacaccagggcctgttgaggggtggggctctgtgggaggagtagcattagaagaaatatgtaatgtaaatgatgaggatgacgtcaccaaagatcgcattaatggcatgtggaagaagacacacaagaagtttgttcatgacttcaaaggatttgtcaaggatgatgaggttgcaaaaagaaataaggctatgattgagatggcagacaaatttaacttgggtgtgg

SEQ ID NO: 126212 - DNA, 840 bp, Homo sapiens
atgggcaaggacttcatgtctaaaacaccaaaagcaatggcaacaaaagccaaaattgacaaatgggatctaattaaactcaagagcttctgcacagcaaaagaaactaccatcagagtgaacaggcaacctacagaatgggagaaaatttttgcaacctactcatctgataaagggctaatatccagaatctacaaagaacttaaacaaatttacaagaaaaaaacaaacaaccccatcaaaaagtgggcaaaggatataaatggacacttctcaaaagaagacatttatgcaggcaaaaaacatatgcaaaaatgctcatcatcactggtcatcagagaaatgcaagtcaaaaccacaatgagataccatctcatgccagttagaatggtgatcattaaaaagttaggaaacaacagggacatggatgaagctggaaaccatcattctgagcaagctatcacaaggacagaaaaccaaacaccgcatgttctcactcatagtcaggcaccgtgtatgaaatctaacaatgcgctcatcgtcatcctcggcaccgtcaccctggatgctgtaggcataggcttggttatgccggtactgccgggcctcttgcgggatatcgtccattccgacagcatcgccagtcactatggcgtgctgctagcgctatatgcgttgatgcaatttctatgcgcacccgttctcggagcactgtccgaccgctttggccgccgcccagtcctgctcgcttcgctacttggagccactatcgactacgcgatcatggcgaccacacccgtcctgtggatctacccactagtcaattcaccatcttgttga

SEQ ID NO: 126213 - DNA, 1017 bp, Homo sapiens
atggcatggctgtcagtggatcttgagactgagaaggtgcagggcttgcttatggaccccacagttggaatgtggaagtgtcagccaggcacgccaactgccgcagcagggcggacggctccaggcaccggcataggcactggctccatgcaaggctgcggctggagcaggcatactacaagcggcttctcctgcagttgccagcatctggatgaagggaatgtggtggctcctgaaaacctggagatgccagcaactgcagatcctctacgggttggggcacagcagtctgaggtcgacctgggacaactgagcttgctgtggggaggggcatctgccatcactgaggctttagtaggcggttttcccctgacagtgctaaggaggctgggaagtctgggctggttgcagcaaagcagctgtggccagactgcttctctagattcctcctcactagaaagcaacaacatcaacatcaacataaaggacccccacacaaaaaccccatcaaaaggtcatcagtctcaaagatcaaaggtagataaatctagaaagatgaggaaaaaccagtgcaaaaatgctgaaaattccaaaaatcagaatgcctcttgtccttcaaatgattgcaactcctgtccagcaagggcacaaaactggacagagaatgagattgatgaattgacagaagcaggcttcagaagggacatggatgaagctggaagccatcattctcagcaaactatcacaaggacagaaaaccaaacaccacatactctcactcataggtgggaattgaacaatgagaacacatggacacagggaggggaaatcacaccagatgatgaattagagcggttgttatcgaatctgccaccagagggcgatccaggtaaaaaagatcttcgggctactcttcagcccggtgacctgatcttcccccaaactcagatccttgctgcctcccagaaacagcagacacctaagtccaatgtagcttgccaggatctcagggaatga

SEQ ID NO: 126214 - DNA, 1265 bp, Homo sapiens
atgagtgaactcccattcacaactgctacaaagagaataaaatgcctaggaatccaacttacaagggatgtgaaggaactcctcaaggagaatttcaaaacactgctcaacgaaataaaagagggcacaaacaaatggaaaaacattccatgctcatggatacgaagaatcaacatcgtgaaaatggccataccgcccaaggtaatttatagattcaatgccatccccatcaagctaccaatgactttcttcacagaattggaaaaaactacattaaattttttatggaaccaaaaaagagcctgcattgccaaggcaatcctaagcaaaaagaacaaagctggagacatcacgctacctgatttcaaactatactacaaggctacagtaaccaaaacagcatggtactggtaccaaaaaagagatatagaccaatggaacagaacagaggcctcagacgtaacatcacacatctacaaccatctaatctttgacaaacctgagaaaaacaagaaatggggaaaggattccctatttaataaatggtgctggaaaaactggctagccatatggagaaagctgaaactggatcccttccttacaccttatacaaaaattaattcaagatggattaaagacttaaatgttagacctaaaaccgtaaaaaccctagaagaaaacctaggcaataccattcaggacataggcataggcaaggacttcatgactaaaacaccaaaagcaatggccacaaaagccaaaatagacaaatgggatctaattaaactaaagagcctctgcacagcaaaagaaactatcaccagagtgaacagggacatggatgaagctggaaaccatcattctgagcaaactatcacaagaaccgaaaaccaaacaccgcatgttctcaatcataggttggaattgaacaataagaacacttggacacagggaggggaatatcacacactggggcctgtcactgggtgggggactgggggagttgtgaaaagaagaggtagtaccaattctgctaaactagtcaatgaggaggaggaacttttccccaactcattcggtgaagccagcatcactgtgataccaaaacctgccaaaaacacaagaagaagaagaaactaccaaccaatgtcgctgaagaacatacacacaaaaattctcaacaacatactggcaaaccaaaaccagcaacacatcaaaaagtttaattcaccacgatcaagttggctttactcctgggatgcaag

SEQ ID NO: 126215 - DNA, 674 bp, Homo sapiens
ctaatgcgatgaattgacccaccgatccttaactgggtatataccaaaaggaattataaatcatgctactataaggacatatgcaccaagtatgtgtacctgcggcactattcacaatagcaaacacttggaaccaacccaaatgtacatcaatgatagactgggttaagaaaatgtggcatatatacaccatggaatactatgcagccataaaaacagatgagttcatgtcctttggcagggacatggatgaagctggaaaccatcattctgagaaaactatcacaaggacagaaaaccaaacaccgcatgtactcactcataggtgggaatttaacaatgagaacatttggacacagtgcagggagccatcacacaccagggcctatcatgaggtgtggggctgggggagggatagcattaggagaaatacctaatgtaaatgacgagttaatgggcacagcaaaccaacatggcacatgtatacctatgcaacaaaactgcacattgtgcacatgtaccctaaaacttaaagtatagtaataaaaaaaaattcaccaaacaccacaaaaaaaatcaagattgtcaaagaaaatttccacgtcccccgaaatcaaataaatagttagacaagcaggagttaaccagatatggccccattggcaaagtgtcca

SEQ ID NO: 126216 - DNA, 534 bp, Homo sapiens
gcgtcgacggcgggggtgtcttactatgttgctcaggctggtctcaagttactgggcctaagcctctcaaagtgccgggactacaggtgtgagccaccatgcccagagtagatgagtttatacaaagttatggcaatggcaaggaaagctatgagtctgtaacatctacttctttttggatgagttcatgtactttgcagggacatggatgaagctggaaaccatcattctcagcaaactatcacaaggacagaaaaccaaacaccgcatgttctcactctgaggcaatgttttgaaaagaaacagaaaatccttgcaaacgtccaactgcaaggaatatgtggccccagcagctgtgctctaagatccattgccatgtttgtgccgaggttgggcttcccattggctgctttgcatggggcagggatgcggaggcaggctctttattgggggacagaagactgtgctgaccatgactctggcttgaggacccatggcctttccgaaccttccttagactgcacagtggcctag

SEQ ID NO: 126217 - DNA, 1769 bp, Homo sapiens
atggaatactatgcagccataaaaaaggatgagttcatgtcctttgtagggacgtggatgaagctggaaaccatcattctcagcaaactatcacaaggccaaaaaaccaaacaccgcatgttctcactcatagaatttcatctgggatatcacattacatggttctcgttgcatcaccgtaagctcctcttggatgtgacagctttgggagaagtaatcaaactccaaatggtgctgcaaactgaactacgcatggacacgccattcttccgaggacccttagatcgaccccaggaggagtcccagctgctgttccccattcaacgcccttttcagcagcagggctgctgtggtttgctgggggatcacttcaagccctattcatctggttcacttctgcacctggagttgtcacctgaggaggctggagagcatcaaagatgggtgcctcctccttcctttgggatctctgaccttgaggggcaacaagctgatgccagtaggaacacttctgtatatggtgtctggcgacctctgttggggtgtctcacccagttggggcacacaggaaccaggacccatttaacgaagcactttgttccttggtggagggggggcctcaggcccagggagatctgggatctgtccctgagcctctggctggagtttttggagttcctgcagggaagccccacccagtgaggaaggatgagtcagggtcaggtacaatctcctattctattctggccactgtggttagtggagagaatgtgttaaaagcctccctaaagaaggaagaattagatcacactgatggatgtgttgctgtgattgaaggtcagtcctggaaagagcatggtaatatggaaaaatcaagcttcctcactctgagtggcaaatgtttagggagtggatcagagagctgtctgcagcagcagaatatggtgatcacacttattcctttttcactctgtcgtcgttcatctaccatgggcagggacatggatgaagctggaaaccatcattctcagcaaactatcacaaggacagaaaaccagacaccgcatgttctcactcataggtgggaattgaacaatgagaacacttggacacagggcagggaacattttctcagttttggaggcttggcatctaagatcaagatgccagcaagtgaatgcatatgtcatttctctgactctggggtttccaaactgcaagctacagaatccataaaagagtcttattcattcaacaagcatataatgagtacctgctatgtggcagacactgttctagtactcagtgataaaaacaaacaattcttaccttgccctagaatggaaaagagatctgcttttcagttaatattcactgactgcctgctggtgccaatcattgtactaggtgctggagatacatccatggatcagctctacgtggcctctggtctgctggtgtttgcaggactgatttctgctgtctgccttgtggccatagccagagctgctgattctgcgctggatacagccaaggccctggactgtgactcctattacagccctgcagctctttttggagtgggaaggggtcattttcctggggttagaactctctttagttttctcaacacaggattactgaactctgaagaggaagaggaagattcatcaggtcctcaagccaggaggctttctggtgagctgctctggctgtgcacggaccctaaatcagcaaacagattacctcttatccctttctcaatgtag

SEQ ID NO: 126218 - DNA, 642 bp, Homo sapiens
ttttgttgtaaaactgtaaaataagcaaggccaaatatttattgtttggcaacacatagagatatatagagttttacatgtaaaattacctataaatgtcaacagcacattgacatggtaaatacgaagttcaaaatgggatatccctggcatggaatagagagctgggatggcggagggccacacgggaagctgcaatagaatttttgatgtttgcttcattctctaggtgatgtgttcactggtgttcatcttatcatgtttttaaattgacaagcatgttacatatacaccacagaatactatgcagccataaaaaatgatgagttcatgtcctttgtagggacatggatgaagctggaaaccatcattctcagcaaactgtcacaaggacaaaaaaccaaacaccgcatgttctcactcataggtgggagttgaacaatgagaacacatggacacaggaaggggaacatcacacaccagggactgttgtggggcggggggagtggggaagggtaccagctgtctttttaattaatgagagttgcaggtacatgatgctcacaaatattgcaccacacaccccgtacacccatggcaggccagacgctcacttccattgtgccgtgggatgcagacaag

SEQ ID NO: 126219 - DNA, 3868 bp, Homo sapiens
atgagccggagttgccgcgcggcttgcgggcgagccggctgtcagcaccaaggccgggcggcgggctcgccttccccgctgttgctgcggcttcgcttcttctactcagggcttgacaccctgatcaggatgccggcatcccctggccctggcgccttcgaccccggcatcccttttcggaccttccctgaaccagttcttcctgtccccgctccagcccaggcgcagatcgtgcatgcgggccaggcatgtgtggtgaaagaggacaatatcagcgagcgtgtctacaccatccgggagggggacaccctcatgctgcagtgccttgtaacagggcaccctcgaccccaggtacggtggaccaagacggcaggtagcgcctcggacaagttccaggagacatcggtgttcaacgagacgctgcgcatcgagcgtattgcacgcacgcagggcggccgctactactgcaaggctgagaacggcgtgggggtgccggccatcaagtccatccgcgtggacgtgcagtacctggatgagccaatgctgacggtgcaccagacggtgagcgatgtgcgaggcaacttctaccaggagaagacggtgttcctgcgctgtactgtcaactccaacccgcctgcccgcttcatctggaagcggggttccgataccctatcccacagccaggacaatggggttgacatctatgagcccctctacactcagggggagaccaaggtcctgaagctgaagaacctgcggccccaggactatgccagctacacctgccaggtgtctgtgcgtaacgtgtgcggcatcccagacaaggccatcaccttccggctcaccaacaccacggcaccaccagccctgaagctgtctgtgaacgaaactctggtggtgaaccctggggagaatgtgacggtgcagtgtctgctgacaggcggtgatcccctcccccagctgcagtggtcccatgggcctggcccactgcccctgggtgctctggcccagggtggcaccctcagcatcccttcagtgcaggcccgggactctggctactacaactgcacagccaccaacaatgtgggcaaccctgccaagaagactgtcaacctgctggtgcgatccatgaagaacgctacattccagatcactcctgacgtgatcaaagagagtgagaacatccagctgggccaggacctgaagctatcgtgccacgtggatgcagtgccccaggagaaggtgacctaccagtggttcaagaatggcaagccggcacgcatgtccaagcggctgctggtgacccgcaatgatcctgagctgcccgcagtcaccagcagcctagagctcattgacctgcacttcagtgactatggcacctacctgtgcatggcttctttcccaggggcacccgtgcccgacctcagcgtcgaggtcaacatctcctctgagacagtgccgcccaccatcagtgtgcccaagggtagggccgtggtgaccgtgcgcgagggatcgcctgccgagctgcaatgcgaggtgcggggcaagccgcggccgccagtgctctggtcccgcgtggacaaggaggctgcactgctgccctcggggctgcccctggaggagactccggacgggaagctgcggctggagcgagtgagccgagacatgagcgggacctaccgctgccagacggcccgctataatggcttcaacgtgcgcccccgtgaggcccaggtgcagctgaacgtgcagttcccgccggaggtggagcccagttcccaggacgtgcgccaggcgctgggccggcccgtgctcctgcgctgctcgctgctgcgaggcagcccccagcgcatcgcctcggctgtgtggcgtttcaaagggcagctgctgccgccgccgcctgttgttcccgccgccgccgaggcgccggatcacgcggagctgcgcctcgacgccgtaactcgcgacagcagcggcagctacgagtgcagcgtctccaacgatgtgggctcggctgcctgcctcttccaggtctccgccaaagcctacagcccggagttttacttcgacacccccaaccccacccgcagccacaagctgtccaagaactactcctacgtgctgcagtggactcagagggagcccgacgctgtcgaccctgtgctcaactacagactcagcatccgccagttgaaccagcacaatgcggtggtcaaggccatcccggtccggcgtgtggagaaggggcagctgctggagtacatcctgaccgatctccgtgtgccccacagctatgaggtccgcctcacaccctataccaccttcggggctggtgacatggcctcccgcatcatccactacacagagcgccagatccgctggcccccagtcctggctctgaggaccctgtcctctggtcccaagcagggtatcctctgcagagccccacacctcagttctgacttggtttccccgcttgctttctcagccatcaactctccgaacctttcagacaacacctgccactttgaggatgagaagatctgtggctatacccaggacctgacagacaactttgactggacgcggcagaatgccctcacccagaaccccaaacgctcccccaacactggtccccccaccgacataagtggcacccctgagggctactacatgttcatcgagacatcgaggcctcgggagctgggggaccgtgcaaggttagtgagtcccctctacaatgccagcgccaagttctactgtgtctccttcttctaccacatgtacgggaaacacatcggctccctcaacctcctggtgcggtcccggaacaaaggggctctggacacgcacgcctggtctctcagtggcaataagggcaatgtgtggcagcaggcccatgtgcccatcagccccagtgggcccttccagattatttttgagggggttcgaggcccgggctacctgggggatattgccatagatgacgtcacactgaagaagggggagtgtccccggaagcagacggatcccaataaaggtgcaagacgggaaggagctgcctgcgatggcctgaaattccacctttcatcccctatggatgacggagagcttacagatgaccctattgaatgcaagcacctttggatccatagagtggacagtaaaggtgctcagtacatgttggctgagctgaactgcatacatgtggcccccaggttcctggtctttatggacgaagggcacaaggttggtgaaaaggactccgggggccagcccttccaagtttacactgatttctccttttaccctcatgctatccctgagaagatgtcaataatgcccacgttacaggtgggaaaactgaggcttagagaggaggaggaatctgcctacggtcacacagctgcaaaggctagagctgggaccaggagctggtctcttaaccgaccacctgagctcaagagcttttctctctggaccaacatgacccaaagtgtgcgcgagcctatcacaggtcccctgcaatgccaaacatacacgcacagcaatacacaacacctggggacatggatgaagctggaaaccatcattctcagcaaactgacacaagaacagaaaaccaaacaccacatgttctcactcataactgggagctgaacaatgagaacatatggacacagggaggtgaacatcacataccgggacctgaggtcaagcagaatggcactgagaaagagattgtttcatttcttgaccagaaggttactggtggcccttcaaaaggaagtcccaagagagttgtggtaagaaaaggcatcccagagattcaatttagagaagataatgaggaattaagagaaagttt

SEQ ID NO: 126220 - DNA, 1701 bp, Homo sapiens
atggatgaagctggaaaccatcactctcagcaaactatcgcagggacagaaaaccaaacactgcatgttctcactcatacgtcggaattgaacaatgagaacacttggacacagggtacccccgaacctaaaataaaagttaaaaaagaaaaagaacagtctcttggtggatggacactgatgatagcagagacagctgctaggcatttgttccaagacaaacagcgacagattaaagtctccggaggagccaagatggccgaacaggaacagctccggtctacagctcccagcctgagcaacacagaagacggaataaccaatacagagaagtgcttaaaggagctgatggagctgaaaaccaaggctccagaactacgtgaagaatgcagaagcctcaggagccgatgcgatcaattggaagaaagggtatcagcgatggaagatgaaatgaatgaaatgaagcgagaagggaagtctagagaaaaaagaataaaaagaaatgagcaaagcctccaagaactatgggactatgtgaaaagaccaaatctatgtctgattggtgtacctgaaagtgatggggagaatggaaccaagttggaaaacactctgcaggatattatccaggagaacttccccaacctaaaccaaaaacgagcccatatagccaagacaattgtaagccaaaagaacaaagctggaggcagcacgctaactgacttcaaactatactacaaggctgcagtaaccaaaacagcatgggacatggatgaagctggaaaccatcattctcagcaaactaacacaagaacagaaagccaaacaacgcatgttctcactcataggtgggaactgaacaatgagaaccacgggtacttcacccgggtgaagaccttcaaagtcacatacacagagaactgtgtaagctacaccaggatttccagtgaacaggactacacctgcatagcagagaatgctgtcagtaatttatccttctctgtctctgcccagaagctttgcgaagattccctatctttgtctactcagcgaacacagggccccgcagagtccgcaaggaacctagagtatgtttcagtgtctccaacgaacaacactgtgtatgcttcagtcactcattcaaacagggaaacagaaatctggacacctagagaaaatgatactatcacaatttactccacaattaatcattccaaagagagtaaacccactttttccagggcaactgcccttgacaatgtcgtggcggaaggatccagctggtcaatcggagtgcctctagggagtgaccgacgtgagatggcggtaacaatgaggtgccacgccgcagccgtccgtatggccgcaagacgatcgctgcaccagatatccgtccacatttgcgcagcaaaagcaaaaatctgggctgaggatgagatggctgcattgacagaagtaggcttcagaaggtgggtaatagcaaactgtggtgagttaaaggagcatgttctaactcaatgcaaagaagctaagaattatgataagacaatacaggagctgatagccagaatagccagtttagagaggaacaaacccgacctgatggagctgaaaaccacaacacgagatactgatcacaagtatcaacagcagaacagaccaagtggaggaaagaatcatagaactcgaagactatctttgtga

SEQ ID NO: 126221 - DNA, 808 bp, Homo sapiens
atggccttcctagaaacttctgcacccctgtatgaacacatatggacacttcaggttgctttctccactgttggtctgggagagaccctgaaagttgccatgatcagcatgtccacatcatctgggtattttcttcagctattacaatactgctgctcctcaaccatcaccatcactggatacaagggcttcctaagagacctgaaggtggagacaagggccgatggtgtaatgaggacaatggctcccgaaaagctgctaaagagtatgccaatactacagggacaaattgatgcactgcttgaatttgatgtgcatccaaatgaactaacaaatggtgtcataaatgcagcatttatgcttcttttcaaagatcttatcaaactttttgcttgctacaatgatggtgttattaacttactcgggacatggatgaagctggaaaccatcattctcagcaaactattgcaacgacagaaaaccaaacactgcatgttctcactcataggtgggaatcgaacaatgagaacacttggacacaggaaggggaacatcacacactgggccctgttggcgggtgggggtgctgcggaaggatagcattaggagaaatacctaatgtaggcctagataatatattacttagccttgagaaactgagaaatcccccactgtgtcaccttctagagcccctgtcaaccctttgcaactccaagagacaagtcactcctactttccagaaaacattcagaagcaagcaccagcccttccccagaggtcaagcagcagaaagggccttccactgcag

SEQ ID NO: 126222 - DNA, 883 bp, Homo sapiens
atggagcagctctcaccgatggccagctcctaccactctgaccacgctgctgtctccctggccatcttctttgactacaaaggaataaaactaggtatcaagctggcggctgttcccagtgccttgcccacccctgccgggccgtcggactcggcggggcccctgtggcatccctgtccagtccctgtcaccacccagtttttccctctggacccaggaattcaaagtaagcaaggaggtccgctgctccagttggctgcaaataattacaaccttaagcccaagcagcactttgggtcctggtttgggaccatgaagcggctcgggacatggatgaagctggaaaccatcattcttagcaaactatcacaaggacaaaaaaccaaacaccgcatgttctcactcacagaaagccgtctgagacatcttgcaccacacaaatctccgacttggccttcatacagccttttgtgaaagcaaatataattacagagcaaaagagaggaacaaaacagcagattttgaatctccccctgaatggccagaaaaatgagcaggcaactggagatgaggacatggatgaagctggaaatcatcattctcagcaaactaacacaagaacagaaaaccgaacaccgcatgttctcactcataagtgggaactgaacaatgagaacacatggacacgaggaggggaacatcacacaccagggcctgttggcagctctgtgtgggccccagccaatttcacaccagtacccctctcatctcccacccaacactcccatgttgacatcactgcagactccactaatgcccacgctctggaatgcacaatccagaggagcaagggggtgaatcttagaccaagcacatcccggga

SEQ ID NO: 126223 - DNA, 1074 bp, Homo sapiens
atgaggttttacggacagctggctgaagacccagggcagcaaaaagctggggaaacaacaaggcatactgaagactatatttctcagctgcctttgcagagacaagggatccccgaacttgcccttcagaaagatctttttattaacaagatttatggaaaagagttcaatgtctgcaggtcgactctagaggatccccgagttcatgtcctttgtagggacatggatgaagctggaaaccatcattctgagcaaactattgcaaggacagaaaaccaaacaccgcatgttctcactcataggcgggaattgaacaatgagaacacttggacacagggtggggaacatcacacaccagagcctgtcataggacctatgggaactctgctagactccactggtctgaacactgacacttggaagccttataactgcatctgtccagcttcagacagagtgcctgatcagatattgcctgaggacacttgcagacaggaatataattttggcaatactgaaaatggtgtcatgatgcaaccaagagaggctactgaagctgaggacactgacgcccacagcactcaagtgactgttccaggtcaaatagctgagaataaaatacctaggaatccaacttacaagggatgtgaaggacctcttcaagaaaaactacaaaccactactcaaagaaataaaagaggacaaaaactaatggaagaacattccatgctcatggataggaagaatcaacatcatgaaaatggtcgtactgcccaagggacatggatgaagctggaaaccgtcattctcagcaaactatcacaaggacagaaaaccaaacaccgcatgttctcactcataggtgggaattaaacaatgagaacatttggacacaggatggggaacatcacacactgggcctgtcatgggatgggggaaggcattctgttgctcctgagataggaatctggcaggacttgttttaccagaaaccaatcgctaagaccccactggtgaaacaggatgaggtgaagaagccagtcaaaacctgccaaaacaaagatggccacaaaa

SEQ ID NO: 126224 - DNA, 446 bp, Homo sapiens
agcccttccttctttaactcggtgtctgaggggttttgtctacggctcgtcctgctacatttcttggttccctgactgggaagcgaggtgattaacggacagttgaggcagcctgttaggcggcttaggcctgccctgtggagcatccctgcgggggactccggccagcttgagcgatgcggatcctgagagcgctcccgggtaagcaaattccctggtggaacgcctcaccagagcagcgtgtggcaggcccccgtggaggatcaacgcagtggctgaacaccgggaaggaactggcacttggagtctggacatttgaaacttggtaagactagtcttgggagcttgcccactccatttgagtggaagcgaggcctgatcacccacggcatgcccgttctggcactttggtttttgtttttgacttgacttggattgcttgatac

SEQ ID NO: 126225 - DNA, 1245 bp, Homo sapiens; identical to SEQ ID NO: 122814

SEQ ID NO: 126226 - DNA, 3313 bp, Homo sapiens
atgaacaaggtgattctaaaatctatatggaaatgccatggaccaagaagagccaaaataaacctgaaaaagaacaagaataagagtttcctgaagtgtggcctatggagactagcattagaatcactggaggagcttaaagatatagagacagggatagggcctgagattctgactttgttcttaactcttgaaatgagaagcgtgaatccgtggtggtttcatgacctgcataatcacactacctgtttttctgtcacagattgccttctctcagcacagcaattttatggacctggtcctggatgttcagttcctgtaccagctaaccagtcattttggactcgagaggaatattctaacttaaagctccccagagcatctcataaagctgtggtcaatggaaacattatgtgggttgttggaggatatatgttcaaccactcagattataacatggttctagccaccatgtatgtgttcggtggtttcaatagtctcctcctcagcgacatcctggtattcacctcggaacagtgtgatgcgcatcggagtgaagccgcttgtttagcagcaggacctggtattcggtgtctcttgaccatgacagatgtgaccagcacacagattgttacagctgcacagccaacaccaatgactgccactggtgcaatgaccattgtgtccccaggaaccacagctgctcagaaggccaggtatgagaattgccccaaggataaccccatgtactactgtaacaagaagaccagctgcaggagctgtgccctggaccagaactgccagtgggagccccggaatcaggagtgcattgccctgcccgaaaatatctgtggcattggctggcatttggttggaaactcatgtttgaaaattactactgccaaggagaattatgacaatgctaaattgttctgtaggaaccacaatgcccttttggcttctcttacaacccagaagaaggtagaatttgtccttaagcagctgcgaataatgcagtcatctcagagcatggcccgtgtcaccgtgtgttctcagtcctcgcatgagagcctggttgacactggttctctctgctttggggaccgtatctggctgtgcgctatgtggagggctgagctcgtgtcttcctggaacaccagtactctgggactgaaggctgctgcctgcatcaacccactcaatggtagtgtctgtggaaggcctgcaaaccacagtgctaagcagtgccggacaccatgtgccttgaggacagcatgtggagattgcaccagcggcagctctgagtgcatgtggtgcagcaacatgaagcagtgtgtggactccaatgcctatgtggcctccttcccttttggccagtgtatggaatggtatacgatgagcacctgcccccctgaaaattgttcaggctactgtacctgtagtcattgcttggagcaaccaggctgtggctggtgtactgatcccagcaatactggcaaagggaaatgcatagagggttcctataaaggaccagtgaagatgccttcgcaagcccctacaggaaatttctatccacagcccctgctcaattccagcatgtgtctagaggacagcagatacaactggtctttcattcactgtccagagaataaaatacctaggaatccaacttacaagggacgtgaaggacctcttcaaggagaactacaaaccactgctcaacgaaataaaagagggcacaaacaaatggaagaacattccatgctcatggatagaagaatcaatatggtgaaaaaggtaatttatagattcaataccatccccatcaagctgccaatgactttcttcacagaattggaaaaaactactttaaagttcatatggaaccaaaaaagagcccacatcgccaagtcaatcctaagccaaaagaacaaagctggaggcatcacactacctgacttcagactatactacaaggctacagtaaccaaaacagcatggtactggtaccaaaacagagatttagaccaacggaacagaacagagccttcagaaataataccacacatctacaactatctgatctttgacaaacctgacaaaaacaagaaatggggaaaggatttcctatttaacaaatggtgctgggaaaactggctagccatatgtagaaagctgaaactggatcccttccttacactttatacaaaaattaattcaagatggattaaagacttaaatgttagacctaaaaccataaaaaccctagaagagaacctaggcaataccattcaggacacaggcatgggcaaggacttcatgactaaaacaccgaaagcaatggtaacaaaagctaaaattgacaaatgggatctaattaaactaaagagcttctgcacagcaaaagaaactaccatcagagtgaacaggaaacctacagaatgggagaaaatttttgcaacctactcatctgacaaagggctaatatccagaatctacaaagaactcaaacaaatttacaagaaaaaaacaaacaaccccatcaaaaagtgggcaaaggatatgaacagacacttctcaaaagaagacatttatgcagccaacagacacgtgaaaaaatgctcatcatcactggccatcagagaaatgcaaatcaaaaccaccatgagatatcatctcacaccagttagaatggcgatcattaaaaagtcaggaaacaacgggtgctggagaggatgtggagaaataggaacacttttatactgttggtgggactgtaaactagctcaaccattgtggaagtcagtgtggcgattcctcagggatctagaactagaaataccatttgacccagccatcccattactgggtatatacccaaaggaatataaatcatgctgctacaaagacacatgcacacgtatgtttattgaggcactactcacaatagcaaagacttggaaccaacccaaatgtccaacaatgatagactggattaagaaaatgtggcacatatacactgtggaatactatgcagccataaaaaatgatgagttcatgtcctttgtagggacatggatgaagctggaaaccatcattctcagcaaactatcgcaaggacaaaaaaccaaacacagcatgttctcactcataggccttgcagtattaaaacatgtgctaacaccacgaataaaggcaactcacgttgcttttgattgcatgaagaattatttagatgcaatttatgatgttacggtggtttatgaagggaaagacgatggagggcagcgaagagagtcaccgaccatgacgg

SEQ ID NO: 126227 - DNA, 3769 bp, Homo sapiens
atggagtgggtactgcttggatctccttctagaaaacctgttggagaagcatggttgactgcagatccaccatatttgtaccgaggccatctttctaccagtctagttacagccagcttccattgcaacttctacagaaagttcaggaaaataacgactttcaacattatagaatttcaagttagaagtgatcattttcaactgatgaatctcattgaggaagatgaggcatcaagaggtagaagactaactcagcaggtgactatggaaatggtgtcagacaaaaagcaaattcgagtgattttcttattcaatttaaaaatgggtcataaagcagcagagacaactcgcaatatcaacaacgcatttggccaaggaactgctaacaaatgtacagtgctcaagaagttttgcagaggagacgagagccttgaagatgaggagcatagtgaccagccatcagaagttaacaactgccaactgagagcaattattgaagctgatcctcttacaaccacacaagaagttgccaaagagcttgacgtcgaccattccagggtcgcttggcatttgaagcaaattggaaaggtgaaaaagctcaataactttctgaatcctggtgaaaccattatatctgaggactatgctcagcaaatctatgagatgcaccaaaaactgccacacctgcaactggcattggtcaatagaaagggcccaattcttctccatgacaacgcccaaccacacgtcgcacaaccaatgcttcaaaagttcaatgcattgggctaccaagttttggctcatccttcatattcacctgacctctcatcaacagactaccacttcttcaagcatctccacaactttttgcagagaataaaatacctaggaatccaacttacaatggatgtgaaggacctcttcaagaagaactacaaaccactgctcaatgaaataaaaggggacacaaacaaacggaagaacattccatgctcatggataggaataatcaatatcatgaaaatggccatactgccagaggtaatttatagattcaatgccatccccatcaagctaccaatgactttcttcacagaattggaaaaaactactttaaagttcatatggaaccaaaaaagagctcgcattgctgagtcaatcctaagccaaaagaacaaagctggaggcatcacactacctgacttcaaactatactacaagactacagtaaccaaaacagcatggtactggtaccaaaacagagatatcgaccaatggaacagaacagagccctcagaaataataccacacatctacaactatctgatctttgacaaacctgacaaaaacaagaaatggggaaaggataccctatttaacaaatggtgctgggaaaactggctagccatatgtagaaagctgaaactggatcccttccttacaccttatacaaaaattaattcaagatggattaaagacttaaatatgagacctaaaaccataaaaaccccagaagaagacctaggcattaccattcaggacataggcatgggcaaggacttcatgtctaaaacaccaaaagcaatggcaacaaaagccaaaattgacaaatgggatctaattaaactaaagagcttctgcacagcaaagggaactaccatcagagtgaacaggcaacctacagaatgggagaaaatttttgcagtctactcatctgataaagtgctaatatccagaatctacaaagaactcatacaaatttacaagaaaaaaacaaacaaccccagtaaaaagtgggtgaaggatatgaacagacacttctcaaaagaagacatttatgcagccaacagacacaggaaaaaatgctcaccatcactggccatcagagaaatgcaaatcaaaaccacaatgagatatcatctcacaccagttagaatagcgaccattaaaaagtcaggaaacaacagagacatggatgaagctggaaaccatcattctcagcaaactatcgcaaagacagaaaaccaaacaccgcatgttctcactcataggtgggaattgaacaatgagaacacttggacacaggaaggggaacatcacactctggagactgttgtgggggacatggatgaagccggaaaccatcattctcagcaaaatatcacaaggacagaaaaccaaacaccacatgttctcactcataagcgggagttgaacaatgagaacacatggacacagggaggggaacataacataccagggcctgttgtgggttcctggagagccttgaacactggactgagaagctttgactttatcccagggacagtaagagagcctgtaaagattttaggcagaaggttgacatcggatttgcagattaggaacagccctttagaggctgctgtacaagatgcagaaaaggcctttgacaaaattcaacagccctttatgctaaaaactctcaataaaatagctattgatgggacgtatctgaaaataataagagctatttatgacaaacccacagccaatatcatactgaatgggcaaaaactggaagcattccctttgaaaacgggcacaagacaggggtgccctctctcaccactcctatgcaacatagtgttggaagttctggccagggcaatcaggcaggagaaggaaataaagggtattcaattaggaaaagaggaagtcaaattgtccctgtttgcagatgacatgattgtatatctagaaaaccccattgtctcagcccaaaacctccttaagctgataagcaacttcagcaaagtctcaggatacaaaatcaatatgcaaaaatcacaagcattcttatacaccaataacagacaaacagagagccaaatcatgagtgaactcccagtcacaattgcttcaaagagaataaaacacctaggaatccaacttacaagggctgtgaaggacctcttcaaggagaactacaaaccactgctcaatgaaataaaagaggacacaaacaaatggaagaacattccatgctcatggataggaacaatcaatatggtgaaaatggccatactgcccaagaaagaagttcttcagatgcgaggtttcaacaaaaccactgtggttacacagttcatcctggtgggtttctccagcctgggggagctccagctgctgctttttgtcatctttcttctcctatacttgacaatcctggtggccaatgtgaccatcatggccgttattcgcttcagctggactctccacactcccatgtatggctttctattcatcctttcattttctgagtcctgctacacttttgtcatcatccctcagctgctggtccacctgctctcagacaccaagaccatctccttcatggcctgtgccacccagctgttctttttccttggctttgcttgcaccaactgcctcctcattgctgtgatgggatatgatcgctatgtagcaatttgtcaccctctgagggacatggatgaagctggaaaccatcattctcaggaaactattgcaaggacagaaaaccaaacactgcatgttctcactcataggtgggaattgaacattgagaacacatggacacaggaaggggaacatcacacactggggcctgttgtggggtgtgaggaaccttcaccaccccattttgtggtacaaccatcatttactgatcaaaacagaaaactgatcgtggtcattgtttcttctctctccctgaaacgctatttcccatacaacccaaaaagtctcg

SEQ ID NO: 126228 - DNA, 2509 bp, Homo sapiens
atggaatactatgcagccataaaaaatgatgagttcaagtcctttgttgggatatggatgaagctggaaaccatcattctcagcaaactatcacaaggacaaaaaaccaaacaccgcgtgttctcactcagagactataagctctcccattttcttatttctcttggcttcatacttcttaagagaaaagatgtgattgggttgtccagtcatcatccaggtgagcagtgctctcatgactcacctctcaggtccttgatggtctttgggccagagctgatctctggtcatagtcccttagagccagtggtggtgcctcgtcgaagtcatggctgcctgataggggctgtaaatctcaaatccagcaatcgaaccccagtggtacaggaatttgaaagagacttggcgggtcgtgcagaaatactggggaagacatccctgaagatctggaatgtgacacggagagactcagccctttatcgctgtgaggtcgttgctcgaaatgaccgcaaggaaattgatgagattgtgatcgagttaactgtgcaagtgaagccagtgacccctgtctgtagagtgccgaaggctgtaccagtaggcaagatggcaacactgcactgccaggagagtgagggccacccccggcctcactacagctggtatcgcaatgatgtaccactgcccacggattccagagccaatcccagatttcgcaattcttctttccacttaaactctgaaacaggcactttggtgttcactgctgttcacaaggacgactctgggcagtactactgcattgcttccaatgacgcaggctcagccaggtgtgaggagcaggagatggaagtctgtcacactgataaaagaggtgggttcccatggtcttgggcagctccccacctgtggtttttgcaggatacagccttgctccccgctgctctcacgggctggtgttcagtgtctgtggcttttccaggtgcacagtgcaagctgtcagtggatctatcattctggggtctggaggatggtggccctcttctcacagctccactaggcagtaccccagtagggactctgtgtaggggatctgaccccacatttcccttccacgctccccagtcgtgtgttcagccagaagcaacatatggcctacacttctacttggttcaactgctaccatttccagagacttgcctgacccttttccaataatcgtattgaggtaggtatccctcttcggtgttcccacagctccttgtccttgatcacactgtttaccacaccaaatggttatcgttagtttgtcttcttgactgggcagattagctagatacagagtgctgattggtgcatccaccaaccccaagctagacacagtgctgattggtgcatatacaatcctccctctggacacaaaagttctccaagtccctcctgactcaggagcccagctggcttcctgtagtggatcccgcaccagggccaagggcggagctgcctgccagtcccacaccacgggcgtgcactcctcagcccttgggcggtcgatgggactggcccctggacaagggggcggcacccgtccgggagacttggtggcagcccaccgcggtgggggggcttgggcatggctggctgcaggtcccgagccctgccccacggggaggtggtgcccggggccagcgggccgctccgagtgcagggcttgtggagcccgcgtccacctggaactggcactggcctgccatagccacaggcagtcccggttcccgcccacgcctatccctccacacctcctgcattcacataagacccacatttgctcctggataaatattccccagctgtcactcttgctgccgaaaactgttccacttctccaggcttctttgtgccccccaccccccaggaggacagcatgttcctcttctccttgcttctttgtccccccaatgacaggcccctgtgtgtgatgttccccaccctgtgtccaagtgttctcattgttcagttcccacctatgagtgagaacatgcggtgtttggttttctgtccttgtgatagtttgctcagaatgatggtttccagcttcatccatggcccatgctgttttggttactgtagccttgtagtatagtttgaagtcaggtagcatgatgcctccagctttgttcttttggcttaggattgtcttggcaatgtgggctcttttttggttccacatgaacttgaaggtagtattttccatttctgtgaagaaagtcattagtagcttgatggggatggcattgaatctataaattaccttgggcagtatggccattttcaggatattgattcttcctatccataagcatggaatgttcttccatttgtttgtgtcatcttttatttcattgaacagtggtttgtagttcttcttgaagaggtccttcacatcccttgtaagttgtattcctaggtgttttattctctttgtagcaattgtgaatggaagttcactcat

SEQ ID NO: 126229 - DNA, 3200 bp, Homo sapiens
caaattctgtgaagaatctcgttggtatctgataggaattgcattgaatctgtaaattcctgtgggcactatggccattttaatgatattgactcttcctatccatgaacatgaaatatttttcttttttttttctttgggcttttttttttattggactctaagttttagggtagtacatgtgcacaacgtgcaggttttgttaccatatgtatacatgtgccatgttggtttgctgcaccccgttaactcatcatttaacattaggtatatctcctaatgctatccctcccccatctccccccaccccatgacaggccccagtgtgtgattgtgtgatgtccctcaacctggggtccaagtgttccccattgttccagttcccacctatgagtgagaagcatgcggtgtttggtttttttgtccttgtgataagtttgctgagaatgatggttttccagcttcatccagtgtcccctacaaagtaggacacgaactcatcatttttttatggcttgcataggtattccatgggtgtatatgttctacatttttttcttaatccaggtctatccattggatgggacattttggggttgggttccaagtctttgctattgtgaatagtgccacaataaacatatgtgtgcatgtatctttatagcagcatgatttataatcctttgggtatacacccagtatatacccagtaatgggggtggctgggtcaaatggtatttctagttctagatccctgaggaattgccacaccgacttccacaatggttgaactagtttacagtcccaccaacagtgtaaaagtgttcctatttctccacatcctctccagcacctattgtttcctgactttttaatgatcaccattctaactggtgtgagatggtatctcattgtggttttgatttgcatttctctgatggccagtgatgatgagcattttttcatgtgttttttggctgcataaatgtcttcttctgagaagtgtctgttcatatcctttgcccactttttgatggggttgtttgtttttttcttgtaaatttgtttgagttcattgtagattctggatattagccctttgtcagatgagtaggttgcaaaaattttctcccattctgtaggttgcctgttcactctgatggtggtttcttttgctgtgcagaagctctttagtttaatgagatcccatttgtcaattttggcttttgttgccattgcttttggtgttttcgacatgaagtccttgcccatgcctatgtcctgaatggtattgcctaggttttcttctagggtttttatggttttaggtctaacatgtaagtctttaatccatcttgaattaatttttgtataaggtgtaaggaagggatccagtttcagctttctacatatggctagccagttttcccagcaccatttattaaatagggaatcctttccccattgcttgtttttgtcaggtttgtcaaagatcagatagttgtagatatgtggcattatttctgagggctctgttctgttccattgatctatatctctgttttggtaccagtaccatgatgttttggttactgtagccttgtagtatagtttgaagtcaggtagcgtgatgcctccagttttgttcttttggcttagggatgacttggcaatgagggctctcttttggttccatatgaactttaaagtagttttttccaattctgtgaagaaagtcattggtagcttgatggggatggcattgaatctgtaaattaccttgggcagtatggccattttcacgagattgattcttcctcctacccatgagcatggaatgttcttccatttgtttgtatcctcttttatttccttgagcagtggtttgtagttctccttgaagaggtccttcacatcccttgtaagttggattcctaggtatgttattctctttgaagtgattgtgaatgggagtccactcatgatttggctctctgtttgtctgttattggtgtataagaatgcttgtgatttttgcacattgattttgtatcctgagactttgctgaagttgctcatcagcttaaggagattttgggctgagacagtggggttttctagatatacaatcatgtcatctgcaaacagggacaatttgacttcctcttttcctaattgaataccctttatttccttctcctgcttgattgccttggccagaacttccaacactatgttgaataggagtggtgatttttgcaatctactcatctgacaaagggctaatatccagaatctacaatgaactcaaacaaatttacaagaaaaaaacaacccaatcaacgggctaaggatatgaaaagacccttctcaaaagaagacattgatgcagccaacaaacacatgaaaaaatgctcatcatcactggccatcagagaaatgcaaatcaaaaccacaatgagataccatttcacaccagttagaatggcgatcattaaaaagtcagggaacaacaggtgctggagaggatgtggagaaataggaacacttttacactgttggtgggactgtaaactcattcaaccattgtggaagtcaatgtggcgattcctcagggatctagaattagaaataccatctgaccgagccatcccattactgggtatatacccaaaggattataaatcatgctgctataaagacacatgcacacgtatgtttattgcggcactattcacaatggcaaggtcttggaaccaacccaagtgtccaacaatgatagactggattaagaaaatgtggcacatatacaccatggaatactatgcagccataaaaaatgatgagttcatgtcctttgtagggacatggatgaaactggaaaccatcattctcagcaaactatcacaaggacaaaaaaccaaacaccacatgttctgactcataggtgggaattgaacaatgagaacatatggacacaggaaggggaacatcacactccggggaatgttgtggggtgggaggaggtggggagggatagcattaggagatatacctaatgctaaatgatgagttaatgggtgcagcacaccaacatggcacatgtatacatatgtaacaaacctgcacgttgtgcacatgtaccctagaacttaaaagtataataataataaaattaaaaaaatatatatatataaaca

SEQ ID NO: 126230 - DNA, 321 bp, Homo sapiens
ccctgcccccagaggtggagcctacagaggcaggcagacctccttgagctgtggtgggctccacccagtttgagcttcctggctgctttgtttacctaagcaagcctgggcaatggcgggcgccctccccaagcctcgctgctgccttgcagtttgatctcagactgctgtgctagcaatcagcgagactccgtgggcgtaggaccctccgagccatgtgcgggatataatctcctgttgtgccgttttttaagccagtcggaaaagcacagtattcgggtgggagctgtagactgtagctgttcctatttggccatcttg

SEQ ID NO: 126231 - DNA, 522 bp, Homo sapiens
atggtgggcgcccctcccccagccttgctgccgccttgcagtttgatctcagactgctgtgctagcaatcagcgagactccctgggcgtaggaccctccgagccaggtgcgggatataatctcgtggtgcgccgttttttaagccggtcggaaaagcgcagtattcgggtgggagtgacccgattttccagcctgaaggttggaacagctatgttgcacaaacagcaaagatggcagcccacccctccctctgggagctccatcccagccccatcctgtgcctataaaaaccccgagaccctagcaggcatacacacaagctgctggacctcaagaggagaagattggcggaagaagacacaggtggctggatgtccagaggtgcacatcagcggaggaacacacaggtggctggacgtggagaggggcacattagtaggccctgacaggctggcaggccaccgacaggcagaacaacgtggaatctggctggggcagtcggaggagagcccaggctactga

SEQ ID NO: 126232 - DNA, 480 bp, Homo sapiens; identical to SEQ ID NO: 121694

SEQ ID NO: 126233 - DNA, 471 bp, Homo sapiens
atgagtgaactcccattcacaactgcttcaaagagaataaaatatgtaggaatccaacttacaagggatgtgaaggacttcttcaaggagaactacaaaccactgctcaatgaaatgaaagaggacacaaacaagtggaagaactttccatgctcacgggtaggaagaatcaatatcaggaaaatggccatactgcccaagctctgcatggcaaggagaatgtcccctgcagagctcctatcaggtgacttgttgctgaagtcagcaatggggcaggtatcggactttggagaagaagtgggagaaatggaagggcttatcaaatggcacaacaggagattatatcccgcacctggcttggagggtcctatgcccacggagcctcactcattgctagcacagcagtctgagatcaaactgcaaggtggcagcgaggctgggggaggggcacctgctattgctcaggtttga

SEQ ID NO: 126234 - DNA, 363 bp, Homo sapiens
atggtgggcgcccctaccccagcctcactgctgccttgcagtttgatctcagactgctgtgctagcaatgagcgaggctccgtgggcgtaggaccttccaagccaggtgcaggatataatctcctgccctacttcttgcttcccaaggtctaccaggactcagggctggggtcggaaggaagaaagttggagtacgtggcttttgcaactctccctgggccatatgacattcttctctctttgggttcattgaacagggaatatacagccctcttcttccgtaaagcagcttatctccgggactgcattacccttcatccaggagcctggatccttgacatcatttcttcgctggatccttaa

SEQ ID NO: 126235 - DNA, 1309 bp, Homo sapiens
atggcagaaggggaagaaggcacttcttacatggcggcaggtgagagagtagtggccatcgccctgatagacggttttcgccctttgacgttggagtccacgttctttaatagtggatcttgttccaaactggaacaacactcaacctatctcggggattttgccgatttcggaaccaccatcaaacaggattttcgcctgctggggcaaaccagcgtggaccgcttgctgcaactctctcagggccaggcggttccagaaccaaaacagcatggtattggtcccaaacaaaaatataggtccacgggaccgaacagagccctcagaaataatgccgcatatttacaatttcttatctttggcaacctggagaaaaccaagccatggggaaaggattcccttttaattaaagtctttgaagctgctgtcctttggatagagtgttttgcttttatcttctatgatgcccgtggggtcttgattgtggtacaagtggactcttgttccaaactggaacaacactcaaccctatctcgggctattcttttgatttataagggattttgccgatttcggaaccaccatcaaacaggattttcgcctgctggggcaaaccagcgtggaccgcttgctgcaactctctcagggccaggcggtgaagggcaatcagctgttgcccgtctcactggtgaaaagaaaaaccaccctggcgcccaatacgcaaaccgcctctccccgcgcgttggccgattcattaatgcagctggcacgacaggtttcccgactggaaagcgggcagtgagcgcaacgcaattaatggattttgccgatttcggaaccaccatcaaacaggattttcgcctgctggggcaaaccagcgtggaccgcttgctgcaactctctcagggccaggcggtgaagggcaatcagctgttgcccgtctcactggtgaaaagaaaaaccaccctggcgcccaatacgcaaaccgcctctccccgcgcgttggccgattcattaatgcagctggcacgacaggtttcccgactggaaagcgggcatttgatctcagactgctgtgctagcaatcagccagactccgtgggcgtaggaccctccgagccaggtgcgggatataatctcgtggtgcgccattttttaagcccgtcagaaaaacacagtattcgggtgggagtgacccgattttccaggtgccgtccatcaccccttcctttgactcagaaagggaactctctgaccccttgcgcttcccagttgaggcaatgccttgccctgcttcggctcaggcacg

SEQ ID NO: 126236 - DNA, 1335 bp, Homo sapiens
atggcgggcgcccctcccccagcctcgctgccaccttgcagtttgatctcagactgctgtgctagcaatcagcgagactccgtgggcgtaggaccctccgagccaggtgcgggatatagtctcctggtgtgccgttttttaagcccgtcggaaaagcgcagtattggggtggtagtgacccgattttccaggtgccgtctgtcacccctttctttgactaggaaagggaactccctgaccccttgcacttccccagtgaggcaatgcctcgccctgcttcggcttgcacacggcgttacccgtgacaaaaccactaaaggcggtgcttccggtaaagctggtcagccaccaaaaccaggtgctactaatactggtgcgggtgcttctgctgcaaaatctctgttcgaaataatgcagatacctgtgcttggagttgaccccagttttcgtaactggggactagcacggggaatgctcgacttagagacgggaatactctctggattagacctgaagctggtagaaaccaaacctgatggaaccaagcaagtaaggcagaacagcaaagatatgcaagctgctgaggacattactactggtgtcatcgactggttcaaagaagcaaaggtcatctttgtagaggttcccgttggctcacaaagtgccaatggaatgaaatcctatggtgtttgtgtaggcatcttaggagcactcagggcactaggacatgagattattgaagttactcctatcgagaacaaagtagctctgtccggtattaagactgcttctaaagatgtgatgattagagcagctacaggattttatccagaggccaactggctcaaggataccaaagaatttaatgagaattttatcaaaggtataacaatgcaagtaattctgactcaacctgaaatcgaagctgctctgactggttatgtaaacgacctgatgtctgtacgtgaaggcatggaaattaaagtaaccttcaaagctactcgtggtgatgatggtgctactgcaatcgtagatattgtccctgctggttcccaatctgttgaagtggttgaggaaccaaagaaagagtcaaaggaacgcaagcatcgtccagtaacccagaccaatactgctgctgtcagtgctctggcttctgctactggtaagaaaaaagaagaagtagttgaagtagaaactactactgaaactgttgatgaaactgttgaagtagctgaagaagctgctgctcaggaagaagaaaaagaagtacaggaagaagaggctaaagaaccagtacaagccaaaccttctctgtttgcaggtctgaaacgttaa

SEQ ID NO: 126237 - DNA, 1897 bp, Homo sapiens
atggcgggcgcccctcccccagcctcgctgccgccttgcagtttgatctcagactgctgtgctagtaatcagcgagactctgtgggcgtaggaccctccgagccaggtgcgggatataatctcgtggtgtgccgttttttaagccggtccgaaaagcgcaatatttgggtgggagtgacccgattttccagggcctttgaagatgtcaaggtcttttggcgagtcacacttaacaaaacagtcgtcgtgctccagaaggatggggtaaacctgatggaggaacttcagtctgtgtcagggaccacaacctgtacaatgggtcaaacaaaatgctttatcagcattgaactcaaaccagaaaaggtaccacaggttgaagtgtatttttttgtggaactatatgaagctactgctggagcagcaataaacaacagtgccagattcgcacagattaaaatcttagaaagtgatgaatctcaaagccttgtgtatttttctgtgggttctcggctggcagtggctcacaagaaggccactttaatcagtctgcaggtggccagagattctgggacaggactaatgatgtctgttaactttagtacccaggtcttcctatcactgggctctaatttcactttgcaactggtgactgtgatgcttgtcggtggacgtttctatggaatgccaacaattcttcaggaagcaaaatctgctgtccttccagtctctgagaaagctgccaattctcaggtcggatttgaatccactgcttttcaactcatgaacatcactgctggcacaagccacgttatgatttctaggagaggcacatatggagctctctcggttgcctggaccactggatatgctcctgggttagaaattcctgaattcattgttgttggcaacatgaccccaacactggggagcctttcattttcccacggtgaacaaaggaaaggagttttcctgtggacgtttcctagccctggttggccagaggcctttgttcttcacctatcaggagtgcagagcagtgctcctggcggagctcaactccgtggatttttcaccattgctgatggagagagtgaagctagctttgatgttcatttgctaccagatgaggtacctgagatagaggaagattatgtgatccagcttgtttctgtagagggaggagccgaactggatctggagaagagtatcacatggttctctgtttatgcaaatgatgacccacatggagtatttgccctgtattcggatcgccagtcaatacttattgggcagaaccttattagatccatccaaattaacataacccggcttgctggaacatttggagatgtggctgttgggcttcgaatatcatcggatcataaagaacagccgattgttaccgaaaatgcagagaggcagctggtggtcaaagatggtgccacatataaagtggacgtggtgccaataaagaatcaggctgacagacaactcatacaggagagctctggctggcatctggcaggtgccccgctgggtcgaagcttccagaggaaagaagcaggcagcaatctttgctgttctgcagcctctgctggtgatatccaggcaaacagggtctggagtggacctccagcaaactccagcagacctgcagcagagggacctgactgttagaaggaaaactaacagaaaggagcagcacatccactcagagacctcatccaaaggtcaccaacatcaaagaccaaaggtaggtaaatccacaaagagggggagaaaccagagcaaaaatgctgaaaattccaaaaaccagaacgctgcttctcctccaatggatcacaacttcttgctagcaagggaacaaaactggacagagaatgagtttgatgattga

SEQ ID NO: 126238 - DNA, 1530 bp, Homo sapiens
  misc_feature (1)...(1530): n = a,t,c or g
acccagttcgagcttcccggctgctttgtttacctaatcaaacaactaactcggcaatggcaggtgcccgtcccccagcctcgctgccgccttgcactttgatctcagactgctgtgctagcaatcagcgagactccgtgggtgtaggaccctccgagccaggtgcgggatataatcttgtggtgtgccattttttaagcccatcggaaaagcgccgtattcgggtgggagtgacccgattttccaggtgccgtccgtcacccctttctttgactaggaaagggaactccctgaccccttgcgcttcccgagtgaggcaatgcctcaccctgcttccgctcatgcacggtgcgctgcacccactgtcctgcacccactgtctgacactccccagtgagatgaacccggtccctcacgatggaaatgcagaaatcacccgtcttctgcgttcgntcacgctgggagctgtagaccggagctgttcctatgtcagccatcttggctcctcccctgcacttttcaaataagagcgctggtgccgctggcagcgccgtggcttcagcaacggtcatctctactgcgccaagctcgggtcgtgcccgggacaaattgagactatcccagagctcggacacaaggagaagtaaatttcaaattgggccagagaggaagctgagacccatttgggttggggaaggggaaggaggagaagcctgtctaacttcaaaggcgctggaaatcagatccttatctccgggtcccggaccccgctgggcgccgcggaggcctccccctgctcctctgggtgcttggcctatccaaggccaagccagcggccgtggctgtgggactctggcctgcacactgtcccgaacccgctccgtgcctgggctgttacacactgccctgcaagcttcctccactcctagtggcactgaagcaggaatgagctcccgtttggagatgctggctttacagacaggagccactgggaaagctcgcttatgttttcagctggtgatcttatttcattatggtgaaagttggaacctcttacgtgccgatcaacgtctcattttcgccaaaagttggcccagggcttcccggtatcaacagggacaccaggatttatttattctgcgaagtgatcttccgtcacaggtatttattcgcgataagctcatggagcggcgtaaccgtcgcacaggaaggacagagaaagcgcggatctgggaagtgacggacagaacggtcaggacctggattggggaggcggttgccgccgctgctgctgacggtgtgacgttctctgttccggtcacaccacatacgttccgccattcctatgcgatgcacatgctgtatgccggtataccgctgaaagttctgcaaagcctgatgggacataagtccatcagttcaacggaagtctacacgaaggtttttgcgctggatgtggctgcccggcaccgggtgcagtttgcgatgccggagtctgatgcggttgcgatgctgaaacaattatcctga

SEQ ID NO: 126239 - DNA, 1422 bp, Homo sapiens
atgatgagtccccaggaagaaccagaacaagacagagggatgaaatggatgaaggaatggcaggagattatagccctgtatgagaaggacaacacctacttagtggaactctctagcctcctggtttggaatgtcaactatgagatcccctcactgaagaagcagattgccaagtgccagcagctgcagcaagaatacagctgcaaggaggaggagtgccaggcaggggctgctgagatgggggagcagttctaccactcctgcaagcagtatggcatcatgggcgaaaatacccgaggagaactgctggccctggtgaaggacctgccaagtcagctggctgagactggggcagcggcgcagcagtccctgggggaagccatcgaagtgtaccaggcctctgtggggtttgtgtgtgatagccccacagagcaggtgttgccaatgctgtggttcgtgcagaagcggggaaactcaacggtgtacgagtggaggacagggacagagccctctgtcgtggagcgaccccacctcgaggagcttcctgagcaggtggcagaagacgcgattgactggggcgactttgggatcacagtggtggaagcaggaatccaggctccagaaggtgttgccaggggcccagatgctctgacacttcttgaatacactgagacccagaatcagttccttgatgagctcatggaacttgagatcttcttagcccagagagcagtggagttgagtgagaaggcagatgtcctgtctgtgagccagttccagctggctccagtcatcctgcagggccagaccaaagagaagatggttatcatggtgtcagtgttggaagatctgattggcaaacttaccagtcttcaactgcaacacctgtttatgaacctggcctcaccaaggtatgtggaccgagtgactgaattcctccagcaaaacctgaagcagtcccagctgctggctttgaagaaagagctgatggtgcagaagcagcaggaggcacttgaggagcaggaggctctggagcctaagctggacctgctgctggagaagaccaaggagctgcagaagctgattgaagctgacatctccaagaggcaaaagaccaggccgactggaagacggaaagccacaggaaggaagcggcacctgatggtgatcttggcactctccatgttctctacaagaagctgtggtgattggccctgtggcctgtcagtgtatgggatgcttgtatcatgtaagcgttgttcggattgttatcgatgtcataatgaggcgcattatcggatatgcggatgggttatggtactcccaattagtagtgtattcgcacgtcgaaatgttatggtagcgatcggaaaggaatcaaatggcaccaaatggaatcgtatggattcagatgcagcgtag

SEQ ID NO: 126240 - DNA, 574 bp, Homo sapiens
cgggtcgacgatttcgtccgccagactcgcccttctgcacaggccgccctggctgagaagatggcggccaaccagcccccgcctctgatgatgaagcacagccagacggacctcgtgagccgcctgaagacctcgcaagatcctcggcgtgggcggggaggatgacgacggggaggtgatcgctccccgatcagccaggccttaggcactgaaatcaagtttaccattcgggagcctttggggctcacggtctggcagttcgtctctgctgtgctcttctccggcattgccatcatggcgcttgccttccctgaccagctctatgatgcggtctttgatggagcccaggtgaccagcaagacccccatccgcctctacggcggtgccctcctcagcatctccctgatcatgtggaacgctctctacacggctgagaaggtcatcattcgatggaccctgctcaccgaagcttgctatttcggggtccagttcttggtggtcactgccacgctagctgagacgggcctcatgtccctggggatccggctgaccaggagcagtcgacgcggccgcg

SEQ ID NO: 126241 - DNA, 547 bp, Homo sapiens
gagtcaggctcgacgcctatagaacgcctgcggaaccgcgccggaattcacgcgtcgagaccacgacgtccgcctcaggctgccgggtcaacgggcctgaagactttaagtttgcatctgtgtttcgactcctgaccctggatagtgaagaggtgccggaggcctgctgccggagggaaccccaaagtcgggacggggtcctgctgagccggtgaggagtgcctcctgggaaggagcctattcctaaacaagcagggctgttacacggggatcctcaacaccttcgagacctacgtctacttggccggagcccttgccatcggggtactggccatcgagcttttcgccatgatctttgccatgtgcctcttccggggcatccagtagagggtatggcctgaagcctgaagacttgccccacccaccactgcccagcacccaatgtcctcccgggcccctccccgctgtcctcttggccccaaggggaagaagatgaggccatcagagatggccaagaagaagggccaggggaatagagctatttttt

SEQ ID NO: 126242 - DNA, 2030 bp, Homo sapiens
  misc_feature (1)...(2030): n = a,t,c or g
caccgccagccaaagcagtcccttccatttcaggcaccggcctgggcccgggagacaccgcaaggctatttaagatggtgtggtttgcccatctacgttgatcgtcccaagaaaggggcaccgtctgcagaacttgccaggaaagtcatcctgggcggcgcgggccacgccagggtctccccgcgcggcttcctcccccggcgccttctctcgggcgcgcgtgcgccccctgcaggcggcccccgggagagcctcgcgggggagccgggagcctggtttccccgccaacccccatcccgcccgccccggcggccaccctgggggcgaggcagcccggcgcgtgggaggggacggcgcgccattggcttgtgcgcggaaccgagaggagggaccagcgcgggccgccagactcgcccttctgcagaggccgggctggaggagaagatggcggccaagcagcccccgcctctgatgaagaagcacagccagacggacctcgtgagccgcctgaagacccgcaagatcctcggcgtgggcggggaggatgacgacggggaggtgcatcgctccaagatcagccaggtcttaggcaatgaaatcaagtttaccattcgggagcctttggggctcagggtctggcagttcgtctctgctgtgctcttctccggcattgccatcatggcgcttgccttccctgaccagctctatgatgcggtctttgatggagcccaggtgaccagcaagacccccatccgcctctacggcggtgccctcctcaatgctgcgcccacaccccggcctctgatgaagctctctgctggggatgtgctgccatcttgtggccattggtggaatacacccagtgggttggagcttgcagtcgccaccatctgcaaggagcgctcataagggacttccttaaagcgagtccttaccgggctcaggttttctgtctgggagtccgtgtaaaagaaaacccaatcataggaccaggcatctccctgatcatgtggaacgctctctacacggctgagaaggtcatcattcgatggaccctgctcaccgaagcttgctatttcggggtccagttcttgggctgggaacctcccatttgcctaaggatctccttaccccccatcaccaagcacagcccacatttcaccagccagcaaaatgcaaatgtcattagcgctctgcaagctgctcacccgagaattcttcaccaaggagctcaccaagcactaccagggcaataacgacacagacgtcttctctgccacctggaactcggtcatgatcacatttggttgctgcggggtcaacgggcctgaagactttaagtttgcatctgtgtttcgactcctgaccctggatagtgaagaggtgccggaggctngctgccggagggaaccccaaagtcgggacggggtcctgctgagccgggaggagtgcctcctgggaaggagcctattcctaaacaagcaggtcttagacctacctcactgggaagcacattaggacctggagagtctctcctcaagctggaaaaggcaatagagggggagtttgggaaatggacagtggaatacggcagcccctgggggtctttggagtctgaaggttttggaccaggccagtggtctggagatatggctctgagagagggtagaggagggattgaagaagtgagagactggaacaagttgtctactgcaaggatccaaggagtagaagctgccgccctggagtggagcaggggacactggggtggagacgaggggctgatgcaggagggaccctcaaacttgagcttccatcagaatctcctggagggcttgtcaaaacccagggtgccgggcctcaccactctcaagtttctgattcagtgggtctggagtggaggtctgaaaatctgcatatccaggttcccaggagatgctggtgatgctggtctgaggatcatgtttgagaaccactatttaaaccctgagcaacttgagggccatgacaagtggcaccttacaccctaa

SEQ ID NO: 126243 - DNA, 336 bp, Homo sapiens
atggaagaacattccatgctcatggataggaagaatcaatatcgtgaaaatggctgtactgcccaagtgagccccatccagatccccagacgcctcccgctgctgctcacccacgagggcgtcctgctgcccggctccaccatgcgcaccagcgtggactcggcccgcaacctgcagctggccacggcctgccttgagcgcgaggctcagttcggggcggccttcgcggctcggttccgcctctctggtgctatcacttgcaaaatggggatgtcagatacctgccccatgaccatgaatgagatcgttcatgaagtagtgcctgacacctggtga

SEQ ID NO: 126244 - DNA, 1161 bp, Homo sapiens
atgagggagcagttctgcttgtgtgccttgggcatcatgcagccagatacagcccctgaagtgctcctcacatgggtcaactgttccagtgtgcggtgggccacccgggttcaagacatcttcacagctgggaagctcctggccttggccctgattatcatcatggggattgtacagatatgcaaaggagagtacttctggctggagccaaagaatgcatttgagaatttccaggaacctgacatcggcctcgtcgcactggctttccttcagggctcctttgcctatggaggctggaactttctgaattacgtgactgaggagcttgttgatccctacaagaaccttcccagagccatcttcatctccatcccactggtcacatttgtgtatgtctttgccaatgtcgcttatgtcactgcaatgtccccccaggagctgctggcatccaacgccgtcgctgtgacttttggagagaagctcctaggagtcatggcctggatcatgcccatttctgttgccctgtccacatttggaggagttaatgggtctctcttcacctcctctcggctgttcttcgctggagcccgagagggccaccttcccagtgtgttggccatgatccacgtgaagcgctgcaccccaatcccagccctgctcttcacatgcatctccaccctgctgatgctggtcaccagcgacatgtacacactcatcaactatgtgggcttcatcaactacctcttctatggggtcacggttgctggacagatagtccttcgctggaagaagcctgatatcccccgccccatcaagatcaacctgctgttccccatcatctacttgctgttctgggccttcctgctggtcttcagcctgtggtcagagccggtggtgtgtggcattggcctggccatcatgctgacaggagtgcctgtctatttcctgggtgtttactggcaacacaagcccaagtgtttcagtgacttcattgagctgctaaccctggtgagccagaagatgtgtgtggtcgtgtaccccgaggtggagcggggctcagggacagaggaggctaatgaggacatggaggagcagcagcagcccatgtaccaacccactcccacgaaggacaaggacgtggcggggcagccccagccctga

SEQ ID NO: 126245 - DNA, 611 bp, Homo sapiens
tttcgtctcagttccctccgttctcctcgggctccagttttggcggagcgaacgggaccggcccggcttcagagcgcgaggtggagggtggaacgcgggcgcctgaaggagttgttgtctcggcagcgcccgcggagacgtgaagaggtggttgtgggaagagaagtttgcagaactgaaatggaggtcagagcttcattacagaagatagtttctaatggtgatgaacaattggaaaaagccatggaagagattttgagagatttcgagaaaaggccaagcagtcttcttgttgattgtcaaagttccagtgagatttcagaccattcgtttggagatattccagccagccaaacaaataagccatctcttcagttaattttggatccgtctaacacagaaatttctacacccagaccatcttctccaggtggactacctgaagaagatagtgttttatttaataaactgacctacttaggatgtatgaaggtttcttccccacgtaatgaagtagaggctttacgggcaatggcaaccatgaaatcttccagtcaatacccctttcctgttaccctgtatgtaccaaatgttccagaaggttctgtgag

SEQ ID NO: 126246 - DNA, 497 bp, Homo sapiens
tttcgttcgggctccagcggtggcggagcgaacgtgactcggcccggcttcaaagcgcgaggcggagggtggaacgcgggcgcctgaaggagttgttgtctcggcagcgcccgcggagacgtgaagaggtggttgtgggaagagaagtttgcagaactgaaatggaggtcagagcttcattacagaaggttagtggatcatctgattctgtggctacaatgaacagtgaagaatttgttttggttcctcagtatgcagatgataattctacaaaacatgaagaaaaacctcaactgaagatagtttctaatggtgatgaacaattggaaaaagccatggaagagattttgagagattccgagaaaaggccaagcagtcttcttgttgattgtcaaagttccagcgagatttcagaccattcgtttggagatattccagccagccaaacaaataagccatctcttcagttaattatggatccgtctaacacagaaacg

SEQ ID NO: 126247 - DNA, 807 bp, Homo sapiens
atgttccggagaaaccctctgcccaacatcgatcatgaactgcaggagccgctgattgacagaggtgaggacgttccaagagaggaggaggaggaggaagaaaacgggtttgaagacagaaaagatgacagcgatgacgacgggggtggctggataacccccagtaacatcaagcagatccagcaggagctggagcagtgcgacgtccccgaggacgtgcgggttggctgcgtgaccacagacttccccaggcagaatgttctgctgcagatggggctgcacgtgctggcggtgaactgcatgctgattcagctacgtctgggctgccacggctgtttcaagacaacgtctgacatgagccgagtgttctgttcacactgtgggaacaagaccctgaagaaagtgtccgtgaccatcagtgacgacggcaccctgcacatgcacttctcccgcaaccccaaggtacataaacttacattgaagagcgactatactggttcatatagccaatatttaagagtcccaaaagtggacgatgatttaaatgaaagaaacctcatttattggaatgactggattcgtcggaccgatgtgcagagcattgctccactgaagataagatcaatagaacatacaattggcggtcccacaactgcattgactgattccactggctatttggggctggagagaagccccaggcctgaatccagtcttccggtgggggctaccttgccggagttcatcaagaacaggactccttttcggcttaaacccctgtggtggactctaaaggcccccctgtga

SEQ ID NO: 126248 - DNA, 1294 bp, Homo sapiens
atggctccagtggagcacgttgtggcggatgctggggctttcctgcggcatgcggctctgcaggacatcgggaagaacatttacaccatccgggaggtggtcactgagattcgggacaaggccacacgcaggcggctcgctgtcctgccctacgagctgcggttcaaggagcccttaccggaatacgtgcggctggtgactgagttttcaaagaaaacaggagactaccccagcctctctgccacggacatccaagtgcttgcactcacataccagttggaagcagagtttgttggggtgtctcacctaaaacaagaaccacagaaggttaaggtgagctcatcgattcagcacccagaaacacctctgcacatttctggtttccatctgccctacaagcctaaacccccacaagaaacagaaaaaggacactcagcttgtgagcctgagaacctggaatttagttccttcatgttctggagaaaccctttgcccaacatcgatcatgaactgcaggagctgctgattgacagaggtgaggacgttccaagtgaggaggaggaggaggaagaaaacgggtttgaagacagaaaagatgacagcgatgacgacgggggtggctggatgaacccccagtaacatcaagcagatccagcaggagcttgagcagttttgacgtccccgaggacgtgcgggtttggcttgcctgaccaccagacttcgccatgcagaatgttctgctgcagatggggctgcacgtgctggcggtgaactgcatgctgattcgtgaggcccggagctacatcttgcgctgccatggctgtttcaagacaacgtctgacatgagccgagtgttctgctcacactgtgggaacaagaccctgaagaaagtgtccgtgaccgtcagcgacgacggcaccctgcacatgcacttctcccgcaaccccaaggtgctgaacccccgcggcctccggtactcgcttcccactcccaaagggggcaaatacgccatcaacccccatctcaccgaggatcagcgcttccctcagctgcgactctcccaaaaggccaggcagaaaaccaacgtgttcgcccctgactacatcgccggggtgtcaccctttgtcggagaatgacatctccagccgctcagctaccctgcaggtccgggacagcaccttgggagctgggcggagacgcttaaatcccaacgcttgcagaaagaagtttgtgaagaaaaggtgaagagcgagttcccgcaggcaaattggatgggcgtctggccgccgtggaa

SEQ ID NO: 126249 - DNA, 350 bp, Homo sapiens
  misc_feature (1)...(350): n = a,t,c or g
gaagccgatcctactgcagggccatgagcggtccattacgcagattaagtataaccgcgaaggagacctcctctttactgtggccaaggacccttctggagaggtgttggtgaatgttaaggagcactcccggcagatcaacgacatccagttatccagggacatgaccatgtttgtnaccgcntccaaggacaacacagccaagctttttgactccacaactcttgaacatcagaagactttccggacagaacgtcctgtcaactcagctgccctctcccccaactatgaccatgtggtcctgggcggtggtcaggaagccatggatgtaaccacaancttncaccagg

SEQ ID NO: 126250 - DNA, 381 bp, Homo sapiens
atggagtcttcagaaacccttgggtctggagaggtgttggtgaatgttaaggagcactcccggcagatcaacgacatccagttatccagggacatgaccatgtttgtgaccgcgtccaaggacaacacagccaagctttttgactccacaactcttgaacatcagaagactttccggacagaacgtcctgtcaactcagctgccctctcccccaactatgaccatgtggtcctgggcggtggtcaggaagccatggatgtaaccacaacctccaccaggattggcaagtttgaggccagctacagcagcggcggcgaagatggttacgtccgtatccattacttcgacccacagtacttcgaatttgagtttgaggcttaa

SEQ ID NO: 126251 - DNA, 1539 bp, Homo sapiens
atggtgccctgcatcccagctgcttcagttccagctgtggctaaaaggggccaaggtacagctctggctatggcttcaaaaggtgcaagccccaagccttggcaacttccacatgatgttagtcctgcgggtgcacagaagtcaagaactgagcattggaacctcttcctaggtttcagaggatgtatggaaacacctggatgtccaggcagaacttttgctgtgggtagggagagctctcatggagaacctcttgctagggcaatgcagaaggagcagatcagaactggggatacttctacttatggggaaaaggtaagctggagacttttagtggtccctatcactgttgcagacgccagcagttattgctacagggtggtcctccaatcctcacagaccttgagtccaatttggacaattgccaggaatacacacaggaactgtgaaagatatgtcgatagatcagtcgatatctccatcctcactggttattttgactactggtggatgccgtttcttcatagtgtcgatggtctctacattttggtatggttttccagtggcagttttccttttaacagtcaggcccctattctgaagctctgcttgagtatactggaggtccactctagacgctgtttgcctgggtatcaccagaggagcctgcagaacagcaaagattgctgcctgctccttcctctagaaccttcctctcccagagcgacacctgccaaatgccagccagagctctactgtatgagtgtctgcatgccctattcttcttggtcacgggacaagaacccagaacccaccaaagagcaggagctaaaaagggcagtaacacactccaggccagctcaccgagctgcggatgggcctccagatggacacagagctgcctggtgtctttctagggacaccactcaattccacacggaacccgtcaggccatggatacctgagcagactagcatcagttgctgtagccccaacaagggaggacaggctcttttgcacatccctaggatagaggccacagcagcagtcctgaggagtggccagactataccacatgagacccccatgcccctgctacttcttgtcatgcaaggcttgctggcttgggctcccagtgcagcagccctgttcccacctggccagcgcaggcagtcacagttctgtgttcctctggaaagcagccatacttcacgctgcgcaaccccctacatctgctgctcctcacagcacaaggcttgggctcccagcacagcagccccacacctacctgaacactgtgaattagaaaatactactttacatgtcataaggaaccaaaaaagagcccgtatagccaagacaatcctaagcaaaaagaacaaagctggaggcatcatgctacctgacttcaaactatactacaaggctacagtaaccaaacagcatggtactggtaccaaaaacagatatatagaccaatggaacagaagagaggctctgagaaataacgccacacatctacaaccatctgatctttga

SEQ ID NO: 126252 - DNA, 2514 bp, Homo sapiens; identical to SEQ ID NO: 114891

SEQ ID NO: 126253 - DNA, 1080 bp, Homo sapiens
atgtatgtgagactactgaagaaacagttttacaaacaagccatgactaacaaattagctacaagattagaaattatgcttcaggggttatgcagcttctggctgcaagagtctgaaccttcccaaattgctcctgggggtaacattactactgtagaacctaagctttttgactccacaactcttgaacatcagaagactttccggacagaacgtcctgtcaactcagctgccctctcccccaactatgaccatggctggatcaagcatgctgcaactggcttccatcttgggtgccagcatctagatgaggtggacatggcagcacctgaaaactcagagataccagcaactgcagagccccaaggggttgtcacagcttctgtcactccttggggagtcccaagggtggacagagtaagtgttctggagagcaccagggtgaattgcaaaacccctgtggagcatggaagccaggatacctccaaagagtgtggagcaaatcatcctgcctctgccacactatttcccctgccaggagcagatcagaactggggatacttctacttatggggaaaagacgccagcagttattgctacagggtggtcctccaatcctcacagaccttgagtccaatttggacaattgccaggaatacacacaggtgcattccccggaagagaaatttccttgacacccttgctcatgagacatacatttctatggcatggcatcatcttgaaactggacctacatctggagtgtgtcctgctttgaggccagtagccactaaaccattctaccgcttacgtgccacagtcatttcactaaattcacataggtgcctacagcaccaatactccagctgtctagaacctaggcccaaaggaatgactgggactctgatgtctgaacagatgaggcatcctgtcacccagggaaacaggcaagcatgcacagtggagaggctccttgcagctgctgggcctgtgtgcacccattcttggcttgagaactggaccagaagtagcaccactccgttggagagggttacacacagctgcctgatctgctcatga

SEQ ID NO: 126254 - DNA, 1466 bp, Homo sapiens
ggcacgaggttgcggccttcctcgcgtcaccgccgggatgaagccgatcctactgcagggccatgagcggtccattacgcagattaagtataaccgcgaaggagacctcctctttactgtggccaaggaccctatcgtcaatgtatggtactctgtgaatggtgagaggctgggcacctacatgggccataccggagctgtgtggtgtgtggacgctgactgggacaccaagcatgtcctcactggctcagctgacaacagctgtcgtctctgggactgtgaaacaggaaagcagctggcccttctcaagaccaattcggctgtccggacctgcggttttgactttgggggcaacatcatcatgttctccacggacaagcagatgggctaccagtgctttgtgagcttttttgacctgcgggatccgagccagattgacaacaatgagccctacatgaagatcccttgcaatgactctaaaatcaccagtgctgtttggggacccctgggggaggtgcatcatcgctggccatgagagtggagagctcaaccagtatagtgccaagtctggagaggtgttggtgaatgttaaggagcactcccggccagatcaacgacatccaggttatccagggacatgaccatgtttgtgaccgcgtccaaggacaacacagccaagctttttgactccacaactcttgaaccatcagaagactttccggacagaacgtcctgtcaactcaagctggccctctcccccaactattgaccatgtggtcctggggcggtggtcaggaaagccattggatgttaaccacaaccttccacccaggatttggcaagttttagggccaggtttctttccattttggcctttgaaaggaagagtttgggaagagtcaaggggtcactttgggacctattcaacagtgttgccttccatcctggatgggcaagagttacagcagcgggcgggcgaaggatggttacgtccgtattccattaatttcggacccacagtaatttcgaattttgagttttgagggtttaagaagctggatctcctgccgggcgtggttggctcatgcctgtaatcccaccactttttttttaaggcaggcggatcacctgaggtcaggagtttaagaccagcctgaccaacatggagaaacctcgtctctactaaaaatacaaaaatacaaaaattagccaggcatggtggcacacgcctatagtcccagctactcaggaggctgaggcaggagaatcacttgaacccaggaggcataggttgcagtgagctgagatcacgtcattgcactccatcctgagccacaagagcaaaactccgtctcaaaaaaaaaaaagaagaaggtggatctccaaccaggccagagaagattctcacagaaggttttgaactctaagaaataaattggtttggtaataaatggcttctggtcaga

SEQ ID NO: 126255 - DNA, 600 bp, Homo sapiens
ctagtccacaagaagagaggcaccactgctgccttcgcacaggttaacttggaagacaaaggagctttggctaagctggtggaaactatcaggaccaattacagcgacagatacgatgagatctgctgtcactggggaggtaatgtcctgggtcccaagtctgtggctcgcatcaccaagcgagctcatcatgcaggtttgttcttctaagaaaggattccctatcaccatattgcaggctcctgcaaggccaaattccccagggccaccaccagtgttcattgttgccctgttgctctttctgtccacaccagtggtacgaggagaccctatctcaactctcactccctgagataaatgtgaaatggacaacttatctgtgtctccctccctcgcttgctgccccttctgggaacaggaccccactgaggacaatcgattcacttggctggttggcaaattgcaagaacccctctgcctatgccactgatgcacaatgtctagggctggcacaatgcaaactcctccaagagccagttctgtccctccaggcacacagatactatccatcacagagctggcggcctcaagaatggccat

SEQ ID NO: 126256 - DNA, 458 bp, Homo sapiens
  misc_feature (1)...(458): n = a,t,c or g
gtcgccttcacacaggtgaactcggaagacaaaggcgctttggctaagctggtggaagctatcaggaccaattacaatgacagatacgatgagatccgccgtcactggggtggcaatgtcctgggtcctaagtctgtggctcgtatcgccaagctcgaaaaggcaaaggctaaagaacttgccactaaactgggttaaatgtacactgttgagttttctgtacataaaaataattgaaataatacaaattttccttcnnnnnnnnnnnnnggggggcccctttaaaaagaaaaaattttaatacccgggggtgggaaaggaaaacttttttttagggggccccaaaataaatttccggggccgggttttaaaaacgggggagggggaaaaacccgggggtacccaaattaaaaccccttggaaaaaaaanngnnnnggcccaccgaggatggagaacc

SEQ ID NO: 126257 - DNA, 219 bp, Homo sapiens
atggaactcagggccgaatacctcagggagaagctgcagcgggacctggcggcggagcatgtggcgcttctggcggtgtcggccaagttcgaggggaagccgctgcttcagagacaccgcctggtgaacgcgtgcctagcagaagcgctcctgcgcatccatgcctttgaacagaaaaccctaatcccagagcagtgggcccgtgagcggcagaaatga

SEQ ID NO: 126258 - DNA, 500 bp, Homo sapiens
ttcgcggccgcgtcgaccggcgcccgagctggggttgtgtccctgctgggctgccgttccagctggactgccgccatggaactcagcgccgaatacctccgcgagaagctgcagcgggacctggaggcggagcatgtggaggtggaggacacgaccctcaaccgttgctcctgtagcttccgagtcctggtggtgtcggccaagttcgaggggaaaccgctgcttcagagacacaggctggtgaacgcgtgcctagcagaagagctcccgcacatccatgcctttgaacagaaaaccctgaccccagaccagtgggcacgtgagcgacagaaatgagggactgggatctgcacagccattaaattataaatctggaaaaaaaataagaccagctgaaagattctgtgctcatacagctttgcggaggtgcttgaatgtggagtgccggggcggttcaacctggagctgtcactgaaaagcgagcaactggtgctgctcac

SEQ ID NO: 126259 - DNA, 174 bp, Homo sapiens
gttgaaagacttgaagccaaagtagttgaacccttgaaaacttatgggaccattgtgaaaatgaaacgggcagaaacggaattacagagagctgcaatggatgctagccgaacaagtcgtcatctggaggaaactattaacaactttgaaaggcagaaaatgaaggatataaag

SEQ ID NO: 126260 - DNA, 2293 bp, Homo sapiens
atggtgatagtgatggatggagaaagggatagaggacagatcctggatatatattttgaacgtagaaccaataggcaggtctataccgcaattgcttcttgcctggaccactacaagagcctctttttggtctcttcctccctcgctccttccagtatgttctccgcacgcagccagagtgatcatgccattgctcttactcaactccagtggctttgtgtcactttcaagacacagcctggtgtctcactgtggcctccaaggccctcacagccaggcccatggctgcctccccatcatcgttacttcatctctcccctgcctgctgtctcaggtcttgaaatccccttctttgggcccccgcaaggtccccggccgtgcgcgaggcagcatgatgaggcgcaccctggaaaaccactaacagcccgagcccagctgcccagggccgcccataatggagggctggggaacgctcaaacgaaacaactgcaaacagctgtttcaaatgtggagaagcattttggagaactgtgccaaattttcgctgcctatgtgcggaaaactgccaggctgagagacaaagcagacctcctggtgaatgaaattaacgcgtatgctggtacagagaccccgcatttaaagctgggcctgatgaactttgcagatgagtttgccaaacttcaggattatcgacaagcagaggttgaaagacttgaagccaaagtagttgaacccttgaaaacttatgggaccattgtgaaaatgaaacgggatgacctcaaagcaacactcacagcaaggaatcgagaagctaagcaattaactcagttagaaagaacacgtcagcgaaacccatctgatcgacatgttatttcacaggcagaaacggaattacagagagctgcaatggatgctagccgaacaagtcgtcatctggaggaaactattaacaactttgaaaggcagaaaatgaaggatataaagactatattttctgaatttatcacaatcgaaatgttatttcacggcaaagctttagaggtttacactgctgcctaccagaatatacaaaacattgatgaagatgaagatttagaggttttccaaaattctctgtatgcaccagattattcatctcgtttagatattgtaagagcaaattcaaagtcacctcttcagagatcactgtcagctaagtgtgtatctggaacaggacaggtatccacttgtcgactaagaaaggatcaacaagcagaagatgatgaggatgacgagttagatgttacagaagaagaaaattttcttaagtaaactacacatttccattttcatcataaatgacttgaaatccacaatgactaaattgtagaactttatactcactttgctatgttaagcctcaaagtgaagtccaactggaaacagaaaaataattaaaggaaacttatgctgaccaaaaatgaaggctttaaaaaatattgcataccagtcatttcaacatcctacctagtgttacatgatttttgtgtaagtgcctttttttttaaagatggtgtatttcaaagtatttcatattaatgtactatatctacttgaagttccaatagtacattatgacagaaaccaaaagatctaacaattctgcttagctttttggttaagactccatgctttcattaccagaaaagggtcttacgtagtcattatgattcatggaattctattccatgaagccttaagaaaaaaaactttttttaactttccctgaaactttatcatttgataagtaaatttacttttcaagaagagtataaccaaagagtaaagataatgtgacactaaggttatcaatggttttatggaatacacataagggcataaatttcagctgttaaaaaggctacattcaatctgactctggttttaaaacaaaactgctgtcataattatacatgatactgcaacttttggaaggctaatttggtggaatgttgccctcatccatagaacacccatagatcattaaaaatcctataaaaattttacccaagctaccatatagttaataaaagggtatacagtcacttttatttctggaaaaaataaaacattgagcctttcaggggatctgatgcttctcttttggtaaggaaaacttttatttcatggatcccaggcaggcatataaaagttacggaatttataaaatcatttgggataattagaaaatgcaattattcataacagaaaaataaagactttctagaaagcttcaaaaaaaaaaaaaaaaaaa

SEQ ID NO: 126261 - DNA, 1269 bp, Homo sapiens
atgcaggaccccaacgcagacactgagtggaatgacatcttaacgcaaaaagggtatcttaccccccaaggaaagtctgaaagaattggaagaggaggcagaagaggagcagcgcatcctccagcagaatctgccccgatatttgtttacctggaaggagatatcaaggctcagtttattggtcctctggtgtttggtggcatgaacctgacaagagatgagttggaatggaaactgtctgaatctggagcaattatgatggacctggaggaaaaccctaagaagccgattgaagatgtattgctgtcatcaatatcttttgtccagatctcttttttggcatccttaactgaattggaacagttgtcgattatgaacaatccttgtgtgatggcaacaccatccatcccaggatttgactatcggccgtacatcgtcagctggtgcctaaacctcagagtcctagatggatatgtgatttctcagaaggaaagtgaagggtcctacccgcttccaaaatgtccacccgcattcctgacgtcactggatcggctccatcaagccagaaaacgagagtgcgctccaatcagggctcagtccccgcccttgccttgcgtcacttccggtggtgcagcagccattttgtcagtcgccagcggatcccgcgcgctggagaagtgcagttccccctggttaccaactcgcccgcttttccttcggactaagggagccgtcgaagagcgctcgccaaaggcgcagccgtttctccctacggtgccgccgctcctcctgcagccgcccgtaggcgccctcagggagccgcggtccgcgatgtcaagcgaggaaagctaccgggccatcctgcgttacctgacgaacgagcgcgagccgtatgcgccgggcaccgagggcaatgtcaagcgtaaaatccgaaaagctgccgcctgctacgtggtgcgcggcgggactctgtattaccagcggcggcagcggcaccgcaagaccttcgcggagctggaggtggtgctgcagccggagcgacgccgggacctcatcgaggcggcgcacctgggtcccggcggcactcaccacacccggcatcagacctggcactacttgtccaagacgtactggtggcgagaaaggatacacaacaaaatcagtgaagggagaaggtgcatggaacaaagtctgaaggaaacaagcacaggtttccaagaactgtcccacagtggaattattcttagttcctccagcactgaattgtga

SEQ ID NO: 126262 - DNA, 877 bp, Homo sapiens
attgaccgctttgacgcgccctgcggtttggaagagctggaggatcatgaagacgagtttaatgaggaggatgaacgtgctattgaaatgtacagacggcggagactggctgagtggaaagcaactaaactgaagaataaatttggagaagttttggagatctcagggaaggattatgttcaagaagttaccaaagctggcgagggcttgtgggtcatcttgcacctttacaaacaaggaattcccctctgtgccctgataaatcagaacctcagtggacttgccaggaagtttcctgatgtcaaatttatcaaagccatttcaacaacctgcatacccaattatcctgataggaatctgccccacgatattggtttaccctggaaggagatatcaacggctcagtttattggtcctctgagtgtttggcggcatgaacctgacaagagatgagttggaatggaaactgtctgaatctggagcaattatgacagacctggaggaaaaccctaagaagccgattgaagacgtgttgctgtcctcagtgcggcgctctggtcctcatgaagagggacagcgattccgagggtgactgaggctacagcttctatcacatgccgaactttcttgtgacaaattgtctggattttttaaaaaaggaaaaagcaagaatgaatccttgtggtttttagttttgtataaattatgtttcaaatctttacattttggaaataatcattgctggagattctgttaaatattttggaactctttttttttttaaattatagtatttcctctaaaaaaaattaaaaccagccatttgtatggcaaatgtcaaaaaaaaaaaaaaaaaaaaaaaaaaagggcggccgct

SEQ ID NO: 126263 - DNA, 523 bp, Homo sapiens
tctctggtcaaacattctatacgtgggtctggaattaacctctcttttgtacccacaggtttccaaatagtcccctttcatctttttgaaacaagtctttggctctaagcctctggctttctgtactttaatataatcttcaagttcatcttgaaaagagtcatatgtcttctttgaatgcttcattaggttgacaaaacgggattttccttatcaggctgagaatttggtggagaaatctgatcatattcactcagtttttcagcatgaattttcaaatagtgagactacacaataactggtgagctcataatgcaaaatcctttgttatttgaactgtaacactactccacagacatcttttataaaaggtatctgtaaacaaagttcagtctttgttcattcaatgtggtatcttctctgaggcaggggcgggcgtctacaactactgtcccccaccccgccaacgccgccagccaggggataagccgcggtggagaccattctgatgttggacgtgtcc

SEQ ID NO: 126264 - DNA, 773 bp, Homo sapiens
ctgagaaacagtccctcgtgaactgacagtagctcagagagtctagtctcaatctgctgtcatgggctggtaaccactgaggcaaccgattttccactgtttgtggaatattgcatgatcttgggtaggtctggatggtttcagatgggagtctctggtcaaacattctatacgtgggtctggaattaacctctcctttgtacccacaggtttccaaatagtcccctttcatctttctgaaacaagtctttggctctaagcctctggctttctgtactttaatataatcttcaagttcatcttgaaaagagtcatatgtcttctttgaatgcttcattaggttgacaaaacgggattttccttatcaggctgagaatttggtggagaaatctgatcatattcactcagtttttcagcatgaattttcaaatagtgagactacacaataactggtgagctaaaaaccgcaattcagagatcaaaaatcaatttttgtccaattctccactctcactcatctcataatgcaaaatcctttgttatttgaactgtaacactactccacagacatcttttataaaaggtatctgtaaacaaagttcagtctttgttcattcaatgtggtatcttctctgaggcaggggcgggcgtctacaactactgtcccccgccccgccaacgccgccagccaggggataagccgcggtggaggtggcggagaggcaggaacaaccgctgctcggcgaattcacacggccttcaattgtacgccc

SEQ ID NO: 126265 - DNA, 2179 bp, Homo sapiens
atgagtttctccggcaagtaccaactgcagaacccggaaaaacttgaaacctttatgaaagccatcgattcatccgtaatcaatataatggaaaattctaagacttctgactcttttcaacatgaactggaggattatattagaaagcagaaagccagaggattgcaaccaaccctttgctttacaaaggtgacggaggactccgcgtgccaagaaaggggccccactgagcctcgggggccggagcagcagggactccccttctggaggccccacgtgttccccgcttccttggaaagactgaggaccgtggaaagccgggtacctccctggcctaaaattccttatgcgccacgaagactggaatctgtaaaccacagtcaaaataatcaggaccatttcttcaaacaccggtggcttccaagcccatctgggcagggagagaacacaggcgtccgcggtgcgcacggcaaggaaggttcctgttgcctcttctgggagccccgcggcagcgcccagcaggcgggccgtggggaccgtagcctggagaagaagcaccgggaagtgggaagacaaaaagcgcccgggaggagcagcaaaccccaagagaagccccgcccgaaagggactcacaccaagggaccagggcacgatgaaagcccaaggggcctccaggccttgcagaaaaggcccaaacgcatcaagagaaataccccggggggaaaatcccgttttgtcaacctaatgaagcattcaaagaagacatatgactcttttcaagatgaacttgaagattatattaaagcctcggtccccacggtccgcctgctgggcgctgccgcggcgctcccagaagaggcaacaggaaccttccctgccgtgcgccccgcggacgcctgtgttctctccctgcccagatgggcttggaagccacccgtgtttggaagaaatggccctgattatttcgactggggtttacagattccactcttcctgggcgccatatggaattttaagccaagggaggccatgcgggtgcagacggagatggagctacgcatgttccgccagaacgaattcatgtactacaagatgcgcgaggctgccctgaacaaccagcccatgcaggtcatggccgagcccaacaatgagccatccccagctctgttccacaagaagcaatgaggactgcccagtggaggaggggcgatgtggctggggagctagggagagactctggaggtggtgggtctctggggagacccctaaatgaaggaaagtttgaggtaatgcttaacattgttgcttgtgagaatttactgccctgtgtttcccgagagccattttggctcaattcaagtctattcaattcaagttaactctagcccagcccgagatcaactcctcctacaaatattattggatgataggccctagaacccaataaaggagctccaaatgtcgttgggtggggaagcaaaatgtagagaaacattttaaagcacactgtaattaataaatgcaattataaactatatggaggagggtgcagaggagcgaatgtgtctggtgtgtgatgtgtgtgtgtgcagtgggggtatcacacgagagtatgacatctgagttgagggtagcaggtgcctggagtctcaggtggctgctcacccatctgtgcaggtgtctctggggctgctggtctcacctgtggtctgcagtagacacaattggctgagcaggatatgtgatactgtgtggttggtgtggagttttgaagaaggggctgtgtttgggccacgtaggctctactcagagacttgaaaccacttcagaatggtgcatatgtcgaaagagctggctgggggccttgcccaaaccaactgaggtcttaaagtccggggaaaaaaagtctgggttccaactagaattctagaaatatttctagaacacacagagagggaataagtccctctatcacccttattaccaagccttgtggttccctgtgattttagataatgtctgatatttttctggctatttgcctagtaggatttaaaaaatattttcaaagtgaagctgagagagaatcttggaaacacacatacctgttgatcatgggccctgcagaattggcccttgggggctttatttggttacgtgtgcctgggtggtctttacc

SEQ ID NO: 126266 - DNA, 462 bp, Homo sapiens
atggccgagctgccccacaggatcatcaaggaaacccagcgtttgctggcagagccagttcctggcatcaaagcagaaccagatgaaagcaacgcccgttattttcatgtggtcattgctggggaatcaaaggattccccctttgagggagggacttttaaacgtgaactattacttgcagaagaatacccaatggcagcccctaaagtacgtttcatgaccaaaatttatcatccaaatgtagacaagttggaaagaataagtttagatattttgaaagataagtggtccccagccctgcagatccgcacagttctgctatcgatccaggccttgttaaatgctcccaatccagatgatccattagcaaatgatgtagtggagcagtggaagaccaacgaagcccaagccattgaaacagctagagcatggactaggctatatgccatgaatagtatttaa

SEQ ID NO: 126267 - DNA, 516 bp, Homo sapiens
atgtgtgactttggcatcagtggctacttggtggactctgtggccaagacgatggatgccggctgcaagcctacatggccgagggcggatgactgtggacggagcgtggagatggagggttctgatgcggatgcagagatgatgtggggcggcgcgcacaacaacgcacacgaccacgcactaccaccgcgcctccaacgacacatctactacctcgccacacacccgctacccacacgcaacgacacgcgacttacaacgcgaactaccacgacaacacatcgaagacgcgaactcactatcaccgcatccacctccatacgctacgacgaccgcgccgacacaccgcacaacgacccgcgacaacccgatcggctaatcaaaactcacacgacaccacaacgcgacgaccaaccacgatcgacatcacgcacacaacaacacgctgcaccgcgcgacacacaacgcgacgtcgtacaacaacaaacgacaacacgcacatcgacgaacaactga

SEQ ID NO: 126268 - DNA, 1906 bp, Homo sapiens
actcactatagggctcgagcggccgcccgggcaggtgtctgcccgcagccatgagcgtgctcggccccggtggagcccgcagtcctctagattagtctccaccgccgtccaggacccacttgcagcatggagtcgcccgcctcgagccagcccgccagcatgccccagtccaaaggaaaatccaagaggaagaaggatctacggatatcctgcatgtccaagccacccgcacccaaccccacacccccccggaacctggactcccggaccttcatcaccattggagacagaaactttgaggtggaggctgatgacttggtgaccatctcagaactgggccgtggagcctatggggtggtagagaaggtgcggcacgcccagagcggcaccatcatggccgtgaagcggatccgggccaccgtgaactcacaggagcagaagcggctgctcatggacctggacatcaacatgcgcacggtcgactgtttctacactgtcaccttctacggggcactattcagagagggagacgtgtggatctgcatggagctcatggacacatccttggacaagttctaccggaaggtgctggataaaaacatgacaattccagaggacatccttggggagattgctgtgtctatcgtgcgggccctggagcatctgcacagcaagctgtcggtgatccacagagatgtgaagccctccaatgtccttatcaacaaggagggccatgtgaagatgtgtgactttggcatcagtggctacttggtggactctgtggccaagacgatggatgccggctgcaagccctacatggcccctgagaggatcaacccagagctgaaccagaagggctacaatgtcaagtccgacgtctggagcctgggcatcaccatgattgagatggccatcctgcggttcccttacgagtcctgggggaccccgttccagcagctgaagcaggtggtggaggagccgtccccccagctcccagccgaccgtttctcccccgagtttgtggacttcactgctcagtgcctgaggaagaaccccgcagagcgtatgagctacctggagctgatggagcaccccttcttcaccttgcacaaaaccaagaagacggacattgctgccttcgtgaagaagatcctgggagaagactcataggggctgggcctcggaccccactccggccctccagagccccacagccccatctgcgggggcagtgctcacccacaccataagctactgccatcctggcccagggcatctgggaggaaccgagggggctgctcccacctggctctgtggcgagccatttgtcccaagtgccaaagaagcagaccattggggctcccagccaggcccttgtcggccccaccagtgcctctccctgctgctcctaggacccgtctccagctgctgagatcctggactgagggggcctggatgccccctgtggatgctgctgcccctgcacagcaggctgccagtgcctgggtggatgggccaccgccttgcccagcctggatgccatccaagttgtatatttttttaatctctcgactgaatggactttgcacactttggcccagggtggccacacctctatcccggctttggtgcggggtacacaagaggggatgagttgtgtgaataccccaagactcccatgagggagatgccatgagccgcccaaggccttcccctggcactggcaaacagggcctctgcggagcacactggctcacccagtcctgcccgccaccgttatcggtgtcattcacctttcgtgttttttttaatttatcctctgttgattttttcttttgctttatgggtttggcttgtttttcttgcatggtttggagctgatcgcttctcccccaccccctagggg

SEQ ID NO: 126269 - DNA, 429 bp, Homo sapiens
acacaccaaggggggccagctcagcctctgtgcccaccctagctagcaccctgggtgaaggtgaggcctgggtgtggagcacaaaaccacaggcactcactcagggtatcagagcagaaccaccatgcacacttgttctggttgtgcgctgtgcagggtgcccggccctgaggctgtcagggctgagtctacttggaggaaagggcttctttttctaattcctaggaaggtgctgctttcataagcacatgcccttggccagaggccagagggctgtcaggattttgggggtcggggtcacaggtggaaggtagaaagatagagcttccactgggtcctcacatcgtggcctccttctctacctgcagcccctgccccacccccactgtcagtgcgagtcctgggcagctcctccttgcagctgctgtg

SEQ ID NO: 126270 - DNA, 1308 bp, Homo sapiens
atgcagtaccgtatgctgtttggggccttctcacctgatgctccctccccgcctaccccccacgcaatgtccccttctcccaacttagtggacagtacagcacagtgtgagggatttcaaacattccgtgcatcagaaccatctggaaagattgccaatggcagcctcctggccccattccctgatgttctgattccgagatgggctctgaaagaagatacctggctgggctccagagagtatacccacacttcaggcaggagcgtgccatatctctatcaccagtccgttgggctgtctcttggctacccgcatacctcctctgttcttcgctcctctttaccttatcttacctgcgctccctcttctttcacagtgtgtataactctcttatcatcattgcttcgtctcttcccacgcgtacttccacccgtggtgaagatcactgccacatcagctgccctcccgcacattcctgctcttgctccttgtcttctggagctggttgagcataggcccagggacctacggtttgaggacgactccaaagagcgagtcatccccgtcactccggcctgcgggacgttccgctggaatcccggactgcctgcctgttcccttgcggtggtcacgtgggcaagcggctttgtatcagccgccgttcgaacaatgggctgtcaaaccacagctggactgcgctactcctctcatgccgagtggcagatcaacccccttcagctggcctctgcagccttctcagccacgtgcgtgcagagtgccgggctctgtgctgcctggcgtgagggtgcacaggaatctaaggctggatctctggctcatttccccctgggaatcccatcctatgctgatctccaggacttccccattgctggcagccctgcagagcccgcagcagagggacggatgtctggaacgtcctggtctcctggctcgggctctggggcctacaaggagccagccatcctcgtggggcctgagaacctcaccctgacagtgcaccagaccgcggtgcttgagtgtgtcgccacgggcaacccgcgccccattgtgtcctggagccgcctgggctggccacccaacccaacagccaaagagcaagaacagagggcaaaaacagagagccagcggaagcagccgagagacaaagcgagagagaaccagccaaaggccgctcgccccaagcgagccgccccaaagagccacgaagcagcccgaaagacaaaccccccgacagcaagcacaaaacggcaagcagcccccacgaacacaccaaaagagagctcataa

SEQ ID NO: 126271 - DNA, 2695 bp, Homo sapiens
atgcaaagagcctgtggaagatcttaccagatggagaaaggcaatgccaagggcttgagcctggtcgcacctctggtgggggcagggcggtgctgggagattccttcccagatcgctgtggacaaagggccccaaggtactgtttataagggctgtacctacgtggggatgtgtgtgattgattacctgcacagaaccagagccatgtcggacttccacgtgcatccccaggccaccgtgggtgaggagggtggtgtggcccgcttccagtgccaaatccatgggcttcccaaacccctgatcacttgggagaagaacagagtcccaattgacacggacaatgagaggtacacattgctgcccaagggggtcctgcagatcacaggacttcgagctgaggacggtggcatcttccactgtgtggcctcaaacatcgccagtatccggatcagccacggggccaggctcactgtgtcaggctcgggctctggggcctacaaggagccagccatcctcgtggggcctgagaacctcaccctgacagtgcaccagaccgcggtgcttgagtgtgtcgccacgggcaacccgcgccccattgtgtcctggagccgcctggatggtcgccctatcggggtggagggcatccaggtgctgggcacaggaaacctcatcatctcagacgtgacggtccagcactctggcgtctacgtctgtgcagccaacagacctggcacccgggtgaggagaacggcacagggccggctggtggtgcaagccccagctgagtttgtgcagcatccccagtccatctccaggccagctgggaccacagccatgttcacctgccaagcccagggtgagccaccgcctcatgtcacgtggctgaaaaatggacaggtgctggggccaggaggccacgtcaggctcaagaataacaacagcacactgaccatttctggaatcggtcctgaggatgaagccatttatcagtgtgtggccgagaacagtgcgggctcatcacaggccagtgccaggctgaccgtactgtgggctgaggggctccccgggcctccccgcaatgtgcgggcagtctctgtgtcttccactgaggtgcgtgtgtcctggagtgagccgctggccaacaccaaggagatcatcggctacgtcctgcacatcaggaaggctgctgacccaccggagctggagtatcaggaggcagtcagcaagagcacctttcagcacctggtcagcgacctggagccctccacagcctacagtttctacatcaaggcctacacaccaaggggggccagctcagcctctgtgcccaccctagctagcaccctgggtgaagcccctgccccacccccactgtcagtgcgagtcctgggcagctcctccttgcagctgctgtgggagccttggccccggctggcccagcacgagggcggcttcaagctgttttaccgcccagcaagcaagacctccttcaccggccccatcctgctgcctggaaccgtctcctcctacaacctcagccagctcgaccccactgcagtgtatgaggtgaagctgctcgcctacaaccagcatggagatggcaatgccacagtccgctttgtgtctttgaggggagcatctgagaggacagccttgagcccaccatgtgactgccggaaggaggaggccgccaaccagacgtccaccacaggcatcgtcatcggcatccacatcggggtcacttgcatcatcttctgtgtcctcttcctcctgttcggccaaaggggcagggtcctcctgtgtaaagatgtggaaaaccagctgtcccctccacagggtccccggagccagagggaccctggcattctggccctaaatggggcgagacggggacagcggggccagctgggccgagacgagaaacgtgtggatatgaaggagctggagcagctgttccccccggccagcgcagcagggcagccggaccccagacccacacaggatcctgcagcccccgctccgtgtgaggagacccagctctccttgctgccacttcaggggtgcggcctgatggaggggaagacgacggaggcgaagaccacagaggccacggctccctgcgccggcctggcggctgccccaccacccccagatggaggccctggcctcctcagtgaaggccaggcttccaggcctgcagcggcccgggcccggcccctggaatgtaccatgtgtgggatgggtcttggccactctgccgaactggcatttgctgtggagccaagtgatgatgttgccgtccccgggcagcctatagtgctggactgcagggtggaggggacccctccagtgcgaatcacctggaggaagaatggggtagagctgccagagagtacccactccaccttgctggccaatgggtccttgatgatccgtcacttcaggctggagccgggaggcagcccttcggatgaaggtgactatgagtgtgtggcccagaaccgctttgggctggtggtcagccggaaggctcgcatccaagctgcaatgcaggggaaggctggtgcagcctctgagcagatggctgggtgtgaggaagggaagcgtggacagagggtggggaccccgacttggaaaccgaagccccaggtgagtgacctgcccaaggacatggctggtcctccagtctgggcag

SEQ ID NO: 126272 - DNA, 261 bp, Homo sapiens
attgtggccgccatcctcgccatcgctggcattgtgatgatgacctacgctgatggcttccacagccactccgtcatcggcatcgcactggtggtggcctcagcatcgatgtctgccctctacaagccacatcgttgcagcacctgggataaaatgagtggtgcccatccgcacagtcagattcctgacatcattgatggcagcgaacaagttcagtgtttgctcagatcatttgccaccctatggggtgggaagacttga

SEQ ID NO: 126273 - DNA, 627 bp, Homo sapiens
ttgttcaatcaactggctggcaagttggagctgactcggagttcagctgagtctgtgagccacggactttggttcctcagtccctccttaagcgggtctccctgcatggctgcatggattttctcatgcctgatcattgtagatgggatggagaagggaggtagggcacagatatggcttggtattgatggcccaagttgctggaaatggggagagagtggggatcccatcctggagatgaaaaaggttttgttcaagctcctcctgggcagtgctaagtttggagaagccgccttatttttgtccatcttgggtgtgtttaacatcctcttcatcacctgcattcctattatcctctactttaccaaagtggaatactggagctcttttgatgacattccatggggaaacctttgtggattttcagttcttttattgagtgaccacgttggtcaagaaatcacagccgaagccattaaggttcttaaagctatttctgatgttcgttccaatgtcaagttcgatttcgaaaatcatttaattggtggtgctgctatcgacctgcaggggggggggggaaagccacgttgtgtctcaaaatctctgatgttacattgcacaagataa

SEQ ID NO: 126274 - DNA, 986 bp, Homo sapiens
ttagcgggcgaaggaagggcgggctcttctgttcttgctcctgaggtccctgaacctcaggttcggcagccgcccctctgcaggctccctcccttccttccctcactttgaagtccgggtgagccagcttgatcaacccagacatccccactccctctggcaggagcaggaggagaaaaccccaggccgatgatgatgatggcgatgacccggaccccattgaagacgatctgactggtgtagtgatcaatcactgcattcacaggtatgctgaggacgattccaagagacatcagagtgggatatgtaacggcaattccaaaatttaatacaatattgaatgtcaataaaagaactgaaaatccacaaaggtttccccatggaatgtcatcaaaagagctccagtattccactttggtaaagtagaggataataggaatgcaggtgatgaagaggatgttaaacacacccaagatggacaaaaataaggcggcttctccaaacttagcactgcccaggaggagcttgaacaaaaccttgtagagggcagacatcgatgctgaggccaccaccagtgcgatgccgatgacggagtggctgtggaagccatcagcgtaggtcatcatcacaatgccagcgatggcgaggatggcggccacaatcctcactcccatgaatctgtccctgagaacgatccatgagagcaagaacacaaaagctttgttgcagcagaacaacacggagacatccgtagtgtttattttctttattgcatgtaagtacaggtagtttgtgagtgtccaaagaacaccaaagggtgctgccttggtaaaaaacaccttcaaagtcaagccattgtctccaaaaaatcgacagcattcccagcccagagcctggtagcccatctgggtggctagatccagaagagaaataacaattactaccgttcggctctcaggaagccacatcccttctcctttctccat

SEQ ID NO: 126275 - DNA, 906 bp, Homo sapiens
gcacccttttcctcgtgcagcccagcctgactcctggagattgtgaatagctccatccagcctgagaaacaagccgggtggctgagccaggctgtgcacggagcgcctgacgggcccaacagacccatgctgcatccagagacctcccctggccgggggcatctcctggctgtgctcctggccctccttggcaccacctgggcagaggtgtggccaccccagctgcaggagcaggctccgatggccggagccctgaacaggaaggagagtttcttgctcctctccctgcacaaccgcctgcgcagctgggtccagccccctgcggctgacatgcggaggctggactggagtgacagcctggcccaactggctcaagccagggcagccctctgtggaatcccaaccccgagcctggcgtccggcctgtggcgcaccctgcaagtgggctggaacatgcagctgctacccgcgggcttggcgtcctttgtcgaagtggtcagcctatggtttgcagaggggcagcggtacagacacgcggcaggagagtgagctcgcaacgccacctgcacccactacatgcagctcgtgtgggccacctcaagccagctgggctgtgggcggcacctgtgctctgcaggccaggcagcgatagaagcctttgtctgtgcctactcccccagaggcaactgggaggtcaacgggaagacaatcgtcccctataaaaagggggcctggggctcgctctgcacagccagtgtctcaagcctgcttaaagcctgggaccatgccagggggctactggggggcccccgggaaaccttggggaaggagccgacagaaccctggaccgccttaaaataagaaacacgccattgtggggtgtagccctgggctacacgcgcaaac

SEQ ID NO: 126276 - DNA, 1519 bp, Homo sapiens
atgccggtgctgcagggagctctttccacgctggcagcgctgacgtcccccgcgcccgcggccagcggggcggagaagaggaggagctgccaggcggcgccgccggctgccgaacctgatggctcagaccctgggcaaccagtggtgctcccagctgtgacctccgtggttgggtactcctgcctgggaccccaggaggggctgcggtggtcgttggctggcagctggcaccctttccagggcccttttgtcaaagtcctagaaaacttcatttccgtaaaggactggagtgacagcctggcccagctggctcaagccagggcagccctctgtggaaccccaaccccgagcctggcgtccggcctgtggcgcaccctgcaagtgggctggaacatgcagctgctacccgcgggcttggtgtcctttgtcgaagtggtcagcctatggtttgcagaggggcagcggtacagccacgcggcaggagagtgtgctcgcaacgccacctgcacccactacacgcagctcgtgtgggccacctcaagccagctgggctgtgggcggcacctgtgctctgcaggccaggcagcgatagaagcctttgtctgtgcctactcccccagaggcaactgggaggtcaacgggaagacaatcgtcccctataagaagggtgcctggtgttcgctctgcacagccagtgtctcaggctgcttcaaagcctgggaccatgcaggggggctctgtgaggtccccaggaatccttgtcgcatgagctgccagaaccatggacgtctcaacatcagcacctgccactgccactgtccccctggctacacgggcagatactgccaagtgaggtgcagcctgcagtgtgtgcacggccggttccgggaggaggagtgctcgtgcgtctgtgacatcggctacgggggagcccagtgtgccaccaaggtgcattttcccttccacacctgtgacctgaggatcgacggagactgcttcatggtgtcttcagaggcagacacctattacagagccaggatgaaatgtcagaggaaaggcggggtgctggcccagatcaagagccagaaagtgcaggacatcctcgccttctatctgggccgcctggagaccaccaacgaggtgattgacagtgacttcgagaccaggaacttctggatcggaaccctgggccatggcggctgccagcagatggcaaggggcccaggtagggagcacatgggggctgccagcgctgggaagaggggccagaaaggcagctggcagcagactccagggtctgagtgggccaaccttgactaccccggcccagggctcacctacaagaccgccaaggactccttccgctgggccacaggggagcaccaggccttcaccagttttgcctttgggcagcctgacaaccacgggtttggcaactgcgtggagctgcaggcttcagctgccttcaactggaacgaccagcgctgcaaaacccgaaaccgttacatctgccagtttg

SEQ ID NO: 126277 - DNA, 792 bp, Homo sapiens
tgctgggattataggtgtgagctcagctcggtaccctctgtatctccacccaaatctcctgctcgacgttgctcttccccacttcttggacggacgacggccacgggggacggtgcttcgatcatgagggcggacttcccccttgctgtcctcttgatagactggagtgacagcctggcccaactggctcaagccagtgcagccctctgtggaatcccaaccccgagcctggcgtccggcctgtggcgcaccctgcaagtgggctggaacatgcagctgctgcccgcgggcttggcgtcctttgttgaagtggtcagcctgtggtttgcagaggggcagtggtacagccacgcggcaggagagtgtgctcgcaacgccacctgcacccactacacgcaggtgagtgtgctgcagtatcccaatccggagcaggagtatttctattgcgactacaggattgaaattaagcccgggaaaccaagcctggggggccagtggccacacctacgtggaaagggcggggttaccccagtgttggttgaaaatcggaccgtccccaaaaggtacccggggggggtccacttcacaagcgaaaaagaagaacaaaagctgctcggaccactggagggaaacggccccaaaattgtccttgagagactggacatgactcttgccaaccatgtttggctgaaggcccagacaagaactaatgacatctcaaggcagaaagccgcagtcgcagactgggccagacctgagggcctgggaccactggcactgctgggcaaatga

SEQ ID NO: 126278 - DNA, 566 bp, Homo sapiens
gccactgaagatcctggtgtcgccatgggccgccgccccgcccgttgttaccggtattgtaagaacaagccgtacccaaagtctcgcttctgccgaggtgtccctgatgccaagattcgcatttttgacctggggcggaaaaaggcaaaagtggatgagtttccgctttgtggccacatggtgtcagatgaatatgagcagctgtcctctgaagccctggaggctgcccgaatttgtgccaataagtacatggtaaaaagttgtggcaaagatggcttccatatccgggtgcggctccaccccttccacgtcatccgcatcaacaagatgttgtcctgtgctggggctgacagatccacatctcaaagaagtggggcttcaccaagttcaatgctgatgaatttgaagacatggtggctgaaaagcggctcatcccagatggctgtggggtcaagtacatccccagtcgtggccctctggacaagtggcgggccctgcactcatgagggcttccaatgtgctgcccccctcttaatactcaccaataaattctacttcctgtccaa

SEQ ID NO: 126279 - DNA, 917 bp, Homo sapiens
atgggctatggtgttactgccttcttcatatgggcattcagcagggtcctgagttcttgtcctgcatccaagaagaatgagcttatgctgacagccatggatatatgcgctctttcccttcggtgtgccactgaagattctgggtgtcgccccatgggcccgccgccccggcccgttgttacccggtattgtaagaacaagccgttacccaaagttcttcgcttctgccgaaggtgtcccctgatgccaagattcgcatttttgaccctggggcggaaaaaaggcaaaaagtggaatgagttttccgcttttgtggccacatggtgtcagatgaataataaccagctgtcctcttacagccctggaaggctgcccgaaatttgtgcccaataagtaccatggtaaaaagtttgtggcaaagatggcttccaatatccgggttgcggctccacccctttcacgtcatcccgcatcaaacaagatgttgttcctgtgctggggctgacaggctccaaacaggcatgcgagggtgcctttggaaagccccagggcactgtggccagggttcacattggccaagttatcatgtccattccgcaccaagctgcagaacaaggagcatgtgacttgacgccctgcgcagggccaaagttcaagtttcctggccgccaagaagatccacatctcaaagaagtggggcttcaccaagttcaatgctgatgaatttgaagacatggtggctgaaaagcggctcatcccagatggctgtggggtcaagtacatccccagtcgtggccctctggacaagtggcgggccctgcactcatgagggcttccaatgtgctgcccccctcttaatactcaccaataaattctacttcctgtccacctaaaaaaaaaaaaaaaaaagtcgacgc

SEQ ID NO: 126280 - DNA, 369 bp, Homo sapiens; identical to SEQ ID NO: 122077

SEQ ID NO: 126281 - DNA, 394 bp, Homo sapiens; identical to SEQ ID NO: 120248

SEQ ID NO: 126282 - DNA, 717 bp, Homo sapiens
atggggaaaaaacagagcagaaaaactggaaagtctaaaaagcagagcacctctcctcctccaaaggaacacagttcctcaccagcaacggaacaaagccggacggagaatgactttgacgagttgagagaagaaggcttcagacgatcaaactactccgagctacaggaggaaattcaaaccaaaggcaaagaagtgacgggggagaatggaaccaagttggaaaacactctgcaggatattatccaggagaacttccccaatctagcaaggcaggccaacgttcagattcaggaaatacagagaacgccacaaagatactcctcgagaagagcaactccaagacacataattgtcagattcaccaaagttgaaatgaaggaaaaaatgttaagggcagccagagagaaaggtcgggttacccacaaagggaagcccatcagactgacagctgatctctcgccagaaactccacaagccagaagagagtgggggctaatattcaacattcttaaagaaaagaactttcaacccagaatttcatatccagccaaactaagcttcagaagtgaaggagaaataaaatcctttacagacaagcaaatgctgagagattttgtcaccaccaggcctgccctaaaagagctcctgaaggaagcactaaacatggaaaggaaaaactggtaccagccactgcaaaatcatgccaaattgtaa

SEQ ID NO: 126283 - DNA, 942 bp, Homo sapiens; identical to SEQ ID NO: 125305

SEQ ID NO: 126284 - DNA, 1059 bp, Homo sapiens
atgggtgatttcctgcattctacagacagaaactacctcattaaattttgggccaaactttcagccaaaaaaacaccagcgaacagcagctctcctttgggcgatcatcagcatccctgtatcaccaagaaccttcagatacctgaaaagtggttaattggacttctgcttccactaaaggcagacctgctaaaggaggatgctggaacccattgcaaagaagctaaaaaccttgatgaaagattagacgaatggctaactagaataaacagtgtagagaagttcttaaatgacctgatggagctgaaaaccatggcacaagaactacattatgcatgcacaagcttcagtagccaatttgatcaactggaagaaagggtatcagtgattgaaaatcaaatgagtgaaatgaagcgagaagagaagtttagagaaaaaagagtaaaaagaaatgaacaaagcctccaaaaaatatgggactatgtgaaaagaccaaatctacgtctgactggtgtacctgaaagtgactgggagaatggaaccaagttggaaaacagtctgcaggatattatccaggagaacttccccaacctagcgaggcaggccaacattcatattcaggaaatacagagaatgccacaaagatactcctctagaagagcaactccaagacacttaattgtcagattcaccaaatttgaaatgacggaaaaaatggtaagggcagccagagagaaaggtcaggttacccacaaagggaagcccatcagaataacagcggatatctcagcagaaactctacaagccagaagagagtgggggccaatattcaacattcttaaagaaaagaattttcaacccagaatttcatatccagccaaactaagcttcataagtgaaggagaaataaaatcctttacagacaaacaaatgctaagagattttgtcaccaccaggcctaccttacaagagctcctgaaggaagcactaaaatggaaaggaacaaccagtaccagccactgcaaaaacatgccaaattgtaaagaccatcgatgctag

SEQ ID NO: 126285 - DNA, 1275 bp, Homo sapiens
atgaagttggaggaaagttctggacagttaaaaatccagcttcaggaagtcgaagggacgggccttcgcaatccaccgccgagcaagggaggaattgtaatgtatgggggccctcctccagatttggaaggaaagaaaggggagggacagaaggaggggggagggggcaaaagggagaagcgggaaagtgaccctggcagcgcagccctagttgcaccccggaatgctgaactcgccccggaactggcgcccaaccgtcccaagcaccccttatttcaaattccttataacctgtcgtatggccaaaccacccctggagaaagtggcaagctgacatatttaaatttaaaagttgccttatttcctctgcattctggtcctggaaatggaaaagaacttaaagcttaccagttggacaagggagaaggagaaggggtaattgatgatggtatagataaatgtgaagggagacaagccctgacacaagctcggagccccatgctaacagacccactggtgctaaaacaaggtcctaccccttttggatcaagtcacgccaatggagtattcagttgctctattctctgtttaaatccaaatgctagaggttgttacatctttattgtaaaaaagtttgctcaggggttggtgaacagacgcttctgcagagaattgggcccattaagcatttactattttactttggttggaaacattgttgacactgtagaagctgctttaatagcccttctttgtgacgggcagaaaggaaccaagctggaaaacactctgcaggatattatccaggagaacttccccaatctagcaaggcaggccaacattcagattcaggaaatacagagaatgccgcaaagatactcctcgagaagagcaactccaagacacataattgtcagattcaccaaagctgaaatgaaggaaaaagtgttaagggcagccagagacaaaggtcaggttacccacaaacggaagcccatcagactaccagcggatctcttggcagaaactctacaagccagaagagagtgggggccaatattcaacattctgaaagaaaagaattttcaacccagaatttcatatccagccaaactaagcttcataagtgaaggagaaataaaatactttacagacaagcaaatgatgagagattttgtcaccaccaggcctgccctaaaagagctcctgaaggaagcactaaacatggaaaggaacaactggtaccagccgctgcaaaatcatgccaaaatgtaa

SEQ ID NO: 126286 - DNA, 1587 bp, Homo sapiens
atggtcaactccggggcttcggccacacgtgaactagaggcaggcaggccggggatatgccggccccagccgtgcactgtgggtgcgatcccccttaaggtcagccttggtggccacgttgctgcctccaccatcccgcccccaaagctgggcagcacagtgcagagagcgactccgtccgctggggaaggggaaagcgctcagtgcaggactttgtcttggaactcagcactggcccccacgagccactgtgaaatccgacattggctggtttcctccgtgtggcagaaccagataaccccaggctggagcctgcggacggagtcgcttgggggacccgcggcccggtgtggcggcctcgtgctctgggccgcctcggcgccagctgcctcggtggcaggcaggccacagccgcaaacttatcgggggaaccagcccccaatatttcaacacctgcagctgagggtccttctgttagaaggaaaactaacaaacagaaacgacatctgcaccaagaccccttctgtacgtcaccatcatcaaagaccaaaagtagataaaaccacaaagacagggaaaaaacagagcagaaaaactggaaactctaaaaagcagagcacctctcctcctccaaaggaacgcagctcttcaccagcaacggaacaaagctggacggaaaatgactttgatgagctgagagaagaaggcttcagacgatcaaactactccaagctacaggaggaaattcacaccaatggcaaagaagttaaaaactttgaaaaaaaattagacgaatggataactagaataaccaatgcagagaagtccttaaaggagctgatggagctgaaagccaaggctcgagaactatgtgacgaatgcagaagcctcaggagccgatgcgatcaactggaagaaagggtcttggtgatggaagatgaaatgaatgaattgaagcaagaagagaattttagagaaaaaagaataaaaagaaatgaacaaagcctccaagaaatatgggactatgtgaaaagaccaaatctacgtcggattggtgtacctgcaaatgacagggagaatggaaccaagttggaaaacactctgcaggatattatccaggagaacttccccaatctagcaaggcaggccaacattcagtttcaggaaatacagagaacgccacaaagatactcctcgagaagagcaactccaagacacataattgtcagatgcaccaaagttgaaatgaaggaaaaaatgttaagggcagccagagagaaaggtcggctcacccacaaagggaagcccatcagactaacagttgatctcttggcagaaactctacaagccagaagagagtgggggccaatattcaacattcttaaagaaaagaattttcaacccagaatttcatatccagccaaactaagcttcacaagtgaaggagaaataaaatactttacagacaagcaaatgctgagagattttgtcaccaccagacctgccctaaaagagctcctgaaggaagcactaaacatggaaaggaacaaccggtaccagccactgaaaaaacatgccaaaatgtaa

SEQ ID NO: 126287 - DNA, 1023 bp, Homo sapiens
atgggtgatttctgcgtttccaaccgaggtaccgggttcatctcactgcttctgctgctgatacccagacaaacagggtctggagtggacctccagcaaactccaacagacctgcagctgagggtcctgactgttagaaggaaaactaacaaacagaaagaacatccacaccaaaaccccatctgtacgtcaccatcatcaaaggccaaagacgaatggctaactagaataaccagtgcagagaagtccttaaaggacctaatggaggtgaaaaccaaggcacgagaactacgtgacgaatgcacaagcctcagtagccgattcgatcaactggaagaaagggtattagtgatggaaaatcaaatgaatcaaatgaagcaagaagagaagtttagagaaaaaagaataaaaagaaacgaacaaagcctccaagaaatatgggactatgtgaaaagaccaaatctacgtgtgattggtgtacctgaaagtgatggggagaatggaaccaagttggaaaacactctgcaggatattatccaggagaacttccccaatctagcaaggaaggccaacattcaaattcaggaaacacagagaatgccacaaagatactcctcgagaagagcaactccaagacacataattgtcagattcaccaaagttgaaatgaaggaaacaatgttaagggcagccagagagaaaggtcgggttacccacaaagggaagcccatcagactaacagcggatctctcggcagaaactctacaagccaaaagagagtgggggccaatattcaacattcttaaagaaaagaattttcaacccagaatttcatatccagccaaactaagcttcataagtgaaggagaaataaaatcctttacagacaagcaaatgctgagagattttgtcaccaccaggcctgccctaaaagagctcctgaaggaagcgctaaacatggaaaggaacaaccagtaccagcactgcaaaaacatgccaaattgtaaagaccatccaggctag

SEQ ID NO: 126288 - DNA, 2055 bp, Homo sapiens; identical to SEQ ID NO: 125813

SEQ ID NO: 126289 - DNA, 6237 bp, Homo sapiens
  misc_feature (1)...(6237): n = a,t,c or g
atggaaatgatccgactagatgaagtccccaatctgagttccttagtatccaatttcgatcagcagcagctcgctaatttctgccggattctggctgtcaccatttcagagatggatacagggaatgatgacaagcacacgcttcttgccaaaaatgctcaacagaagaagagcttgagtttggggccttctgcagctgaaatcaatcaagaaggacaccagtcctctcggtttagggccccacactttgtaacctcatttaaccttaattacttccctgtattaggcagcagtctccagagagacagaagcagtaggatttatgaggctcgggcggaggagctggaagaggagctggaggcagagcgggcagcccgggcccgcgtggagaagcagcgtgcagaggcggcgcgggagctggaggagctgagcgagcggctggaggaggcaggcggcgcatccgcggggcagcgcgagggctgccgcaagcgggaggcggagctggggaggctgcggcgggagctggaggaggcggcgctgcggcacgaggccacagtggcggcactgcggcgcaagcaggcggagggcgcggcggagctgggggagcaggtggacagcctgcagcgggtgcggcagaagctggagaaggagaagagtgagctgcgcatggaggtggacgacctggctgccaacgtggagactctgacccgcgccaaggccagtgcagagaagctgtgccggacctatgaggatcagctaagcgaggccaagatcaaggtggaggagctgcagcggcagctggcggacgcaagcacgcagcgtgggcgactacagacggaaagcggggagctgagtcgcctgctagaggagaaggagtgtctgatcagtcagctgagccgtggaaaggccctggccgcccaaagcctggaagagttgcggcgccagctagaggaggaaagcaaggccaagagtgccctggcccacgccgtgcaggctctgcggcacgactgtgacctcctgcgggagcaacacgaggaggaggctgaggcccaggctgagctgcagcggctgctgtccaaggccaatgccgaggtggcccagtggaggagcaagtacgaagcagatgccatccagaggaccgaggagctggaggaggccaaaaaaaagctggcactgcggctgcaggaggcagaggagggcgtggaggctgccaacgccaagtgctcatcgttggagaaggccaagctgcggctacagacagagtcagaggatgtaaccctggagctggagcgggcgacctcagcagctgctgcgctggacaagaagcagcggcacttggaacgggcactggaggaacggcggcggcaggaggaggagatgcagcgggagctggaggcggcacagagggagtcccgtggcctgggcaccgagctcttccggctgcggcacggccacgaggaggcacttgaagccctggagacgctcaagcgggagaacaagaacctgcagggggcttctgaggagaatggcctgcctcacacgtcagccagaacccagctgccccagtcaatgaagattatgcatgagatcatgtacaaactggaagtgctctatgtcctctgcgtgctgctgatggggcgtcagcgaaaccaggttcacagaatgattgcagagttcaagctgatccctggacttaataatttgtttgacaaactgatttggaggaagcattcagcatctgcccttgtcctccatggtcacaaccagaactgtgactgtagcccgccaccccaggaactgagtatggaagtcgttggccccttactacctttggaatcaatggatttctcaacctactgcccctctaaagcaagagtggacagcgtggctattcccaggggccggcaggaacttcagacaggcaaagccgactgcttactgagcagctggaggattcttccctccacaaggaggaacaagtacttgttactcaacaaccaggagctgaatgaactcagtgccatctctctcaaggccaacatccctgaggtggaagctgtcctcaacaccgacaggagtttggtgtgtgatgggaagaggggcttattaactcgtctgctgcaggtcatgaagaaggagccagcagagtcgtctttcaggttttggcaagctcgggctgtggagagtttcctccgagggaccacctcctatgcagaccagatgttcctgctgaagcgaggcctcttggagcacatcctttactgcattgtggacagcgagtgtaagtcaagggatgtgctccagagttactttgacctcctgggggagctgatgaagttcaacgttgatgcattcaagagattcaataaatatatcaacaccgatgcaaaggtattcctgaagcagatcaacagctccctggtggactccaacatgctggtgcgctgtgtcactctgtccctggaccgatttgaaaaccaggtggatatgaaagttgccgaggtactgtctgaatgccgcctgctcgcctacatatcccaggtgcccacgcagatgtccttcctcttccgcctcatcaacatcatccacgtgcagacgctgacccaggagaacgtcagctgcctcaacaccagcctggtgatcctgatgctggcccgacggaaagagcggctgcccctgtacctgcggctgctgcagcggatggagcacagcaagaagtaccccggcttcctgctcaacaacttccacaacctgctgcgcttctggcagcagcactacctgcacaaggacaaggacagcacctgcctagagaacgtgctgatggtgcgtgaagccgagctgcagcccatgaacccgcctcgcttcgacttactggaggacatggccatgatgacgcacctgaacgaggcctctgtgctgcacaacctgcgccagcgctatgcccgctggatgatctatacctactcaggcctcttctgtgtcaccatcaacccctacaaatggctcccagtctatacggcctccgtagtggctgcttacaagggaaagcgccgctcagattccccgccccatatatatgcggtggcggacaacgcctacaacgacatgctgcgcaaccgagacaaccagtccatgctgatcaccggagagtcgggggccggtaagacggttaacaccaagcgggtcattcagtactttgccatcgtcgctgccctgggagacgggccgggcaagaaggcccaatttctggcaacaaagacggggggcacccttgaggatcaaatcatcgaggccaaccctgccatggaggcctttggcaacgccaagaccctgaggaatgataactcctcccgctttggcaagttcatccgcattcactttggtccctctgggaagctggcatccgcggatattgacagctatctcctggagaagtcgcgggtgatcttccagttgcctggtgagcgcagctaccatgtctactaccagatcctctcagggaggaagccagagctgcagggtgaggggcagtacgatgaaggggacatgctgcttctgtctatgaacccctatgactaccacttctgcagccagggcgtcatcaccgtggacaacatgaatgatggggaggagctcatcgccaccgaccatgccatggacatcctaggcttcagcgtggatgagaaatgtgcctgctataagatcgtgggcgccctcctgcactttggcaacatgaagttcaagcagaagcagcgggaggagcaggcggaggccgatggcactgagagtgctgacaaggctgcctacctgatgggggtcagcagtggggacctcctcaaaggccttttgcacccccgggtgcgtgtagggaacgagtacgtgaccaagggccagagtgtggagcaggtggtgtttgctgtgggggctctggccaaggccacctatgaccggctgttcaggtggctggtgtctcggatcaaccagaccctggacacaaagctgccccggcagttcttcatcggggttctggacatcgctgggtttgagatctttgagttcaacagcttcgaacagctgtgcatcaacttcaccaatgagaaattgcagcagttcttcaaccagcacatgtttgtgctggagcaggaggagtacaagcgggagggcatcgactgggtcttcatcgacttcggccttgacctgcagccttgcatcgacctcatcgagaagccactgggcatcctgtccatcctggaggaggaatgcatgttccccaaggcctcagacgccagcttccgggccaagctctacgacaaccacgcggggaagtcacccaatttccagcagcctcggcctgacaagaagcgcaagtaccaggcccacttcgaggtggtccactacgcaggcgtggtgccttacagcattgtgggctggctggagaaaaacaaggatcccctgaatgagaccgtggtccccatcttccagaagtcacagaataggctcctggcgactctctatgagaattatgcgggctcctgctccactgagccccccaagtctggggtgaaagagaagcgtaagaaggcagcatcgttccagacggtgtcccagctgcacaaggagaacctcaacaagctgatgaccaacctgcgggccacacagccccacttcgtccgctgcattgtccccaacgagaacaaaaccccaggggtcatggatgccttcttggtgctacaccagctgcgctgcaatggggtcctggaggggatccggatctgccgccaagggttccccaacaggttgctctacaccgacttccggcagcgccagaacctccaatacgatgctgaagagaagtggcaatggcactgccacttccagaaacgatcaggaactcgtcttgttcctgatcttagtggtagaagctttcaattttttgccattagcatatcaattattcttcttgtaaaaatacttttagcagttgccctagaatttccagtatatatttacgacgagtctaagtccactctcaatgatattgtgctgtttttcactgagacttttttgacggagagggacaaacaatccaagtggagtggaattcctcagctgctcctcaagctgcacaccaccagccacctccacagtgactttgttgagtgtcaaaacatcctcaagcctctgctggtgatacccagacaaacagggtctggagtggacctccagcaaactctgacagacctgcagctgagggtcctgactgttagaaggaaaactaacaaacagaaaggacatccacaccaaaaccccatctgtatgtcaccatcatcaaagaccaaagaagctaaaaaccttgacaaaagattagacgaatggctaactagaataaacagcatagaaaagaccttaaatgacctgatggagctgaacaccatggctcgaaaactacgtgacgcatgcacaagcttcagtagccaattcgatcaagtggaagaaagggtatcagtgattgaagatcaaatgaatgaaatgaagcgagaagagaagtttagagaaaaaagaataaaaagaaacaaacaaagcctccaagaaatatgggactgtgtgaaaagaccaaatctacgtctgattggtgtacctgaaagtgacggggagaatggaaccaagttggaaaacactcttcaggatattatccaggagaacttccccaatctagcaaggcaggtcaacattcaaattcaggaaatacagagaacgccacaaagatactcctcgaggagaggaactccaagacacataattgtcagattcaccaaagttgaaattaaggaaaaaatattaagggcagccagagagaaaggtcgggttacccacaaagggaagcccatcagactaacagcggttctcttggcagaaactctacaagccagaagagagtgggggccaatattcaacattcttaaagaaaagaattttcaacccagagtttcatatccagccaaactaagcttcataagtgaaggagaagtaaaatcctttacagacaagcaaatgctgagagattttgtcaccaccaggcctgccttacaagagctcctgaaggaagcgctaaacatggaaaggaacaaccgataccaactactgcaaaaacatgccacattgtcaagaccttcgatgctaggaangaactgcatcaactaatgagcaaataaccagctaacatcataatgacaggat

SEQ ID NO: 126290 - DNA, 978 bp, Homo sapiens
atggggaaaaaacagaacagaaaaactggaaactctaaaaagcagagtgtctctcctcctccaaaggaacgcagttcctcaccagcaacagaacaaagctggatggggaatgactttgacgagctgagagaagaaggcttcagacgatcaaattactctgagctacgggaggacattcaaaccaaaggcaaagaagttgaaaactttgaaaaaaatttagaagaatgtataactagaataaccaatacagagaagtgcttaaaggagctgatggagctgaaaaccaaggctcgagaactactggaagaaagggtatcagcaatggaagatgaaatgaatgaaacgaagcgagaaggaaagtttagagaaaaaagaataaaaagaaacgagcaaagcctccaagaaatatgggactatgtgaaaagaccaaatctacgtctgattggtgtaactgaaagtgatggggagaatggaaccaagttggaaaacactctgcaggatatcatccaggagaatttccccaatctagcaaggcaggccaacgttcagattcaggaaatacagagaatgccacaaagatactcctcgagaagagcaatcccaagacacataattgtcagactcaccaaagttgaaatgaaggaaaaaatgttaagggcagccagagagaaaggtcgggttaccctcaaagggaagcccatcagactaacagtggatctctcggcagaaaccctacaagccagaagagagtgggggccaatattcaacattcttaaagaaaaggattttcaacccagaatttcatatccagccaaactaagcttcttaagtgaaggagaaataaaatactttacagacaagcaaatgctgagagattttgtcaccaccaggcctgccttaaaagagctcctaaaggaagcgctaaacatggaaaggaacaaccggtaccagccgctgcaaaatcatgccaaaatgtaa

SEQ ID NO: 126291 - DNA, 1448 bp, Homo sapiens
  misc_feature (1)...(1448): n = a,t,c or g
aacacttttggtgtcacaaacaggattcaaaaacaaaagtgtgccactttttagcaacaagggcagggcgggaggctcgaggacttcccatatccccggatggaaactcccccagttctctcccttggcaattgaatggtcaaggggaaccggactttgcacgcagctggagcgacgaggacggctttccgcttttggcgcggcctttgtctctagctgcagccggcgtttcaggtctcgtcttcactggtctgtgtcctattctcctggaggcccagcctctgtggccctgtgacctgcagttcttcagacaatcagtaaaaacaaacttctccaagctaaaggaggatgttcgaatccatcataaagaagctggaaaccttgaaaaaagattagatgaatggctaactataatagacagtgtagagaagaccttaaatgacctgatagagctgaaaaccatggcccaaaaactacgtgatgaatgcagaagcttgagtatccaatgtgatcaacaggaagaaaaagtatcagtgattgttaaaatgaatgaaatgaagcaagaagagaagtttagagataaaataataaaaagaaatgaacaaagcctccaagaaatatgggactatgtgaaaagaccaaatctacgtctgattggtgtacctgaaagtgatggggagaatagaaccaagttggaaaacactctgcaggatattatccaggagaacttccccaacctagcaaggcaggccgacattcaaattcaggaaatacagagaacgccacaaagatactcttcgagaagagcaactccaagacacataattgtcagattcaccaaagttgaaatgaaggaaaaaatgttaagggcagccagagagaaaggtcgggttacccacaaagggaagcccatcagactaacagtggatctctcggcagaaactctacaagctagaagagagtgggggccaatattcaacattcttaaagaaaagaattttcaacccagaatttcatatccagccaacctaagcttcatcagtgaaggagaaataaaatcctttacggacaaacaaatcctgagagattttgtcaccaccaggcctgccttacaagagctcctgaaggaagcactaaacatggagaggaacaactggtaccagtcactgcaaaaacatgccaaatcngtaaacaccatcaatgttaggaagaaactgcatcaactaacaagtaaaataactagctaacataatgacaggaccaaattcacacataacaatattaaccttaaatgtaaatgggctaaatgctccaattaaaagacacagactggcaaattggataaaggggcccagacccttggcaggtgnagtggctcacacctgtaatccccaccacttttgtgaggctggaagtggngcagatcacgaggttcaggagatcgagac

SEQ ID NO: 126292 - DNA, 909 bp, Homo sapiens
atggtggacactgggttgcttccacctcttggctgttgtgaagaatgctgctatcaaatagaggtgttgcttttcttttattcccttgttcttgaccctcctctggatggagattctgacagtacctcagatgatgaggcagattcagatgaggaagatgaggacgagtgtaaagaactaaattcagattctgaatgtgaggaacaggaaacgcaggaaattaaagaaagggaaaatgaaaaaattgcaacattaaaacctggagcaattggtagcactaagacccagtggaatctgaggcttgtttattcagagagcacctcaataaaccaaggcatatctggcacagccagtgcccttacaaatggcagcaattgtctgccgccttgtgacagggcgaatggaaccaagttggaaaacactgttcaggatattatccaggagaacttccccaacctagcaaggcaggccaacattcaaattcaggaaatacagagaatgccacaaagatactcctcaagaagagcaactccaaaacacataattgtcagattcaccaaagttgaaatgaaggaaaaaatgttaagggcagccagagagaaaggtcggcatacccacaaagggaagtccatcaaactaatagcggatctcttggcagaaactctacaagccagaagagagagggggccaatattcaacattcttaaagaaaagaattttcaacccagaatttcatatccagccaaattaagcttcatacatgaaggagaaataaagtcctttacagacaaacaaatgctgagagattttgtcaccaccaggcctgccttacaagagctcctgaaggaagcactaaacatggaaaggaacaactggtaccagccactgcaaaaacatgcaaaattgtaa

SEQ ID NO: 126293 - DNA, 2167 bp, Homo sapiens
atggatgaagctggaaaccacattctcagcaaactaacacagaacagaaaaccaaacaccacatgttctcactcggatggccctatatttgtcactgagagcagaagggttgagaacttagatcctgacaggaggcccacctttattggagaaatggctctgcaacttaggccacagaacttcttaccacttggaagcaaaatagttgctttaatggtaaccaaatgccctccttcaagacagtatttcaagaaggaggagtatacgtatattatacaaacatatccaatccctttagaagataattatcaatatcatgcagggaagctggaacacacacacaaaatcgagtactatctagaagatcaagccacaaatctcaagagaagcaagacttttgttggaaaacaaaacaaaatcttgagacatgaaggatctgtaatggacacctgtcgattgtgtctgttcagcagctcctctcccacctgtcttccagtacaacaccttatttcattggagagaaaggttctacctcttctccttaaggttttagtggacagccaaaccagtcttcagtctacagggggcagactgacacctcacacggccgggtacccctctgagacgaaacttccagaggaacgatcagacagcaacatttgctgttcagcaatattcgctgttctgcagcctctgctgctgatacccaggcaaacagagtctggagtagacctccagcaaactccaacagacctgcagctgagggtcctgactgttagaaggaaaacaaacagaaaggacatccacaccaaaaccccatctgtacgtcaccatcatcaaagaccaaaggtagataaaaccacaaagatggggaaaaaacagagcagaaaaactgaaaattctaaaaatcagagcgcctctcctcctccaaaggaacgcagctcctcaccagcaatggaacaaagctggacggagaatgactttgacgagttgagagaagaaggcttcagacgatcaaacttctctgagctaaaggaggaagttcgaacccattgcaaagaagctgaaaaccttgataaaaaattagacgaatggctaactagaataaccaatgtagagaaggccttaaatgacctgatggagctaaaaaccatggcacgagaactatgtgacgaatgcacaagcttcagtagccaattcgatcagctggaagaaacggtatcagtgattgaagatcaaatgaatgaaattaagcgagaagagaagtttagagaaaaaagaatgaaaacaaatgaacaacgcctccaagaaatatgggactatgtgaaaagaccaaatctacgtctgattggtgtacctgaaagtgacagggagaatggaaccaagttggaaaacactctgcaggatattatccaggagaacttccccaacctagcaaggcaggccaacattcaaatacaggaaatacagagaatgccacaaagatactcctcgagaagagcaactccaagacacataactgtcacattcactaaagttgaaatgaaggaaaacatgtcaagggcacccagagagaaaggtcaggttacccacaaagggaagcccatcagactaacagctgatctctcagcagaaactctaaaagccagaagagagtgggggccaatattcagtattcttaaagaaaagaattttcaacccagaatttcatatccagccaaactaagcttcataagtgatggagaaataaaatcctttacagacaagcaaatgctgagagattttgtcaccaccaggcctgccctacaagagctcctgaaggaagcactaaacatggaaaggaacaaccggtaccagccactgcaaaaacatgccaaattgtaaagaccatcaatgcttggaagaaactgcatcaactaacgggcaaaataaccagctaacatagtgacgggatcaaattcacacataacaatattaacctttaatgtaaatgggctaaatgcctcaattaaaagacacaggcaaattggataaagagacaagacccatcagtgtgctgtattcaggagacccatctcacatgtagtgacacacatagactcaaaataaagggatggaagaagatctaccaagcaaatggaaagcaaaaaaaaaaaaaaagtcgacg

SEQ ID NO: 126294 - DNA, 1451 bp, Homo sapiens
atggctctgaagagagcagcagatctcccagcacagcgttcaagctctgctaaaggtcagactgcctcctcaaatgggtcactgacccccatgtctcctgactgggagacaccttccagtaggggccaacagacacctcatacaggagagctccagctggcctctggcaggtcaccaacatcaaacaccaaaggtaaggaaatccatgaagatggggagaaaccagtgcaaaaggcagaaaattccaaaaaccagaatgcctattctcctccaaaggatcacaactccttgccagcaagggaagaaaactggatggagaatgagtttgacaaattgacagaagtaggcttcagaagaaaactgaaactggaccctctccttacaccgtatacaaaaattaattcaagatggattaaagacttaaatgtaagacctaaaaccataaaaaccctagaagaaaaccgagacaataccattgaggacataggcgtgggcaaagacttcatgactaaaacaccaaaagcaatggcaacaagagccaaaattgacaaatgggatctaattaaactaaagagcttctgcacagcaaaagaaactatcatcagagtgaacagaataaccaatacagagaagtgcttaaaggagctgatggagctggaaaccaagcctggagaactacgtgaagaatgcagaagcctcaggagccgatgcgatcaactggaagaaagcgtatcagcaatggaagatgaaatgaatgaaatgaagcgagaagggaagtttagagaaaaaagaataaaaagaaatgagcaaagcctccaagaaatatgggactatgtgaaaagaccaaatctacgtctgactggtgtacctgaaagtgatggggagaatggaaccaagttggaaaacactctgcaggatattatccaggagaacttccccaatctagcaaggcaggccaacattcagattcaggaaatacagagaacgccacaaagatactcctcgagaagagcaactccaagacacataattgtcagattcaccaaagttgaaatgaaggaaaaaatgttaagggcagccagagagaaaggtcaggttaccctcaaagggaagcccatcagactaacagccgatctctcggcagaaaccctacaagctagaagagagtgggggccaatattcaacattcttaaagaaaataattttcaacccagaatttcatatccagccaaactaaacttcataagtgaaggagaaataaaatactttacagacaagcaaatgctcagagattttgtcaccaccaggcctgccctaaaagagctcctgaaggaagtgctaaacatggaaaggaacaaccggtaccagccactgcaaaatcatgccaaaatgtaaagaccatcgaaactaggaagaaactgcatcaactaatgagaaaaataaccagctaa

SEQ ID NO: 126295 - DNA, 4935 bp, Homo sapiens
atgggtcctggggcgcggctggcggcgctgctggcggtgctggcgctcgggacaggagacccagaaagggctgcggctcggggcgacacgttctcggcgctgaccagcgtggcgcgcgccctggcgcccgagcgccggctgctggggctgctgaggcggtacctgcgcggggaggaggcgcggctgcgggacctgactaggtgcaatgatgaaacaataacatacctgttagataagaggttgactgttctcactgcagctaacatcccctactcgtctccggaaaacggtgcgaagagaaggcgccaagacgccttccctccaatacactacaatacccaggacgctttgctacaatacctctccggggttggctggggggcgcctccagctgcgcaagcgcatagggatgcgccctttgtggactccattgcgcaggtgctgttgcgcacttccggtggaagcgctgaagcgagtgggtggagtttacggagccggtgggcggtaggcggtgctacgggtagctgggtgctgtccaaaggcgacagggcgtcgttaggggagcgagtcgtgaccggttgggccacactcaacgtgggacgaagcttcgcctactgtttgactacgtgcgtgcagcctcccctcgatgtcggccctcgaaaagagcatgcacctcggccgccttccctctcgcccacctctacccggcagcgggggcagtcagagcggagccaagatgcgaatgggagaaggaaacagaagaccaagtcagagcctgagagatttgaagatgctgtgttgcttgccggctttaaagtggaggaagaacctgtccagagacctaggaggaaagaatggtttcagggcccaagcccagggcactgctgccctgctcagcctcaggactctgcaccttgtatcctggctactcatgctccagccagggctcaaaatgccccaggcacagcttgggccgctgctctagagggcacaagcactgtaagccttgaccacttccatgtggttggtgtagtggttgtatcaggaggtgagatcattctactcctttctttcagattctacgacaaggtactttctttgcatgaggattcaacaacccctgtggctaaccctctgcttgcatttactctcatcaaacgcctgcagtctgactggaggaatgtggtacatagtctggaggccagtgagaacatccgagctctgaaggatggctatgagaaggtggagcaagaccttccagcctttgaggaccttgagggagcagcaagggccctgatgcggctgcaggacgtgtacatgctcaatgtgaaaggcctggcccgaggtgtctttcagagagtcactggctctgccatcactgacctgtacagccccaaacggctcttttctctcacaggggatgactgcttccaagttggcaaggtggcctatgacatgggggattattaccatgccattccatggctggaggaggctgtcagtctcttccgaggatcttacggagagtggaagacagaggatgaggcaagtctagaagatgccttggatcacttggcctttgcttatttccgggaacagagctcctcaccagcaacggaacaaagctggatggagaatgactttgatgagttgagagaagaaggcttcagacgatcaaactactccgagctacaggaggaaattcgaaccaatggcaaagaagttaaaagctttgaaaaaaaattagacgaatggataactagaataaccaatgcagagaagtccttaaaggacctgatggagctgaaaaccaaggcacgagagctacgtgacgaatgcagaagcctcagtagccgatgcaatcaactggaagaaagggtatcagtgatggaagacgaaatgaatgaaacgaagcgaggagagaagtttagagaaaaaaagaataaaaagaaatgaacaaagcctccaagaaatatgtgactatgtgaaaagagcaaatctacgtctgattggtggacctgaaagtgacggggaaaatggaaccaagttggaaaacactctgcaggatattatccaggagaacttccccaatctagcaaggcaggccaacattcaaattcaggaaatacacagaacgccacaaagatactcctcgagaagagcaactccaagacacataattgtcagattcaccaaagttgaaatgaaggaaaaaatgttaagggcagccagagagaaaggtcgggttacccacaaagggaagcccattagactaacagctgatctctcagcagaaactctacaagccagaagagagtggggaccaatattcaacattcttaaagaaaagaattttcaacccagaatctcatatccagccaaactaagcttcataagtgaaggagaaataaaatcctttacagacaagcaaatgctgggaggttttgtcaccaccaggcctgccctacaagagctcctgaaggaagcactaaacatggaaaggaacaactggtaccagccactgcaaaaacatgccaaattaactagagaagcaagagcaaacacattcaaacctagcagaaggcgagaaataacaaagatcagagcagaactgaaggaaatagagacaccaaaaaccgctcaaaaaattaatgaatccaggagctggttttctgaaaggatcaacaaaattgatagaccgctagcaagactaagaaagaagaaaagagagaagaatcaaatagacacaataaaaaatgatgaaggggatatcaccacccatcccacagaaatacatactatcatcagagaatactataaacacctctatgcaaataaactagaaaatctagaagaaatggataaattcctcgacacctacaccctcccaagaccaaaccaggaagaagttgaatctctgaatggaccaatagcaggctctgaaattcaggcaataattaatagcttaccaaccaaaaaaagtccaggaccagatggattctaccagaggtacaaggaggagctggtaccattccgtctgaaactattccaatcaatagaaaaagagggaatcctccctaactcattttatgaggccagcatcatcctgataccaaagcctggcagagacacaacaaaaaaagagaattttagaccaatatccctgttgaacatcaatgcaaaaatcctcaataaaatactggcaaaccgaatccagcagcacatcaaaaagcttatgcaccatgatcaagtgggcttcatccctggaatgcaaggctggttcaatatacgcaaatcaataaatgtaatccagcatataaacagaaccaaagacaaaaaccacatgattatctcaatagatgcagaaaaggcctttgacaaaattcaacaacccttcatgctaaaaactctcaataaattaggtattgatgggacatatcacaaaataataagagctaactatgacaaacccacagccaatatcatactgaatgggcaaaaactggaagcattccctttgaaaactggcacaagacagggatgccctctctcaccactcctattcaacatagtgttggaagttctggccagggcaatcaggcaggagaaggaaacagagggtattcaattaggaaaagaggaagtcaaattgtccctgtttgcagatgacatgattgtatatctagaaaaccccattgtctcagcccaaaatctccttaagctgataagcaacttcagcaaagtctcaggatacaaaatcaatgtgcaaaaatcacaagtattcttatacaccgataacagacaaacagagagccaaatcatcagtgaactccccattcacaattgcttcaaagagaataaaatacctaggaatccaacttacaaggtacgtgaaggacctcttcaaggagaggtcaatgaaataaaagaggatacaaacaaatggaagaacattccatgctcatgggtaggaagaatcaatatcgtgaaaatggccatactgcccaaggtaatttatagattcaatgccatctccatccagctaccaatgactttcttcacagaattggaaaaaactactttaaagttcatatggaaccaaaaaagagcccacattgccaagtcaatcctgagcaaaaagaataaagctggaggcatcatgctacctgacttcaaactatactacaaggctacagtaaccaaaacagcatggcattggtaccaaaacagagatatagaccaaaggaacagaacagagccctcagaaataatgccgcatgtctacaaccatctgatctttggcaaacctgacaaaaacaagcaatggggaaatgattccctatttaataaatggtgctgggaaaactggctagccatatgtaaaaagctgaaactggatcccttccttacaccttatacaaaaattaattcaagatggattaaagatttaaatgttagacctaaaaccataaaaaccctagaagaaaacctaggcaataacattcaggacataggcatgggcaaggacttcacgtctaaaacaccaaaagcaatggcaacaaaagacaaaattgacaaatgggatctaatgaaactaaagagcttttgcacagcaaaagaaactaccatcatagtgaacaggcaacctacagaatgggagaaaatttttgcaatctactcatatgacaaagggctaatatccagaatctacaaagaattcaaacaaatttacaagaaaaaaacaaacaatcccatcaaaatgtgggcaaaggatatgaacagacacttctcaaaagaagacatttatgcagccaaaagacacatgaaaaaatgctcatcatcactggccatcagagaaatgcaaatcaaaaccacaatgagatatcatctcacgccagttagaatggcaatcattaaaaagtcaggaaacaacag

SEQ ID NO: 126296 - DNA, 1547 bp, Homo sapiens
ggaaacagctatgaccatgattacgaattcgagctcggtacccttctccttggcggtcttgccgatgtcggccttgctgtcggccagggccagcaggaagagttcgccggcaatgaactgggattttgccgatttcggaaccaccatcaaacaggattttcgcctgctggggcaaaccagcgtggaccgcttgctgcaactctctcagggccaggcggtgaagggcaatcagctgttgcccgtctcactggtgaaaagaaaaaccaccctggcgcccaatacgcaaaccgcctctccccgcgcgttggccgattcattaatgcagctggcacgacaggtttcccgactggaaagcgggcagtgagcgcaacgcaattaatggattttgccgatttcggaaccaccatcaaacaggattttcgcctgctggggcaaaccagcgtggaccgcttgctgcaactctctcagggccaggcggtgaagggcaatcagctgttgcccgtctcactggtgaaaagaaaaaccaccctggcgcccaatacgcaaaccgcctctccccgcgcgttggccgattcattaatgcagctggcacgacaggtttcccgactggaaagcgggcatgatgtggagaatggaaccaagttggaaaacactctgcaggatattatccaggagaacttccccaatctagcaaggcaggccaacgttcagattcaggaaatacagagaacgccacaaagatactcctcgagaagagcaactccaagacacataattgtcagattcaccaaagttgaaatgaaggaaaaaaatgttaagggcagccagagagaaaggtcgggttaccctcaaagggaagcccatcagactaacaagcagatctctcggcagaaactctacaagtcagaagagagggggaggccaatattcaacattcttaaagaaaagaattttcaacccagaatttcatatccagcccaaactaagcttcttcataagtgaaggagaaataaaatcctttacagacaagcaaatgctgagagatttttgtcaccaccaggcctgccttacaagagctcctgaaggaagcactaaacatgggaaagggaacaaccgggtaccagcccgctgcaaaatcatgccaaatttgtaaagaccattcgagactaggaagaaacttggcatcaacttaatggagcaaaattaccagctaacatcataatggacaggatccaaattcacacataacaatattaactttaaatgtaaatggggctaaatgcccccattttaggagacacagactgggcaaattggataaacagtcaagacccatcagtgtgctgtattcaggaaacccatctcatgtgcagagacacacataggctcaaaataaagggagagaggaagatctaccaaggaaatggaaaacaaaaaaaggcaggggttgcaatcctagtctctgataaaacagactttaaaccaacaaagatcaaaagagacaaggccattacataatggtaaagggatcaattcaacaagaagag

SEQ ID NO: 126297 - DNA, 4837 bp, Homo sapiens
atgggggagcagaaaatgaacaaaaggatggagacagtgattggaatcaagcgaatccttggaggcttacacctagatagagcagagagagccagggacagcgagttcaggccaatagcaaatgaaaggaagccaactctccaggcccagacagcccgtgaggtcagcatccagcaacaacattcactaacgacagccctgccaactgtagctggcatcctaggcacatgcacattgaagggtcctagtaagtggaagaaggaggtagataagggagaaccagaaagacaccagcctaagatggacttggcagactttgctggttttgaagatggaggactggagccacaagccaaggaatatggtggcctctggaagcaaagaaaggcagggaatggattctcctcagaacctccagaaggaatgcagcctgctgataccttgattttagcccagagagacccatttcagactctgccctccagaactgttctcgtgtctctccctgaccaggccctcttacacactctgcagaattaccatcgacagtgtacattggatgagattgtgtcaccatcatgcttagaaccactcctatcactgacagaaggaaaactaacaaacagaaaggacatccacaccaaaaatccatctgtacatcaccatcatcaaagatcaaaagtagataaaaccacaaagatggggaaaaaaacagaacagaaaaactggaaactctaaaaagcagagcgcctctcctcctccaaaggaacgcagctcctcaccagcaacggaacaaagctggacggagaacgactttgacgagctgagagaagaaggcttcagaaggtcggtaataacaaacttctcagagctaaaggagcatgttgtaacccatcgcaaggaagctaaaaatcttgaaaaaaaaactagacgaatggataactagaataaccaatgcagagaagtccttaaaggacctgatggagctgaaaaccacggcacaagaactacgcaacgaatgcacaaacctcagtaaccgatgcgatcaactggaagaaacggtatcagcgatggaagatcaaattaataaatgaatgaaatgaagcaagaagggaagtttagagaaaaaagaataaaaagaaatgagcaaagcttccaaagaaataggggactatgtgaaaagaccaaatctacatcctgattggtgtacctgaaagtgacggacagaatggaaccaagttggaaaacactctgcaggatattatccaggagaacttccccaatctagcaaggcaggccaacattcagattcaggaaataccagagaacgccacaaagatactccttgagaagagcaactccaagacacataattgtcagattcaccaaagttgaaatgaaggaaaaaaatgttaagtgcagccagagagaaaggtcggggttacccacaaagggaagcccatcagactaacaacagctgatctctcagcagaaactctacaagcccagaagacagagtggggggccgatattcaacattctctaaagaaaagaattttccaacccagaatttccatatccagccaaacctaagcttcataagtgaaggagaaataaaatactttacagacaagcaaatgctgagagatttttgtcaccaccagggcctgcccttaaaagagctcctgaaggaagaagcacttaaacattggaaagggacaacccggtaccagccacttgcaaaaacattgccaaaatacagatcaacgagacagaaagtcaacaaggatacccaggaattgaactcagctctgcaccaagcggacctaatagacatctacagaactctccacaccaaatcaacagaatatactttttttcagcaccacaccacacctattccaaaattgaccacatagttggaagtaaagctctcctcagcaaatgtaaaagaacagaaattataacaaactatctctcagaccacagtgcaatcaaactagaactcaggattaagaatctcaatcaaagccgctcaactacatggaaactgaacaacctgctcctgaatgactactgggtacataacgaaatgaaggcagaaataaagatgttctttgaaaccaacgagaacaaagacacaacataccagaatctctgggacgcattcaaagcagtgtgtagagggaaatttatagcactaaatgcccacaagagaaagcaggaaagatccaaaattgacaccctaacatcacaattaaaagaactagaaaagcaagagcaaacacattcaaaagctagcagaaggcaagaaataactaaaatcagagcagaactgaaggaaatagagacacaaaaaacccttcaaaaaatcaatgaatccaggagctggttttttgaaaggatcaacaaaattgatagaccgctagcaagactaataaagaaaaaaagagaggagaatcaaatagacacaataaaaaatgataaaggggatatcaccaccgatcccacagaaatacaaactaccatcagagaatactacaaacacctctatgcaaataaactagaaaatctagaagaaatggataaattccttgacacatacactctcccaagactaaaccaggaagaagttgaatctctgaatagaccaataacaggagctgaaattgtggcaataatcaatagtttaccaaccaaaaagagtccaggaccagatggattcacagctgaattctaccagaggtacaaggaggaactggtaccattccttctgaaactattccaatcaatagaaaaagagggaatcctccctaactcattttatgaggccagcatcattctgataccaaagccgggcagagacacaaccaaaaaagagaattttagaccaatatccttgatgaacattgatgcaaaaatcctcaataaaatactggcaaaccgaatccagcagcacatcaaaaagcttatccaccatgatcaagtgggcttcatccctgggatgcaaggctggttcaatatacgcaaatcaataaatgtaatccagcatataaacagagccaaagacaaaaaccacatgattatctcaatagatgcagaaaaagcctttgacaaaattcaacaacccttcatgctaaaaactctcaataaattaggtattgatgggacgtatttcaaaataataagagctatctatgacaaacccacagccaatatcatactgaatgggaaaaaactggaagcattccctttgaaaactggcacaagacagggatgccctctctcactgctcctattcaacatagtgttggaagttctggccagggcaatcaggcaggagaaggaaataaagggtattcagttaggaaaagaggaagtcaaattgtccctgtttgcagacgacatgattgtttatctagaaaaccccatcgtctcagcccaaaatctccttaagctgataagcaacttcagcaaagtctcaggatacaaaatcaatgtacaaaaatcacaagcattcttatacaccaacaacagacaaacagagagccaaatcatgagtgaactcccattcacaattgcttcaaagagaataaaatacctaggaatccaacttacaagggatgtgaaggacctcttcaaggagaactacaaaccactgctcaaggaaataaaagaggatacaaacaaatggaagaacattccatgctcatgggtaggaagaatcaatatcgtgaaaatggccatactgcccaaggtaatttacagattcaatgccatccccatcaagctaccaatgactttcttcacagaattggaaaaaactactttaaagttcatatggaaccaaaaaagagcccgcatcgccaagtcaatcctaagccaaaagaacaaagctggaggcatcacactacctgacttcaaactatactacaaggctacagtaaccaaaacagcatggtactggtaccaaaacagagatatagatcaatggaacagaatagagccctcagaaataacgccgcatacctacaactatctgatctttgacaaacctgagaaaaacaagcaatggggaaaggattccctatttaataaatggtgctgggaaaactggctagccatatgtagaaaactgaaactggatcccttccttacaccttatacaaaaatcaattcaagatggattaaagatttaaacgttagacctaaaaccataaaaaccctagaagaaaacctaggcattaccattcaggacataggcgtgggcaaggacttcatgtccaaaacaccaaaagcaatggcaacaaaagccaaaattggcaaatggtacctaattaaactaaagagcttctgcacagcaaaagaaactaccatcagagtgaacaggcaacctacaacatgggagaaaattttcgcaacgtactcatctgacaaagggctaatatccagaatctacaatgaactcaaacaaatttacaagaaaaaaacaaacaaccccatcaaaaagtgggcgaaggacatgaacagacacttctcaaaagaagacatttatgcagccaaaaaatacgtgaaaaaatgctcatcatcactggccatcagagaaatgcaaatcaaaaccactatgagataccatctcacaccagttagaatggcaatcattaaaaagtcaggaaacaacagtgatctctaccttatgtctgcaggaaccagttgtttaatgggcagacactgggacagtggacaagaaacgtgtgtccaaaatgtcgtgctggacacgtgcagcccctctgaacaactcttaagagctattgctgatcttgtcccgcaaccctga

SEQ ID NO: 126298 - DNA, 636 bp, Homo sapiens
atgccggtcccaggcacacggcgggcgccgctccacctcctcgcgaccagcctgcaggagcagcagtatgcccgctggatggctggctgccgcctggcctccaaaggccgcaccatggccgacagcagctacaccagcgaggtgcaggccatcctggccttcctcagcctgcagcgcacgggcagtgggggcccgggcaaccacccccacggccctgatgcctctgccgagggcctcaacccctacggcctcgttgccccccgtttccagcgaaagttcaaggccaagcagctcaccccacggatcctggaagcccaccagaatgtggcccagttgtcgctggcagaggcccagctgcgcttcatccaggcctggcagtccctgcccgacttcggcatctcctatgtcatggtcagcaacatgcgccagtggaatgtcaactgggacatccggcaggtggccatcgagtttgatgaacacatcaatgtggccttcagctgcgtgtctgccagctgccgaattgtacacgagtatatcgggggctacattttcctgtcgacgcgggagcgggcccgtggggaggagctggatgaagacctcttcctgcagctcaccgggggccatgaggccttctga

SEQ ID NO: 126299 - DNA, 419 bp, Homo sapiens
  misc_feature (1)...(419): n = a,t,c or g
atgaatttgaagacatggtggctgaaaagcggctcatcccagatggctgtggggtcaagtacatccccagtcgtggccctctggacaagtggcgggccctgcactcatgagggcttccaatgtgctgcccccctcttaatactcaccaataaattctacttcctgtccannnnnnnnnnnnnnnnnnnnnnnnnnnnnnnnnnnnnngaaaaaaagnnnnnnnnnnnnnnnnnnaaagggggggagagggggggaggggaannnnnnnnnnnnnaaggaaaaannaaangnnnnnnnnnnnnanaaaaggggggaagggggagaggagaggggnnnnnnggannggggangggggnnnnnnnnnnnnnnnnnnnnngnnnanannnngnnaaaggangnaaaggagaggggaagaagaa

SEQ ID NO: 126300 - DNA, 724 bp, Homo sapiens
  misc_feature (1)...(724): n = a,t,c or g
ccgaggtgtccctgatgccaagattcgcatttttgacctggggcggaaaaaggcaaaagtggatgagtttccgctttgtggccacatggtgtcagatgaatatgagcagctgtcctctgaagccctggaggctgcccgaatttgtgccaataagtacatggtaaaaagttgtggcaaagatggcttccatatccgggtgcggctccaccccttccacgtcatccgcatcaacaagatgttgtcctgtgctggggctgacaggctccaaacaggcatgcgaggtgcctttggaaagccccagggcactgtggccagggttcacattggccaagttatcatgtccatccgcaccaagctgcagaacaaggagcatgtgattgaggccgtgcgcagggccaagttcaagtttcctggccgccagaagatccacatctcaaagaagtggggcttcaccaagttcaatgctgatgaatttgaagacatggtggctgaaaagcggctcatcccagatggctgtggggtcaagtacatccccagtcgtggccctctggacaagtggtgggccctgcactcatgagggcttccaatgtgctgcccccctcttaatactcaccaataaattctacttcctgtcccgacagaagatgatagttttcgcgatatcactttgttacctctttttattnnnnnnnnnncccctctaataaagcccccttctcacccc

SEQ ID NO: 126301 - DNA, 240 bp, Homo sapiens
atgtccatccgcaccaagctgcagaacaaggagcatgcgattgaggccttgcgcagggccaagttcaagtttcctggccgccagaagatctacatctcaaagaagtggggcttcaccaagttcaatgctgatgaatttgaagacatggtggctgagaagcggctcatcccagatggctgtggggtcaagtacatccccaatcgtggccctctggacaagtggctggccctgcactcatga

SEQ ID NO: 126302 - DNA, 1068 bp, Homo sapiens
atgtcccggcagctgtcgcgggcccggccagccacggtgctgggcgccatggagatggggcgccgcatggacgcgcccaccagcgccgcagtcacgcgcgccttcctggagcgcggccacaccgagatagacacggccttcgtgtacagcgagggccagtccgagaccatccttggcggcctggggctccggctgggcggcagcgactgcagagtgaaaattgataccaaggccattccactgtttgggaactccctgaagcctgacagtctccggttccagctggagacgtcactgaagcggctgcagtgtccccgagtggacctcttctacctgcatatgccagaccacagcaccccggtggaagagacactgcgtgcctgccaccagctgcaccaggagggcaagttcgtggagcttggcctctccaactatgcagcctgggaagtggccgagatctgtaccctctgcaagagcaacggctggatcctgcccactgtgtaccagggcatgtacaatgccatcacccggcaggtggaaacggagctcttcccctgcctcaggcactttggactgaggttctatgccttcaaccctctggctgaccagagccctgagggatgtggcagcttctggggcactctaggccccggggctgattgctgctttccctcagggggcctgctgaccggcaagtacaagtatgaggacaagaatgggaaacagcccgtgggccgcttctttgggaatacctgggcagagatgtacaggaatcgctactggaaggagcaccactttgagggcattgccctggtggagaaggccctgcaggccgcgtatggcgccagcgcccccagcatgacctcggccaccctccggtggatgtaccaccactcacagctgcagggtgcccacggggacgcggtcatcctgggcatgtccagcctggagcagctggagcagaacttggcagcggcagaggaagggcccctggagccggctgtcgtggacgcctttaatcaagcctggcatttggttactcacgaatgtcccaactacttccgctag

SEQ ID NO: 126303 - DNA, 712 bp, Homo sapiens
ccgtgtcgacccacgcgtccggcacagggccctttgctgtcacccggatggtccctcccgccccactgctcttcaccagccacagcgcctcagtggccccaagccctcgctcctccggacccttgcacatgctgttcccagaacgctttccctgcaggtccctggagaaatggccatgcgaaggcctcctggatcttccatgtttcactgttgggccagcacccactgtgcgacgttggaggtgacagaccacaggtggcactccacaaactctgtcccttgcattccacttccccagggagggcttcccctccccagagtgggggtgaagtggcagtagcagggacacaggtggcacataggagcctagaaacaggagctttattctctaatgtgcgtccagcaagttccttacaccaatcaaggaaatggtttctctttcaggcatcgactcttttatcaaaagaaaatccatcctgctcagtcccacccaccctgggcagaagctggcgttgagggcagtgtggaggctggcgttgaggctggcgccgaggcctgacaggctgacaagggatgaagtcctttttgtgtgatagtcgtccaagtaatgcccatagtagtacttccagaagactgtggacacacacccacaggcctcagccctctccagcgtgtggcagggggaggccctggagggaggggatctcaggga

SEQ ID NO: 126304 - DNA, 1700 bp, Homo sapiens
atgaagaaggcccaggtgatttcagcttgtagcccgcccctccttcctgtggaggccccagacattgtggaacagataaaaggtgttcactgtgaccgtcagaacctgtcgacggaggagatcatcgccctcttcatttccatcacgtttgtgctggatgccgtcaagggcacggttaaaatcttctggaagtactactatgggcattacttggacgactatcacacaaaaaggacttcatcccttgtcagcctgtcaggcctcggcgccagcctcaacgccagcctccacactgccctcaacgccagcttcctcgccagccccacggagctgccctcggccacacactcaggccaggcgaccgccgtgctcagcctcctcatcatgctgggcacgctctggctgggctacaccctctaccaattcaagaagagcccctacctgcacccctgcgtgcgagagatcctgtccgactgcgccctgcccatcgcggtgctcgccttctccctcatcagctcccatggcttccgggaaatcgagatgagcaagttccgctacaaccccagcgagagcccctttgcgatggcgcagatccagtcgctgtccctgagggccgtcagcggtgccatgggcctcggcttcctgctgtccatgctcttcttcatcgagcagaacttggtggccgccttggtgaatgcaccggagaacaggctggtgaagggcactgcctaccactgggacctcctgctcctcgccatcatcaacacagggctgtctctgtttgggctgccttggatccatgccgcctacccccactccccgctgcacgtgcgagccctggccttagtggaggagcgtgtggagaacggacacatctatgacacgattgtgaacgtgaaggagacgcggctgacctcgctgggcgccagcgtcctggtgggcctgtccctgttgctgctgccggtcccgcttcagtggatccccaagcccgtgctctatggcctcttcctctacatcgcgctcacctccctcgatggcaaccagctcgtccagcgcgtggccctgctgctcaaggagcagactgcgtaccccccgacacactacatccggagggtgccccagaggaagatccactacttcacgggcctgcaggtgcttcagctgctgctgctgtgtgccttcggcatgagctccctgccctacatgaagatgatctttcccctcatcatgatcgccatgatccccatccgctatatcctgctgccccgaatcattgaagccaagtacttggatgtcatggacgctgagcacaggccttgactggcagaccctgcccacgccccattcgccagccctccacgtcctcccaggctggctctggagctgtgaggggaggtgtaggtgtgtgggtgactgctctgtgctgcgccttctcatggctgactcaggcctggggcatctgggcattgtaggggtgcagtggtatgtgcccacccctctcccattatcctttagctttaggccaagagcgttgctcagggcagcttctgcccagggtgggtgggactgagcaggatggattttcttttgataaaagagtcgatgcctgaaagagaaaccatttccttgattgtgtaaggaacttgctggacgcacattagagaataaagctcctgtttttaggcaaaaaaaaaaaaaaa

SEQ ID NO: 126305 - DNA, 747 bp, Homo sapiens
atgcagaaggctctgtgtgcagccccagacctgggtaccttcgtcaccgtcctcaccccacctccgggtgcgcagatagggagcaggagagagaggtccaaggtgccctacatcgtgcgccagtgcgtggaggagatcgagcgccgaggcatggaggaggtgggcatctaccacgtgtccggccggtgtggccgcagacatccaggcactgaaggcagccttcgatgtcaacacagaaccatgcacagctcttgggaggagtcagatgagctgctcaaagcccgggacgacccacacagtggtcagcatagcagggacggtgctttagccaaggcagggatggcagataagaaggacatgtcggtgatgatgagcgagacggacatgaacgccatcgcaggcacgctgaagctgtacttccgtgagctgcctgagcccctcttcactgacgagttctaccccagcttcgcagagggcatcgaccgcctggaaagggtggcagagaaggaagcagtcaataagatgtccctgcacaacctcgccactgtctttggccccacgctgctccggccctccgagaaggagagcaagctccctgccaaccccagccagcccatcaccatgactgacagcaggtccttggaggtcatgtctcaggtcgaggtgctgctgtacttcttgcggctggaggccatccctgccctggacagcaagagacagagcatcctgttctccaccgatgtctaa

SEQ ID NO: 126306 - DNA, 510 bp, Homo sapiens
atgcagaaggctctgtgtgcagccccagacctgggtaccttcatcaccgtcctcaccccacctccgggtgtgcacatagggagcaggagagagaggtccaaggtgccctacatcgtgcgccagtgcgtggaggagatcgagcgccgaggcatggaggaggtgcgccccccccgcatgtctggggtggccgcagacatccaggcactgaaggcagccttcaacgtcagagatggactgggacctttagacatcggtggagaacaggatgctctgtcccttgctgtccagggcagggatggcctccagccgcaagaagtacagcagcacctcgacctgccctcgcggagtggggaagaggagagtggctcagaggggggctcacagctgctgctgcaatctgagctcagccacctacacaccaccgtggccgacactttcattaagaagtttcttgagacgacttgcgtgcatgttgacttcatgatcagccccgctgggaagaacccctga

SEQ ID NO: 126307 - DNA, 4725 bp, Homo sapiens
ggggggagggtggcggctcgatgggggagccgccccagggggcccccccgccctgtgcccacggcgcggcccctttaaggaggcccgcctggctccgctccatcgcgcatcgcggccgcctccccccggccctcccttcctgcggcgcagagtgcgggccgggcgggagtgcggcgagccggctggcttagcgtccgaggaggcggcggcggcggcggcggcagcggcggcggcggggctggtggggcggtgcggaagcgagaggcgaggagcgcgcgggccgtggccagagtctggcggcggcctggcggagcggagagcagcgcccgcgcctcgccgtgcggaggagccccgcacacaatagcggcgcgcgcagcccgcgcccttccccccggcgcgccccgccccgcgcgccgagcgccccgctccgcctcacctgccaccagggagtgggcgggcattgttcgccgccgccgccgccgcgcggggccatgggggccgcccggcgcccggggccgggcctggcgaggccgccgcgccgccgctgagacgggccccgcgcgcagcccggcggcgcaggtaaggccggccgcgccatggtggacccggtgggcttcgcggaggcgtggaaggcgcagttcccggactcagagcccccgcgcatggagctgcgctcagtgggcgacatcgagcaggagctggagcgctgcaaggcctccattcggcgcctggagcaggaggtgaaccaggagcgcttccgcatgatctacctgcagacgttgctggccaaggaaaagaagagctatgaccggcagcgatggggcttccggcgcgcggcgcaggcccccgacggcgcctccgagccccgagcgtccgcgtcgcgcccgcagccagcgcccgccgacggagccgacccgccgcccgccgaggagcccgaggcccggcccgacggcgagggttctccgggtaaggccaggcccgggaccgcccgcaggcccggggcagccgcgtcgggggaacgggacgaccggggaccccccgccagcgtggcggcgctcaggtccaacttcgagcggatccggaagggccatggccagcccggggcggacgccgagaagcccttctacgtgaacgtcgagtttcaccacgagcgcggcctggtgaaggtcaacgacaaagaggtgtcggaccgcatcagctcccttggcagccaggccatgcagatggagcgcaaaaagtcccagcacggcgcgggctcgagcgtgggggatgcatccaggcccccttaccggggacgctcctcggagagcagctgcggcgtcgacggcgactacgaggacgccgagttgaacccccgcttcctgaaggacaacctgatcgacgccaatggcggtagcaggcccccttggccgcccctggagtaccagccctaccagagcatctacgtcgggggcatcatggaaggggagggcaagggcccgctcctgcgcagccagagcacctctgagcaggagaagcgccttacctggccccgcaggtcctactccccccggagttttgaggattgcggaggcggctataccccggactgcagctccaatgagaacctcacctccagcgaggaggacttctcctctggccagtccagccgcgtgtccccaagccccaccacctaccgcatgttccgggacaaaagccgctctccctcgcagaactcgcaacagtccttcgacagcagcagtccccccacgccgcagtgccataagcggcaccggcactgcccggttgtcgtgtccgaggccaccatcgtgggcgtccgcaagaccgggcagatctggcccaacgatgacgagggcgccttccatggagacgcagatggctcgttcggaacaccacctggatacggctgcgctgcagaccgggcagaggagcagcgccggcaccaagatgggctgccctacattgatgactcgccctcctcatcgccccacctcagcagcaagggcaggggcagccgggatgcgctggtctcgggagccctgaagtccactaaagcgagtgagctggacttggaaaagggcttggagatgagaaaatgggtcctgtcgggaatcctggctagcgaggagacttacctgagccacctggaggcactgctgctgcccatgaagcctttgaaagccgctgccaccacctctcagccggtgctgacgagtcagcagatcgagaccatcttcttcaaagtgcctgagctctacgagatccacaaggagtcctatgatgggctcttcccccgcgtgcagcagtggagccaccagcagcgggtgggcgacctcttccagaagctggccagccagctgggtgtgtaccgggccttcgtggacaactacggagttgccatggaaatggctgagaagtgctgtcaggccaatgctcagtttgcagaaatctccgagaacctgagagccagaagcaacaaagatgccaaggatccaacgaccaagaactctctggaaactctgctctacaagcctgtggaccgtgtgacgaggagcacgctggtcctccatgacttgctgaagcacactcctgccagccaccctgaccaccccttgctgcaggacgccctccgcatctcacagaacttcctgtccagcatcaatgaggagatcacaccccgacggcagtccatgacggtgaagaagggagagcaccggcagctgctgaaggacagcttcatggtggagctggtggagggggcccgcaagctgcggcacgtcttcctgttcaccgacctgcttctctgcaccaagctcaagaagcagagcggaggcaaaacgcagcagtatgactgcaaatggtacattccgctcacggatctcagcttccagatggtggatgaactggaggcagtgcccaacatccccctggtgcccgatgaggagctggacgctttgaagatcaagatctcccagatcaagagtgacatccagagagagaagagggcgaacaagggcagcaaggctacggagaggctgaagaagaagctgtcggagcaggagtcactgctgctgcttatgtctcccagcatggccttcagggtgcacagccgcaacggcaagagttacacgttcctgatctcctctgactatgagcgtgcagagtggagggagaacatccgggagcagcagaagaagtgtttcagaagcttctccctgacatccgtggagctgcagatgctgaccaactcgtgtgtgaaactccagactgtccacagcattccgctgaccatcaataaggaagatgatgagtctccggggctctatgggtttctgaatgtcatcgtccactcagccactggatttaagcagagttcaaatctgtactgcaccctggaggtggattcctttgggtattttgtgaataaagcaaagacgcgcgtctacagggacacagctgagccaaactggaacgagctggacccgcaggccctgcaggacagagactggcagcgcaccgtcatcgccatgaatgggatcgaagtaaagctctcggtcaagttcaacagcagggagttcagcttgaagaggatgccgtcccgaaaacagacaggggtcttcggagtcaagattgctgtggtcaccaagagagagaggtccaaggtgccctacatcgtgcgccagtgcgtggaggagatcgagcgccgaggcatggaggaggtgggcatctaccgcgtgtccggtgtggccacggacatccaggcactgaaggcagccttcgacgtcaataacaaggatgtgtcggtgatgatgagcgagatggacgtgaacgccatcgcaggcacgctgaagctgtacttccgtgagctgcccgagcccctcttcactgacgagttctaccccaacttcgcagagggcatcgctctttcagacccggttgcaaaggagagctgcatgctcaacctgctgctgtccctgccggaggccaacctgctcaccttccttttccttctggaccacctgaaaagggtggcagagaaggaggcagtcaataagatgtccctgcacaacctcgccacggtctttggccccacgctgctccggccctccgagaaggagagcaagctccctgccaaccccagccagcctatcaccatgactgacagctggtccttggaggtcatgtcccaggtccaggtgctgctgtacttcctgcagctggaggccatccctgccccggacagcaagagacagagcatcctgttctccaccgaagtctaaaggtcccagtccatctcctggaggcagacagatggcctggaaacctctggctaatcgggccatccgtagagcgggaaccttcctgaggtgtccttgggccacccccaagtgttgggccatctgccaagagacagcgacccaaagccgaaggacaggtggcctggaaagatcccgcccaggtctgggagccccaggctggcctcagactgtggttttttatgtggccacctgagggcgccccaagccagtttcatcttcagaggccaggcctgaccctgggagacagggtgaagggagtggtttttatgaacttaacttagagtctaaaagatttctactggtttcaattgtcaagatgcggcctctctggggagaagggaacgtgacttggatttcctcaatgttgtatcttgaataaacgctgctgcttcatcctgaaaaaaaa

SEQ ID NO: 126308 - DNA, 3127 bp, Homo sapiens
atgaggacaccatataagacatcaccaatgaggatgctgtatatgacatcgctaatgacacccacaaggcatgctaacgaggacgctgtagacgacattgcttataaggacaccgtacaagacatcactagcgaggacgctgtatacgacatcgctaatgaggacgttgtatatgacatcgctaatgaggatgctttacaagacatagcgaatgaggttgctgtatatgacatcgctaatgaggacattgtatatgacatcgctaatgaggacgctctatacgacatcactaatgaggacgctgtatacaacatcgctaatgaggacgctgtatatggcatcgctaatgaggatgctgtatacgaattcgctaataagcacgctgtatatgacattgctaatgaggacactgtacaagacatctgtaaaaaagaagatgctgccaataaatgttactttcctggcttctttccaatcagatgtagacatgaacatctgccagtgtgcattatcgatgtcatctgcagtttaatcaaatgtagacatgaacatctgccaagctcgctcattggacaggatagactgggcgcccaggcttcaaggagagagaggtccaaggtgccctacatcgtgcgccagtgcgtggaggagatcgagcgccgaggcatggaggaggtgggcatctaccgcatgtctggggtggccgcagacatccaggcactgaaggcagccttcaacgtcagtgagtgtcggcctgcgcaggacgggatggaggtgtgggcagtggtgtccgcgatgagatctcagagtgctccacggcccaggcatgtcacatccttctctgtgtcttttcttcatttatcaggatcttcaaggaggccgctgcatttccgtgctctttccagataacaaggacgtgtcagtgatgatgagcgagatggacgtgaacgccatcgcaggctcgctgaagctgtacttccgtgagctgcccgagcccctcttcactgacgagttctaccccaacttcgcagagggcatcggtgagcactggaggccttggcctcatgggagacgtctcctccatgtgcactgctgccctcagaggctgtgaaaagtgaggtgtgggaacccgagctgtgcttcctctgccatggtcggaattttaacccaacctcaaaaagcaggggaccaaaactgagcctatcctggaaggccttgcccatccccagagagctccccatccctattcctcaaggaggccaagtgggtgaaatggtcagcactgccgtgctgtggggtcctaaagtctgctgtcctccttcctgcagaccagggctaaacactggtgcccaggtgctcttgccatgggtcctggtccagccaagcatggtttcaaacatgacctgacccttagtcaacctggaggctgatgtctagagtgggtgctgatgcgtgcagtacctgtggcctgtgcatcacccttagggcaggtctgcctcccgggcccatgcacaagaggacctggtctcccagcctgcaggtgcccctgtggtgtccaggacaactagggggtctctgcgtacttggtggggctgggaccctcccacttcccacctccttgtgtccctcactcccctgtttcattccatgctgagcctcccctgccttgggctccctggggagggggtggtggcaggagttgcccaagggctgctctgcccatcagcagctgctctagcggctcctcctgctgctgttcgccgggtgctgctgaccccaaggctggagtcagcttgcagcacagccagggtcgaggtcactccctccctgaggactctagcacggcacagcccctctgcctctctcctggtggtggcgttgaaacagcaccctctgcttcggtcctcgacaggatggcagagaaggaggcagtcaataagatgtccctgcacaaccttggcacggtctttggccccacgctgctccggccctccgagaaggagagcaagctccctgccaaccccaagcaagcccatcaccatgactgacagctggtccttgaaggtcatgtcccaggtatgggaagacaggctccagcccatgcaaccccagcctgacagaggtggcctctgcctgccccacccccagtcctgcccatcttccgacttgcattgtatgtggtggtggctgagattcagagacagggacttgcctaggtttgcatggatgggagtgatagggggtgcccaggccacctcctggtcctgctggtgcaccttgctgggggcttaaaaccaccccaagtgttccggtgtggtggctcatgcctgtaatcccagcactttgggaggccgaggcaggacaactgaacccaggtgtttgagaccagtctgggcaatgtagcaaacctcatctccagaaaaaatacaaagaaaaattagtcaggcattgtggcacacatctgtaatcctaggtatctgggaggctgacacaggaggattgcttgagcccaggagttagaggctgcagtgatccatgatggagccactgtactccagcctgggggacagagcaaggccctgtgcatctctaaaataaataaccacccctcacccaacaagtcatgccttgtcaggaccccaccccacccccgtcccactgtaaggggttcatgacaccagcaggggtttctagcacctgaggtggacttgggagcttgggccccaaagacctccccaccagcagctgtgagccccgctctgagccactctcctcttccccactccgcgagggcaggtcgaggtgctgctgtacttcttgcggctggaggccatccctgccctggacagcaagggacagagcatcctgttctccaccgatgtctaaaggtcccagtccatctcctggaggcggacagacggcctggaaacctctggctaatcaggccatctaataagatgctggaatgtaatcctggacaatccgtgtcctggcagcatttggtcttcctctaagcgcctggctccgctgttctcaggagtgggttctgaagtctctatctgggcccggtaggctcccttgtcctggcttccatctctgtctcagcgaccattcagccccgcctccc

SEQ ID NO: 126309 - DNA, 4775 bp, Homo sapiens
ggggagataggtaggagtagcgtggtaagggcgatgagtgtgggccgggcgggagtgcggcgagagccggctggctgagcttagcgtccgaggaggcggcggcggcggcggcggcagcggcggcggcggggctgtggggcggtgcggaagcgagaggcgaggagcgcgcgggccgtggccagagtctggcggcggcctggcggagcggagagcagcgcccgcgcctcgccgtgcggaggagccccgcacacaatagcggcgcgcgcagcccgcgcccttccccccggcgcgccccgccccgcgcgccgagcgccccgctccgcctcacctgccaccagggagtgggcgggcattgttcgccgccgccgccgccgcgcggggccatgggggccgcccggcgcccggggccgggcctggcgaggccgccgcgccgccgctgagacgggccccgcgcgcagcccggcggcgcaggtaaggccggccgcgccatggtggacccggtgggcttcgcggaggcgtggaaggcgcagttcccggactcagagcccccgcgcatggagctgcgctcagtgggcgacatcgagcaggagctggagcgctgcaaggcctccattcggcgcctggagcaggaggtgaaccaggagcgcttccgcatgatctacctgcagacgttgctggccaaggaaaagaagagctatgaccggcagcgatggggcttccggcgcgcggcgcaggcccccgacggcgcctccgagccccgagcgtccgcgtcgcgcccgcagccagcgcccgccgacggagccgacccgccgcccgccgaggagcccgaggcccggcccgacggcgagggttctccgggtaaggccaggcccgggaccgcccgcaggcccggggcagccgcgtcgggggaacgggacgaccggggaccccccgccagcgtggcggcgctcaggtccaacttcgagcggatccgcaagggccatggccagcccggggcggacgccgagaagcccttctacgtgaacgtcgagtttcaccacgagcgcggcctggtgaaggtcaacgacaaagaggtgtcggaccgcatcagctccctgggcagccaggccatgcagatggagcgcaaaaagtcccagcacggcgcgggctcgagcgtgggggatgcatccaggcccccttaccggggacgctcctcggagagcagctgcggcgtcgacggcgactacgaggacgccgagttgaacccccgcttcctgaaggacaacctgatcgacgccaatggcggtagcaggcccccttggccgcccctggagtaccagccctaccagagcatctacgtcgggggcatgatggaaggggagggcaagggcccgctcctgcgcagccagagcacctctgagcaggagaagcgccttacctggccccgcaggtcctactccccccggagttttgaggattgcggaggcggctataccccggactgcagctccaatgagaacctcacctccagcgaggaggacttctcctctggccagtccagccgcgtgtccccaagccccaccacctaccgcatgttccgggacaaaagccgctctccctcgcagaactcgcaacagtccttcgacagcagcagtccccccacgccgcagtgccataagcggcaccggcactgcccggttgtcgtgtccgaggccaccatcgtgggcgtccgcaagaccgggcagatctggcccaacgatggcgagggcgccttccatggagacgcagatggctcgttcggaacaccacctggatacggctgcgctgcagaccgggcagaggagcagcgccggcaccaagatgggctgccctacattgatgactcgccctcctcatcgccccacctcagcagcaagggcaggggcagccgggatgcgctggtctcgggagccctggagtccactaaagcgagtgagctggacttggaaaagggcttggagatgagaaaatgggtcctgtcgggaatcctggctagcgaggagacttacctgagccacctggaggcactgctgctgcccatgaagcctttgaaagccgctgccaccacctctcagccggtgctgacgagtcagcagatcgagaccatcttcttcaaagtgcctgagctctacgagatccacaaggagttctatgatgggctcttcccccgcgtgcagcagtggagccaccagcagcgggtgggcgacctcttccagaagctggccagccagctgggtgtgtaccgggccttcgtggacaactacggagttgccatggaaatggctgagaagtgctgtcaggccaatgctcagtttgcagaaatctccgagaacctgagagccagaagcaacaaagatgccaaggatccaacgaccaagaactctctggaaactctgctctacaagcctgtggaccgtgtgacgaggagcacgctggtcctccatgacttgctgaagcacactcctgccagccaccctgaccaccccttgctgcaggacgccctccgcatctcacagaacttcctgtccagcatcaatgaggagatcacaccccgacggcagtccatgacggtgaagaagggagagcaccggcagctgctgaaggacagcttcatggtggagctggtggagggggcccgcaagctgcgccacgtcttcctgttcaccgagctgcttctctgcaccaagctcaagaagcagagcggaggcaaaacgcagcagtatgactgcaaatggtacattccgctcacggatctcagcttccagatggtggatgaactggaggcagtgcccaacatccccctggtgcccgatgaggagctggacgctttgaagatcaagatctcccagatcaagagtgacatccagagagagaagagggcgaacaagggcagcaaggctacggagaggctgaagaagaagctgtcggagcaggagtcactgctgctgcttatgtctcccagcatggccttcagggtgcacagccgcaacggcaagagttacacgttcctgatctcctctgactatgagcgtgcagagtggagggagaacatccgggagcagcagaagaagtgtttcagaagcttctccctgacatccgtggagctgcagatgctgaccaactcgtgtgtgaaactccagactgtccacagcattccgctgaccatcaataaggaagatgatgagtctccggggctctatgggtttctgaatgtcatcgtccactcagccactggatttaagcagagttcaaatctgtactgcaccctggaggtggattcctttgggtattttgtgaataaagcaaagacgcgcgtctacagggacacagctgagccaaactggaacgaggaatttgagatagagctggagggctcccagaccctgaggatactgtgctatgaaaagtgttacaacaagacgaagatccccaaggaggacggcgagagcacggacagactcatggggaagggccaggtccagctggacccgcaggccctgcaggacagagactggcagcgcaccgtcatcgccatgaatgggatcgaagtaaagctctcggtcaagttcaacagcagggagttcagcttgaagaggatgccgtcccgaaaacagacaggggtcttcggagtcaagattgctgtggtcaccaagagagagaggtccaaggtgccctacatcgtgcgccagtgcgtggaggagatcgagcgccgaggcatggaggaggtgggcatctaccgcgtgtccggccggtgtggccacggacatccaggcactgaaggcagccttcgacgtcaataacaaggatgtgtcggtgatgatgagcgagatggacgtgaacgccatcgcaggcacgctgaagctgtacttccgtgagctgcccgagcccctcttcactgacgagttctaccccaacttcgcagagggcatcgctctttcagacccggttgcaaaggagagctgcatgctcaacctgctgctgtccctgccggaggccaacctgctcaccttccttttccttctggaccacctgaaaagggtggcagagaaggaggcagtcaataatatgttctctgcacaacctcgccacggtctttggccccacgctgctccggccctccgagaaggagagcaagctccctgccaaccccagccagcctatcaccatgactgacagctggtccttggaggtcatgtcccaggtccaggtgctgctgtacttcctgcagctggaggccatccctgccccggacagcaagagacagagcatcctgttctccaccgaagtctaaaggtcccagtccatctcctggaggcggacagatggcctggaaacctctggctaatcgggccatccgtagagcgggaaccttcctgaggtgtccttgggccacccccaagtgttgggccatctgccaagagacagcgacccaaagccgaaggacaggtggcctgggcagatctcgcccaggtctgggagccccaggctggcctcagactgtggttttttatgtggccaccccaggggggccccaagccagtttatttcagagtccaggcctgaccctgggagacagggggaagggagtgatttttatgaacttaacttagagtttaaaagatttttactgggtcccttgtcaagatgggccctttttggggagaagggaacgtggccggattccctccctgttgtattttgaataaacgctggtggttcctcctgtgaaaaaaaaaaaaaaaaaaaaaaaaaaaaaa

SEQ ID NO: 126310 - DNA, 1017 bp, Homo sapiens
  misc_feature (1)...(1017): n = a,t,c or g
atgctgcggtgcgactctaggagatcccctgtatttggtaagcaaaatacgtacatcaggctcgaaccctttaagatcaacgttcttgagcagatcacgaagcatatcgaaaaactgcagtgcggaggtgtagtcaaacaactcagcaggcgtgggaacaatcagcacatcagcagcacatacgacattaatcgtgccgatacccaggttaggcgcgctgtcaataactatgacatcatagtcatgagcaacagtttcaatggccagtcggagcatcaggtgtggatcgatagaaaggcaggagagtgtcttctgcatgaatatgaagatctggtacccatccgtgatacattgaggctgttccctgggggtcgttaccttccacgagcaaaacacgtagccccttcagagccagatcctgagcaagatgaacagaaactgaggttttgtaaacgccacctttatgggcagcaccccgatcaccgnagaatccccagtcgccgtcgtaaagctgctgcacttaccgaaagtgattatcgtgttctggttggcgagctggatgatgagcagatggctgcattatccagattgggtaacgattatcgcccaacaagtgcttatgaacgtggtcagcgttatgcaagccgattgcagaatgaatttgctggaaatatttctgcgctggctgatgcggaaaatatttcacgtgatgcacttcaaaaagcctttacagataaagaggaattacttaagcagcaggcatctaaccttcatgagcagaaaaaagctggggtgatatttgaagctgaagaagttatcactcttttaacttctgtgcttaaaacgtcatctgcatcaagaactagtttaagctcacgacatcagtttgctcctggagcgacagtattgtataagggcgataaaatggtgcttaacctggacaggtctcgtgttccaactgagtgtatagagaaaattgaggccattcttaaggaacttgaaaagccagcaccctga

SEQ ID NO: 126311 - DNA, 2834 bp, Homo sapiens
  misc_feature (1)...(2834): n = a,t,c or g
tcagtaaccctgtgttgagttcccagcttcctcctccttcagcccagggtctgcgtcctttctctgttcactctcaatgccttcctcccaaagatttgcttgaagtttactggtgatcttgatggtctgttctctcgatgggagaagctcttcctccctccttttagctggccatcgtggctcttctttctcgnaatagtcagtgtagaataaacggatttttccgtcagatgtaaaggttgcagaaccggaccattcttgcgtctgatctttcaggatcggatcgttggcgtcgaacttatcgctgtctttaaagacacggcccgcgtttttccagctgtcgattgagttgtcgccgaccttttgataaaacatgtagattgatgtgtcatcagcgtctttcgggcttcccgcaagagcaaacacaacgtgatagccgttgtattcagctactgttccgtcagcgttttgcagcggccagctgtcccacacatcaagtccttttgcagactcaatatttttaatcgttgattgatcgaattgaggcacttggtatttttcgttttgctgctgtttagggatcttttgataaaacatgtagattgatgtgtcatcagcgtctttcgggcttcccgcaagagcaaacacaacgtgatagccgttgtattcagctactgttccgtcagcgttttgcagcggccagctgtcccacacatcaagtccttttgcagactcaatatttttaatcgttgattgatcgaattgaggcacttggtatttttcgttttgctgctgtttagggatctgcagcatatcatggcgtgtaatatgagagacgccgtacgtttctttgtatgctttttggttattttcgaacttggccgtaacctgccaaccaaagcgagaacaaaacataacatcaaacgaatcgaccgatgtgggggcctttagagtcgcaccaaagggattcaagccgaattctaagtctcccctgttatgtgtagccagaatgccgcaaactcccatgcctaagcgaactgtggagagtacgtttcgatccctgactgtgtagcctgaaagtgttttcaagtctcggaaggtttcttcaatctgcattcgcttcgaatagatattaacaagttgtttgggtgttcgaatttcaacaggtaagttagttgctagaatccatggctcctttgccgacgccagcttctcaacggatttataccatggcactttaaagccagcatcactgacaatgagcggtgtggtgttactcggtagaatgctcgcaaggtcggctagaaattggtcatgagctttctttgaacattgctctgaaagcgggaacgctttctcataaagagtaacagaacgaccgtgtagtgcgactgaagctcgcaataccataagccgtttttgctcacggatatcagaccagtcaagggggtcctctagagtcgacatgggcaagttgcttaacttctctgaatctttctcttcatctgtactataggaataataatgttcttcagctccaatatccaccccagcttttttctgctcatgaaggttagatgcttgctgcttaagtaattcctctttatgtgaaatattttccgcatcagccagcgcagaaatatttccagcaaattcattctgcaatcggcttgcataacgctgaccacgttcataagcacttgttgggcgataatcgttacccaatctggataatgcagccatctgctcatcatccagctcgccaaccagaacacgataatcactttcggtaagtgcagcagctttacgacggcgactcccatcggcaattttcttcgaccgcaacgccggtgtctgttgaccagtcagtagaaaagaagggatgagatcatccagtgcgtcctcagtaagcagctcctggtcacgttcattacctgaccatacccgagaggtcttctcaacactatcaccccggagcacttcaagagtaaacttcacatcccgaccacatacaggcaaagtaatggcattaccgcgagccattactcctacgcgcgcaattaacgaatccaccatcggggcagctggtgtcgataacggggtgttctccacaaagagcgactcgctgtataccgttggcatgctagctttatctgttcgggcaatacgatgcccattgtacttgttgactggtcttgcgagcattctaccgagtaacaccacaccgctcattgtcagtgatgctggctttaaagtgccatggtataaatccgttgagaagctgggttggtactggttaagtcgagtaagaggaaaagtacaatatgcagacgcgattgcgacgtgctgaagacgtatttccaccggtgatcggggttgctgcccataaaggtggcgtttacaaaacctcagtttctgttcatcttgctcaggatctggctctgaaggggctacgtgttttgctcgtggaaggtaacgacccccagggaacagcctcaatgtatcacggatgggtaccagatcttcatattcatgcagaagacactctcctgcctttctatctgatgctccgagctggccattgaaactgttgctcatgactatgatgtcatagttattgacagcgcgcctaacctgggtatcggcacgattaatgtcgtatgtgctgctgatgtgctgattgttcccacgcctgctgagttgtttgactacacctccgcactgcagtttttcgatatgcttcgtgatctgctcaagaacgttgatcttaaagggttcgagcctgatgtacgtattttgcttaccaaatacagcaatagtaatggctggggatc

SEQ ID NO: 126312 - DNA, 266 bp, Homo sapiens
caagtcagaagcagaaggcttggttgctgccagccaggcaagggacagcctccagcagagtccacccacccacagttgtctccttagaacaaacagaaagtttcacaagcacactttgttcagttctgcagcttaccagcatggataattatgacaacctgtgcctggaggccactaaattcatcgaggacctgaacatgtgtgaggcctctaatgatgggctcttcccagtggacaagggtgcaggcaacacccccgagttttag

SEQ ID NO: 126313 - DNA, 1846 bp, Homo sapiens
ttttccgatatgcttcgtgatctgctcaagaacgttgatcttaaagggttccaccctcatgtaggtattttggttaccaaatacagcaatagtaacggccccccctcacagtggatggaggagcaaaaaaaggatgcctggggaagcatggttctaaaaaatgttgtacgtgaaacggatgaagttggtaaagcaagtcagaagcagaaggcttggttgctgccagccaggcaagggacagcctccagcagagtccacccacccacagttgtctccttagaacaaacagaaagtttcacacgcacactttgttcagttctgcagcttaccagttttcccatcttcaaaacaggagagaaaattggcgggcactttgcagggctgctgggaggaggagaaatggagcaggcccggacacctgtctgcagcatggataagtatgacgacctgggcctggaggccagtaaattcatcgaggacctgaacatgtatgaggcctctaaggatgggctcttccgagtggacaagggtgcaggcaacaaccccgagtttgaggaaactcgcagggtgttcgccaccaagatggccaaaatccacctccagcagcagcagcagcagctcctgcaggaggagactctgcccagggggagtagaggccctgtcaatggagggggccgccatgggcccacaggcccgttgggaagttgtgggcagcaagctgactgtggatggtgctgccaagcctcctcttgctgcctcgacaggggcacctggggcagtcaccaccctcgctgctgggcagcccccgtacccaccgcaggagcagagatccaggccatacctgcatggcacgaggcatggcagccaggactgtggttccagggagagcctggcgacttctgagatgtctgctttccaccagccaggcccctgtgaggatccttcctgcctcactcatggagactattatgacaacctctccttggcaagcccaaagtggggtgacaaaccaggagtgtcccccagcatcggcctgagtgtagggagtgggtggcctagctccccggggagtgacccaccactgcccaaaccctgcggggaccatcccctaaatcaccgacagctctccctgagctccagcaggtcttctgagggtagcctcggtggtcagaatagtggcattggtggccgcagcagcgagaagccaacaggcctttggtccactgcctcctcccagcgggtgagccctggcctgccttccccaaacttggagaacggagcaccagctgtggggcctgttcagcccaggactccttctgtgtcagcacccttggccctgagctgccccaggcaaggaggtcttccaagatcaaactcggggctggggggtgaggtttcaggtgtgatgtccaaacccaatgtggacccccaaccctggttccaggatgggcccaaatcttacctttccagttctgccccgtcatcctcgccagctggcctggacggttcacagcagggtgcggtccctgggctggggccgaagcctggctgcacagaccttggcactggtcccaagctcagccccaccagtcttgtccatccagtgatgtccaccctgcctgagttatcttgtaaagagggtcccctgggctggtcttctgatggtagcctgggatctgtgctcctggacagccccagctcccctagggtaaggctgccctgccagcccctcgtcccaggtcctgagctgagaccctctgctgctgagttgaaattagaagccctcacccaacgtctggagcgagagatggatgctcacccgaaggctgattactttggtgagtga

SEQ ID NO: 126314 - DNA, 664 bp, Homo sapiens
ctactcggtgctggctgcatagaagcccagggagctcgggccgatctctccagtctggttgccaccagacaggcttcctgagagaccccagaggaggcggccctcgggtgtggaccctggctcctggttggggtccgggtcgtgcggttcaacaggctgctctgctctaatgtcctgctcatgtgggtccactcctttattgtccttggcgctgaaagtcaccccaggtggggtccttggagccccatctggatctgaagatggctcctgaccaaatagaaaagcctgtggctccgagatggagatctgcctgaccacacggggtgtctgggggcctgaggtggctcttggggtcgggggcgggctccagcagagctgcagggctccgtgcggagggctgccaaagttgctcaggagctggtcccagtcatcgttgtccccaaatagcccaggcaggggggcctcctcaggggaggcagcctgagggtctggggtcttctcacccgctccaggaaaattcctcagggtcagctccagggcctccttgtccgcctgggcctcctgcaggcggctggtcatcttggccagaaagcctgccaggttgcctgccagctggggctcctcctgccgcagctgcccccacagttgccagatttccatctgc

SEQ ID NO: 126315 - DNA, 1941 bp, Homo sapiens
atgttcttgctgcctcttccggctgcggggcgagtagtcgtccgacgtctggccgtgagacgtttcgggagccggagtctctccaccgcagacatgacgaagggccttgttttaggaatctattccaaagaaaaagaagatgatgtgccacagttcacaagtgcaggagagaattttgataaattgttagctggaaagctgagagagactttgaacatatctggaccacctctgaaggcagggaagactcgaaccttttatggtctgcatcaggacttccccagcgtggtgctagttggcctcggcaaaaaggcagctggaatcgacgaacaggaaaactggcatgaaggcaaagaaaacatcagagctgctgttgcagcggggtgcaggcagattcaagacctggagctctcgtctgtggaggtggatccctgtggagacgctcaggctgctgcggagggagcggtgcttggtctctatgaatacgatgacctaaagcaaaaaaagaagatggctgtgtcggcaaagctctatggaagtggggatcaggaggcctggcagaaaggagtcctgtttgcttctgggcagaacttggcacgccaattgatggagacgccagccaatgagatgacgccaaccagatttgctgaaattattgagaagaatctcaaaagtgctagtagtaaaaccgaggtccatatcagacccaagtcttggattgaggaacaggcaatgggatcattcctcagtgtggccaaaggatctgacgagcccccagtcttcttggaaattcactacaaaggcagccccaatgcaaacgaaccacccctggtgtttgttgggaaaggaattacctttgacagtggtggtatctccatcaaggcttctgcaaatatggacctcatgagggctgacatgggaggagctgcaactatatgctcagccatcgtgtctgctgcaaagcttaatttgcccattaatattataggtctggcccctctttgtgaaaatatgcccagcggcaaggccaacaagccgggggatgttgttagagccaaaaacgggaagaccatccaggtttgtaaatgtgttgaggtagaacatactgtcctacatcatgggccctgcactgaaggggatgtggcagcaggtcctctgggtggcacgtgcatgcaggttgataacactgatgctgaggggaggctcatactggctgatgcgctctgttacgcacacacgtttaacccgaaggtcatcctcaatgccgccaccttaacaggtgccatggatgtagctttgggatcaggtgccactggggtctttaccaattcatcctggctctggaacaaactcttcgaggccagcattgaaacaggggaccgtgtctggaggatgcctctcttcgaacattatacaagacaggttgtagattgccagcttgctgatgttaacaacattggaaaatacagccttcccttttttctgaaacgtgaactgcgcgtacgcgtatctcctccagggatccgagcaactaattcacaaatggggaaactgaggcttaaagcttgctttgcatctctggtgagtcaggactatgtcaatggcaccgatcaggaagaaattcgaaccggtgttgatcagtgtatccagaagtttctggatattgcaagacagacagaatgttttttcttacaaaaaagattgcagttatctgtccagaaaccagagcaagttatcaaagaggatgtgtcagaactaaggaatgaattacagcggaaagatgcactagtccagaagcacttgacaaagctgaggcattggcagcaggtgctggaggacatcaacgtgcagcacaaaaagcccgccgacatccctcagggctccttggcctacctggagcaggcatctgccaacatccctgcacctctgaagccaacgtga

SEQ ID NO: 126316 - DNA, 2238 bp, Homo sapiens
atgcccagcggcaaggccaacaagctgggggatgttgttagagccaggaacaggaagaccatccaggttggtaacactgatgctgaggggaggctcatactggctgatgcgctctgttacgtgcacacatttaacccgaaggtcatcctcaatgccaccaccttaacaggtgtcatagatgtagctttggggtcaggtgccactggggtctttaccaattcatcctggctctggaacaagctcttcgaggccagcattgaaacaggggaccgtgtctggaggatgcctctcttcaaacattgtacaagacaggttgtagattgccagctggctgatgttaacaacattggaaaatatagatctgcgggagcatgtacatctgcggcattcctgaaagaattcgtgactcatcctaagtgggcacatttagacatagcagctgcattgggtaaatccttgcctgccagagtgggtcagcggccccaggcgcagtttgctcgcggcgtggggatgaagtccgtgtccctggaggggcccaggaagggcgaggaaagcggagtggattttcctggagcgggtgagaagaccccagaccctcaggctgcctcccctgaggaggcccccctgcctgggctatttggggacaacgatgactgggaccagctactgagcaactttggcagccctccgcacggagccctgcagctctgctggagcccgcccccgaccccaagagccacctcaggcccccagacaccccgtgtggtcaggcagatctccatctcggagccacaggcttttctatttggtcaggagccatcttcagatccagatggggctccaaggaccccacctggggtgactttcagcgccaaggacaataaaggagtggacccacatgagcaggacattagagcagagcagcctgttgaaccgcacgacccggaccccaaccaggagccagggtccacacccgagggccgcctcctctggggtctctcaggaagcctggtggcacctgcattcaaagtgctcattcctttggaggatgggccccctccccttgagaactctccccctccccaggccccagctgggtccagcaaacagatccaggcctcagacccagatgacaagggccctgggtcttgggctcctcccagcggggctcagcctggggctggagcaggaccccaggaacccacacaaacccctcccaccatgactgagcgggaaacccagcccggaccctcacccacaactgccctcacaggagtgggcccagccaagccgcccaggcagagagatgccctccagcaggacctgcatgccactggctctgagccaagactggggacccagagggctagagccctcaccctggggccagctgagcccttccagggcctggaatttgtgggtccggtgcccacagagaggctggagcagggccaggcgggcccagcggtgcaggagggccttcctgaggggctaagagaagctcatggccaggtccttgggctgggtgagctgtctgccttcccccaccaggagctggaagaggaacccaggtctgaggaaggaaaacaagagggcagaggtgggcaggacctcagttcagagcagtcagagcagtcggttgaggctcacggcctagaaactgcgcattcggaactcccccagcaagactctctgcttgtttctctcccatctgccacaccacaggctcaggtggaagcagaaggccccactcctggaaaatcggcacctccaaggggctctcctcccaggggggctcagcctggggctggagcaggaccccaggaacccacgcaaacccctcccaccatggctgagcaggaagcccaacccaggccatccctcacgactgctcacgcagaagaacaaggcccgcctcactccagggaaccaagggcagagagcaggcttgaagatccaggaatggactccagggaagctgggctgaccccatccccgggagaccccatggctggagggggaccccaggccaaccctgattacctcttccatgtcatctttctgggagactccaacgtgggcaaaacatccttcctgcacctgctgcaccagaattctttcgccaccggattgacagctaccgtgggtaagggcattggggagggcggcagggagcaaggagagacgcaggggccagggccaacgagtgagagcgggcccagaccaagccctccctga

SEQ ID NO: 126317 - DNA, 2162 bp, Homo sapiens
ggctcttttaaatgaccccaggcgtcgtgtattgaatcctagactcacgtccgtctcgccggcgcccgagccagtccgcgcgcaccgcgtctgcgtccccgaaagccccgcccgcaagggctgccctgcctacctggtctccgacgtgctcgtctggagggcggtgcgaggggccgagccgacgagatgttcttgctgcctcttccggctgcggggcgagtagtcgtccgacgtctggccgtagtacgttctgggagccggagtctctccaccgcagacatgacgaagggccttgttttaggaatctattccaaagaaaaagaagatgatgtgccacagttcacaagtgcaggagagaattttgataaattgttagctggaaagctgagagagactttgaacatatctggaccacctctgaaggcagggaagactcgaaccttttatggtctgcatcaggacttccccagcgtggtgctagttggcctcggcaaaaaggcagctggaatcgacgaacaggaaaactggcatgaaggcaaagaaaacatcagagctgctgttgcagcggggtgcaggcagattcaagacctggagctctcgtctgtggaggtggatccctgtggagacgctcaggctgctgcggagggagcggtgcttggtctctatgaatacgatgacctaaagcaaaaaaagaagatggctgtgtcggcaaagctctatggaagtggggatcaggaggcctggcagaaaggagtcctgtttgcttctgggcagaacttggcacgccaattgatggagacgccagccaatgagatgacgccaaccagatttgccgaaattattgagaagaatctcaaaagtgctagtagtaaaaccgaggtccatatcagacccaagtcttggattgaggaacaggcaatgggatcattcctcagtgtggccaaaggatctgacgagcccccagtcttcttggaaattcactacaaaggcagccccaatgcaaacgaaccacccctggtgtttgttgggaaaggaattacctttgacagtggtggtatctccatcaaggcttctgcaaatatggacctcatgagggctgacatgggaggagctgcaactatatgctcagccatcgtgtctgctgcaaagttaaatttgcccattaatattataggtctggcccctctttgtgaaaatatgcccagcggcaaggccaacaagccgggggatgttgttagagccaaaaacgggaagaccatccaggttgataacactgatgcctgaggggaggctcatactggctgatgcgctctgttacgcacacacgtttaacccgaaggtcatcctcaatgccgccaccttaacaggtgccatggatgtagctttgggatcaggtgccactggggtctttaccaattcatcctggctctggaacaaactcttcgaggccagcatttgaaacaggggaccgggtttgaaggatgcctctcttcgaccattatacaagacagggttgtagattgccagcttgctgattgttaacaacattggaaaatacagatctgcagggagcatgtacagctgcagcattcgtgaaagaattcgtaactcatcgtaagtgggcacatttagacatagcaggcgtgatgaccaacaaagatgaagttccccaatctacgggaaaggcatgactggggaggcccacaaggactctcattggagttcttgacttcgtttcagtcaagacaattgcttagttcagatactcaaaaatgtctttcactctgtcttaaattggacagttgaacttaaaaaggtttttgaataaatggatgaaaatcttttaacggacacaaaggatggtatttaaaaatgtagaacccaattaaatttggaaggccttgattttttttttcatttcacacaaagatttataaaggtaaagttaatatcttacctggataagggatttttaaagatactctataaatgattaaaatttttagaacttcctaatcacttttcagagtatatggttttccattgagaagcaaaattgtaactcagatttgtgatgctaggaacatgagcaaactgaaaattactatgcacttgtcagaaacaataaatgcaacttgttgtgcaaaaaaaaaaaaaaaaaa

SEQ ID NO: 126318 - DNA, 405 bp, Homo sapiens
ggaattcgatcagcagaggttggcaagcacctggcccacatcctgctctcccggcagcaggggcgacgacctgtcaccttgattggcttcagcctgggagccagagtcatctacttctgtctgcaggagatggctcaagagaaagattgccaaggaatcatcgaggacgtcatcctgctgggtgcgcctgtggagggagaagccaagcattgggagcctttccggaagggtggtgtccgggaggatcatcaacggctactgcaggggagactggctgctgagtttcgtgtaccgcacatcctcggtgcagctccgtgtcgccggcctacagcccgtgctgctgcaggacaggagggtggagaacgtggacctgacctctgtggtcagcggccacctggactatgc

SEQ ID NO: 126319 - DNA, 1921 bp, Homo sapiens
atgtgtcaggaaggctgcagcagcgacttcttcagaacccagattggagctaatgatctcttcagctttgatgagtaccggggtacttggaagttacaactaggtggcgagtctcaagttggattttcgtttgagtggttttacgttgttttcctgaagctcagctgtccgtggatcctgactgtggctcaggaatgctgctattaccaccgctggccacaaggggtcccagccctgcaggcagccgcaccaaggctcgaaaagcagtcccagctcttagcagggcagactctgccaggcagagaaggcgccctgaatggccggcccccagagaaagctgctgagctcatggttatccctgggtccacaaccatttggcactcacccaatgtggccagggacactgacggccttttctggggtcttttgccagattgccaaggaatcatcgaggacgtcatcctgctgggtgcgcctgtggagggagaagccaagcattgggagcctttccggaaggtggtgtccgggaggatcatcaacggctactgcaggggagactggctgctgagtttcgtgtaccgcacatcctcggtgcagctccgtgtcgccggcctacagcccgtgctgctgcaggacaggagggtggagaacgtggacctgacctctgtggtcagcggccacctggactatgccaagcagatggatgccatcctgaaggccgtgggcatccgcaccaagccaggctgggacgagaaggggctcttgctggccccaggctgcctgccctccgaggagcctcgccaggcagcagctgccgcctcatcaggcgagaccccccaccaggttgggcaaacccagggtcccatatccggagacacctccaaattggccatgtccacagaccccagccaagcccaggtgccagtagggctggaccagtctgaaggggcctcccttcctgctgctgccagccctgaaaggccccccatctgcagccatggcatggaccccaacccactgggctgccccgattgtgcctgcaagacccagggccccagcacggggctggactgaccacagcaggggacctgagccgtcttccccagtctccatatgcagctctctcttataccctcgggttcctcccaggagctctggaggtacaggatttccacaggccttttttcctaaatggaaggaattggaactgaaagggaaaggaaatggaaggaaggggaatttggaggagagaacacgcccacccttgggaagctgcctgtccccagaggatgccccacctatggagttttctgccccctcatcagagacctgcggagtcaaccaagcacaggttagagtcccaggaccggaaaccaactgtgggctttctgtacttctcatagctttgggagtctggctgtccatcaggaggtcccgagggctcttttgggggcctgaggttccccacaccagctctcccctgggcctcaataaaaaccagggtgcatgcctggttcttccatccacactccagggctgcccaccagctgacaggcaccatcaactggcagcaacagagcaggcgcaggtacaaagaagggcagctcactccctgctccttaggagatcccaatcagatctgcccctgtacagccatgtaggctgtgcgctgcataactccagggacatgagtcacacagacacaatgtgagtgtgctcccccgtcatgcaacatctggacaccactaacagagcatggtgaatacatgcctgaattgcaatcaagaatggctgtgaactaagcgctggggacaagaatgaaattttaacatgaaaagaactttctggagcaggaacagaggggataacaacagcaataaataataataagaagaagctaccacttcttgagcatgtacca

SEQ ID NO: 126320 - DNA, 701 bp, Homo sapiens
  misc_feature (1)...(701): n = a,t,c or g
aattgcagaataaaagtgttaacattggataaggcttcaaagatcctccagtccaaccccccattttccagatggagacgccgaggcccacaaactgcaggtgatatgtctgggcaaacactgtggctaagcagagccaaatccaagcttccttatcacctggaagtcatggtctgcgcatgctatctcatggcatccttgcctgtttgctagggctgttcctccaccttcctcccacaaatcacttactgttggcttcatttttccgcttgcagaaaaagttagaaaacctcaagagcttagaccttttcaattgcgaggtaaccaacctgaacgactaccgagaaaatgtgttcaagctcctcccgcaactcacatatctcgacggctatgaccgggacgacaaggaggcccctgactcggatgctgagggctacgtggagggcctggatgatgaggaggaggatgaggatgaggaggagtatgatgaagatgctcaggtagtggaagacnnnnnnnnnnnnnnnnnnnnnnnnnnnngggaacaggcgcactacaacctggacgacaccttcttggacgcgggctcattggggtcaccctcaggagaagtgtcgcaccccctgaaaacacgcccagtggagcagacaatagttggtgctgctggtcgggcccctggtttctccatgtgcggcgaggaa

SEQ ID NO: 126321 - DNA, 1155 bp, Homo sapiens
gctcgagaaccgagcggagctggttgagccttcaaagtcctaaaacgcgcggccgtgggttcggggtttattgattgaattccgccggcgcgggagcctctgcagagagagagcgcgagagatggagatgggcagacggattcatttagagctgcggaacaggacgccctctgatgtgaaagaacttgtcctggacaacagtcggtcgaatgaaggcaaactcgaaggcctcacagatgaatttgaagaactggaattcttaagtacaatcaacgtaggcctcacctcaatcgcaaacttaccaaagttaaacaaacttaagaagcttgaactaagcgataacagagtctcagggggcctggaagtattggcagaaaagtgtccgaaccttccgccatctaatttaaggtggcaacaaaattaaagacctcagcacaatagagccactggaaaagttagaaaacctcaagagcttagaccttttcaattgcgaggtaaccaacctgaacgactaccgagaaaatgtgttcaagctcctcccgcaactcacatatctcgacggctatgaccgggacgacaaggaggcccctgactcggatgctgagggctacgtggagggcctggatgatgaggaggaggatgaggatgaggaggagtatgatgaagatgctcaggtagtggaagacgaggaggacgaggatgaggaggaggaaggtgaagaggaggacgtgagtggagaggaggaggaggatgaaaaaggttataacgatggagaggtagatgacgaggaagatgaagaagagcttggtgaagaagaaaggggtcagaagcgaaaacgagaacctgaagatgagggagaagatgatgactaagtggaataacctattttgaaaaattcctattgtgatttgactgtttttacccatatcccctctcccccccccctccaatcctgccccctgaaacttatttttttctgattgtaacgttgctgtgggaacgagaggggaagagtgtactgggggttgcggggggagggatggcgggtgggggtggaataaaatactatgttttactggcactctttatttttttcccctagtttttctttgtgtgcggattttggaccttggaatgccatagctaaggacccag

SEQ ID NO: 126322 - DNA, 388 bp, Homo sapiens
aagcgtggagcagcgatggacggtcgggtgcagctgataaaggccctcctggccttgccgatccggcctgcgacgcgtcgctggaggaacccgattccctttcccgagacgtttgacggcgataccgaccgactcccggagttcatcgagcagacgggctcctacatgttcgtggacgagaacacgttctccagcgacgccctgaagacctgcgctgccacagtcattgccatccatcgcatcccaccgacagactgctgctcctagtgatctggactcacctcggaggtatctgggctggccacagtccctggacagtgattcagacagctggccgccccccaagggatctgtcaccttcagcgagacctatttcctccccaccccc

SEQ ID NO: 126323 - DNA, 511 bp, Homo sapiens
ctcacagggcccgccctgcagtgggtgatcccctacatcaagaaggagagccccctcctcaatgattaccggggctttctggccgagatgaagcgagtctttggatgggaggaggacgaggacttctaggccgggagaccctcgggcctgggggcgggtgctctggggagggtccgctgtgttactggccgccgccagggtcgccaccggcgccctccctccgcgcctccctccccctcgagccgccgcgatgtcccctgcgctcctgttccctcccgcgtagtgcttgcctttgttccaggtgttcctggcagccaaatcgagtctctcattttctcttgtggaccagttagttttgcccataacgcagtattctgagtttgcaactgtctctctgatgtgtgccttttgttcaacacagtaacccctgcactctgctctgctctaatacactacctggagaaagtcttttccttattttcaataaatgtcagacattattgaaaagaaa

SEQ ID NO: 126324 - DNA, 1273 bp, Homo sapiens
gtagatatcccttaggtacctagacggacttgccgggccgacccacgcgtccgcggcgaccgaggcatccgaccgaagtgaggatctgcgctggacggctgcgcgcagctgatacaggccctcctggccttgccgatccggcctgcgacgcgtcgctggaggaacccgattccctttcccgagacgtttgacggcgataccgaccgactcccggagttctatcgtgcagacgtgctcctacatgattcgtggacgagaacacgttctccagcgacgccctgaaggtgacgttcctcatcacccgcctcacagggcccgccctgcacgtgggtgatcccctacatcaagaaggagagccccctcctcaatgattaccggggctttctggccgagatgaagcgagtctttggatgggaggacggacgaggacttctaggccgggagacccttggggcctggggcgggggtgctctggggagggtccgctgtgttactggccgccgccagggtcgccaccggcgccctccctccgcgcctcccttccccctcgagccgccgcgatgtcccctgcgctcctgttccctcccgcgttagtgcttgcctttgttccaggaatagcgctccaggctcctgctgcagctcctgggccgcactctagagcgcgctgcctccgccctcttttgccagcccaccccctccaatgcacatttggacgctgtcctgcacttcaggtgcaagctgggctcctgttacatactggacagaccacccacagccgctgctgccaacccacctccactcctccagactgccagccaactacatcattctgcccacagacctacgctaccactgccatcgccatccaccgcatctcaccaacagactgtggctcctagtgatgtggactcacctcggaggtatccgagctggacacagcccctggacagtgatccagacagctggccgtcccccaaggagcctgtcaccttcagcgagacccatttcctccccatccccagagacctcttgtgttcctgccacatagctgccagggcttaagtgtgcctggcaaccaaatcgaatctctcattttctcctgtggaccagttagttttgcctagaatcctgttctcttctgaatttgcagctgtctctctgatgggtgccttttgttcaacacagtaagccctgctcccttccctgctctaatacactacctgtacaaaggttttttccttattttcaataaatgtcagacattattgaaaag

SEQ ID NO: 126325 - DNA, 1137 bp, Homo sapiens
tcacagttttggaggcgtgaggtctgaaatcaaggtgtcagtggggttgcgtgccctccattcatccccagaacaaatcctgtctcggtggcctgtgtcttcactggcagaatagaaggctgggaccagggtggtgataccggcaggatgtcctgacaacggcattcccttgtgtttgtttatacttaaaacaactcttccctgtggtccaggaagggtgaatggagaggctctgagtggagatgacagggcttggtcacagattgcgtgtagggttggaggccgagagtggccgatgatgacggatttcttgcttcggagactggtagtgttactgacagatgtgaggaagccgggaaggtgacccatgctgagtgggcagctggtgcatttgcagatgttttgcttctcaaatatctgtttttcccagtcgttgactgctattcgaccgtttaactggttaatatgagcaccaagataaataaatggagaccttttaacccacagagtttgagtgacagcttggactaaaccaccagtctcctgctttgtacatttcattgttttagggcatgagagccaccaccgaggaagaaaagagaaaactgcctcttcattcatgcgtttatctggaaagggtgaccactgccaattccgtcgtgtgacaggatctagtgtctctggaaagcttgctaaacacgaagatccttgtctcagcctcagtaatctgattgcacaggtgtgggacagggtccgggagcgtgggtcttttatgaggttcccaggtggttttgatactgatggtttaagaccaccatccaggatcctgcagagatctgatggttttataaggggctcttccccggcttcacttggcacttcttcctgctgccttgtgaagaaggtgctttgcttccccttctcgttccaccgtgattgtaagttccctgcggcctgcccatccatgctgaactgtgagtcaattaaagctctttccgatccgttttccctttccctgcatcctttttctcttttctccaaccgcttacttccacgagatgataaggaggaagggaacaaacacaagagcagagcaaggaattgtctttttggggataaatctctgattttaatcat

SEQ ID NO: 126326 - DNA, 765 bp, Homo sapiens; identical to SEQ ID NO: 123923

SEQ ID NO: 126327 - DNA, 471 bp, Homo sapiens
gatggggaaccaatcaagcatgactgccaacaaattatagtccagatttatgccgcccgagatgatctcttagaagtccccttagctaatcctgaccttaacctatatattgatggaagttcatttgtggagaatgggatacgaagggcaggttatgccatagttagtgatgtaactgtacttgaaaactctttggcagcagtgactctccaaaaccgccaaggcctagacctcctcactgctgagaaaggaggactctgcaccttctcagggaaagagtgttgtttttacactaaccagtcagggataagttcccctctggaggacactacaactgcagggccctttcttcaccccatccagcaggaagtagctagagctatcatcggccaattcccaacagcatttggggtgtcctgtttagaggggagattgagaggtgaagccagctggacttcctgggtcgagtag

SEQ ID NO: 126328 - DNA, 3911 bp, Homo sapiens
cggagaaagctccaaaagcaagccctgggccctgaacaaaatctagagacattattaaacctggcaacctcggtgttctataatagggaccaagaggaacaggtccaaaaggaaaagcgagatcagagaaaggccgcagccttagtcatggccctcagacaaacaaaccttggtggttcagagaggacagaacatgaagcaggccaatcacctggtaaggcttgttatcagtgtggtttactgggacactttaaaaaagattgtccaatgagaaacaagctgccccctcgtccgtgtccactatgctgaggcaatcactggaaggtgcactgccccagaggatgaaggttccctgggtcagaagcccccagccagacgatccaacaacaggactgagggtgcctggggcaagcgccagctcatgtcatcaccctcactgagccccgggtatgtttaactattgagggccaggaaattgacttcctcctggacactggcgcggccttctcagtgttaatctcctgtcctggacgactctcctcaacctccgttaccatccaaggaatcctgggacagcctgtaaccaggtatttctcccacctcctcagttgtaattgggagactttgctcttttcacatgcctttcttcttatgcctgaaagacccacagggttattagggagggatatattagccaaggctggagctattatctacatgaatatggggaacaagttacccatttgttgtcccctacttgaggagggaatcaaccctgaagtctgggcattggaaggacaatttggaagggcaaaaaatgcccacccagtccaaatcaggttaaaagatcccaccacttttccttatcaaaggcaatatccctaaggcctgaagctcataaaggattacagaatattgttaaacatttgaaagctcaaggcttagtaaggaaatgcagcagtccctgcaacaccccaattctggaagtacaaagaccgagactagtgcaagatcttagactcattaatgaggcagtaatttcactatatccagttgtacccaacccctataccctgctctctcaaataccagaggaagcagaatggttcacagttctggacctcaaggatgccttcttctgtgttcccctgcactctgattcacagttcctctttgcttttgaggatcccacaaaccacacatcccaacttacatggatggtcttgccccaagggtttagggatagccctcatctgtttggtcaggccctagccaaagatctaggccacttctcaagtccaggcactctggtccttcaatatgtggatgatttacttttggctaccagttaggaagccttgtgccagcaggctactctagatctcttgaactttctagctaatcaagggtacaaggtgtctatgtcgaaggcccagctttgcctacagcaggttaaatatctaggcctaatcttagccaaagggaccagggccctcagcaaggaatgaatacagcctatactggcttatcctcgccctaagacattaaaacagttgagggagttccttggaattaccagcttttgccgactatggatccctggatacagcgagacagccaggcccctctaatcaaggaaacccagagggcaaatactcatctagttgagtgggaaccagaggcagaaacaaccttcaaaaccttaaagcaggctctagtacaagctccagctttaagccttcccacaggacagaatttctctttatatgtcagagagagagccaggatagctcttggagtcctcactcaaactcatgggacaaccccacaaccagtggcatacctaagtaaggaaattgatgtagtagcaaaaggctggcctcactgtttaagggtagttgcagcagtggccgtcttagcatcagaggctatcaaaataatacaaggaaaggatctcactgtctagactacttatgatgtaaatggcatactaggtgccaaaggaagtttatggctatcagacaactgcctacttagataccaggcactactccttgagggaccagtgcttcaaatatgcacatgcatggccctcaaccctgccacttttctcccagaggatggggaaccaatcaagcatgactgccaacaaattatagtccagacttatgccgcccgagatgatctcttagaagtccccttaactaatcctgaccttaacctatatactgatggaagttcatttgtggagaatgggatacgaaggttagtgatgtaaccatacttgaaagcaagcctcttcccccagggaccagtgcccagttagcggaactagtggcacttacctgggccttagaactgggaaagggaaaaagaataaatgtgtatacagatagcaagtatgcttatctaatcctacatgcccatgctgcaatatggaaagagagggagttcctaacctctgtaggaacccccattaaataccacaaggaaattatagagttattgcacgcaatgcaaaaacacaaagaggtgggaatcttacactgacaaagccatcagaataggaaggagaggggagaacagcagcataagcagctggcagaggcagcagaaaggaaagaaagagacaggaagtcaaagaaagagacagagaggaagagacaagaagttagagagaaagagggacagacacagaagtcaaagagagggtaaaaaagagaggaagagacaaagaagaagtcaaagagagagatggaagtagtaaagaaaaaacagtgtacctattcctttaaaagccagggtaaatttctctctacccacgcaaggcaattctctattggatctcaacccatatctgcctctcaaacagttgaagaaataatgaaatctatccttactttacaatcccaaataagactctttggcagcagtgactctccaaaaccgctgaggcctagatctcctcactgctgaaaaaggaggactctgcaccttcttaggggaagagtgttgtttttacactaaccagtcagggatagcatgagatgccacccagcgtttacaggaaaaggcttctgaaatcagacgcctttcaaattcttataccaacctctggagttgggcaacatggcttctcccctttctaggtcccgtggcagccatcttgctgttactcgcctttgggccccgtatttttaaccttcttgtcaaatttgtttggtctagaatcgaggccatcaagctacagatggtcttacaaatcgaaccccaaatgagttcaactaacaacttctaccgaggacccctggactgaccagctggcacttcccctggcctagagagttcccctctgaaggacactacaactgcaaagccccttcttcgcccctatccagcaggaagtagctagagcagtcatcggccaaattcccaacagcagttgggggtgtcctgttgattgaggggtgacagcatgctggcagtcctcacagccctcactcgctcgctcactctcggcaactcctcttgcctgggggtcccacttttggcagcattttaggagccccttcagctctgtatctaggctactctgatgggtccttggagaacctttatgtctagctcagggattgtaaatacaccaatcagcaccctgtgtctagctcagggtttgtgaatgcaccaatggacactctgtatctagctactctggtggggccttggagaacctttgtgtcaacactctgtatctaactaacctggtggggatgtggagaacctttgtgtctagctcagggatgtaaacgcaccaatcagtgccctgtcaaaccactcggctctaccaatcagcaggatgtgggtggggccagataagagaataaaagcaggctgcccgagccagcagtggc

SEQ ID NO: 126329 - DNA, 9223 bp, Homo sapiens
ttatattggatttttagcagattcagtagcagtaattgcatcaagatgaggtgaatctttagaataagttgcgagaccagatgcaactaatatatctgccaaattgtttttctcatgaatgacatctactttcagttttgtttcagaatgatattccctaaactgaaaaactaagtctggtttacttaggaaatctcgaaaaaagattttggcttcttcactccaatgttttcctttagcaggtaagataccatataaaatacatggataactcagccttggcaaattcaaaagttcctcaggaacaactttaagatttataatttctgaataacgtatataaaaagaaaatccatagtcaaccaacacaagacataaagactgaggtgagacttcagaaatttctactctattccactgatcttccgatttatatttgaacaaacaactagaaccgggaattatgaactcctgaggcaatgtttgtaaggtctctggtagatcagaaagcaacataaaaaggtatttcattatgtcaaagaaatcttctaactgaatactgaagtctgatggatcagaaacagcagttgcaataccagaatactgcctatcattttggaattgaacccaagtaaatgattttattgtgcatgatgatacaggagtcttagattcaatgttgtaaacaatttctgcaagtctaagtttgttttcttcaacaggaactgtattcaaatttaagtattccaaaagtaacaggtcatctaccaaaatttctacttcccaaacagcatctaaatatttcaggaaaagaatatttatttccaaatcagcaaataagcactcaaatgatatgttcttagaattttcaaaccaaatccatttacaaggtacagcttgtctaggaatgtttcttatttcattactaagcagcttggtattacatacaggtactatttcatagataccacaatctactaaaaaaacaagtactttatcatcaacatacttttcttctacttttgatcgatgccatttcaaggtatttttagattttgccaagcattctaaacctttttcaatactttccattgataaaaaaggggattttttttcttctttcgtaattaatactattaaatctgataaaatttttttatttttggataacttcacataaaatcttccactttttgaaacattaagcatttcagctttttcaagttgtccaagtttgaattcttccaaaggaattttaaacagctgttggtttgaattcatagaaccttcagactcatttgattttcctttcttcatttcattatcacctggcctcaccttttgagagagaacctgaggcatctgcaatgctgacttctgcagttttgaacatgctttccatttcagtagttcattaatgacacatttttcatcacaaatcatatttacttcccatttctgatcatgctttttcaaaaattcacaataaactgttttgttatgtactttcgaagtaaaataatccacagttttgtcatcccatatttcatcaggctcattccattttactccactaagaaaagcatggattcctagctgaggaacagttaaaaattccctctgaagttcgtaaattttagatgtgtttactattgcagagttaccatagtcaataaattctacttcaaaagaatttcctggcaaaattttcttaataactgccctgtaaatggcattgtcaccagaatattctgcaactacaagatctcccactagaggtttaactgattttctctctctcaatctccttgctgttgcatttagagcatcagcaagtctgataattacactttcattctcagcaagctgaatatggaaattcgctggattactgatattagatacataccctttaactttggcattcaaataaatttgcggttgaggaaggtctttgatctgtggcctaataaggtcatatgggttttgtgaggttgtttgatttaatgctctgataaaagactgtgatacaacctttactgatttttggcccacacgcctgttctcaagaatatgtgcagctccagggacaatttttatacctttaagcccatcattcaaagaagtcttcattttgttttttgacacaggttccattttataacaaactgatggcttcaaaaacctggcatgtatatttttgggatgcatcaattggtctatttttctttcggaatatgttactggactaggtttatttatcacattatggcgatagttgtttcctgttttgcctttcaaagaagtagtaaatctcttattctcatttattttattactcttttccatgcagcatgcttggtcacaatgtctttttccataagcatgaagcaacactttaattttctcatttatatattgagatccatcatacaattctataccaagctgtccatctgactcctgggacaatattatcgcctttaatgatcttcccaagaaattgtctttaaaccaactactgatttctgctggaatatctacatccctaagatctgacaaaaaacacttaatagcttgcataggtgtaaacaacaactctggaaactgagctgaaatggccctcaacatattttctcctactaattgcttatttccaaagtctacaaaatagacttgaaactcagatgatgaatctgttggtattgctaaagctctgtatgagagaccatcctctacatacttagatatgcacactctcattttattagaatcatattttggaaaattttggaggttaacactctctgtgatttttgtttctatcatctctagatctttattatttctgccaagctggcaataaaacttttggggactatatatgtgagatatatatacttcttcttcacttccaatttgtatattaaaggaagaataacagtaactgtaaagactaaataaagatgggaatgtctctgataatgtgatatactgagcagagccacgattcataagaaattcttttgcactagtaaatgaggactgtaaatccactaagttatataaatggtttggatgtataataactaaggcatagatgatacaagtcaataaccctctagatgaagagataaaattccacaagtctctgaatgcttttcttgtccaactgaataatttacaactaacaggctcaataaaatggttaagacaacatctgaaggcttggctttctaacaagagaaaacgtgggttaattgcacaaagatcttcaattaaaacccttttttggtaaccataatcaacaaacactatgtcaacttcttttgatacttgagtcaaaacagcagctctacaccacttcccagaatacttagcaacacaagcagtctgcccaatctcataaggatcagaatgaatactatagtaattctgaatttgctccattagtaattttaggtcttctgacttacattggagctggcatgaaaagtcacctgggccataataacaggaacatttaacttcaagaactgttcctggtctaaaaatatattctttataaggccaggatgactcaggtcccacagacaaggtgaaaggatttttaaattctgagatattaacagctagggactttggcaaagacaagttattttccaccaggttatttgaatggtactttttagatttaggtccttcaagaagggcagatatgacttttttaatattaactttgtttttagattctgaatttagcattgaatattcacttacagattttggaaaatattctagttctacttgaaaatattctgcatatccagcttgtaacataagagagataacatcaatattttctgaggcttcaacactttgaatatttacagtgtacttgtcatctttttttgctataacctgaagcaaaattgctttgttcaaaactaattttttaaaataatcaattgcagccttagtccataaatcttcaacaggaaatatatgtgcaagtgaacagcacatcgctaaggcaggcaactcacaaaattctggaagcaaaatttttacatcaaaaaatggtatggaatcagtattaccataatccaaaaaataaacattaatcttataaccattaatttcagtgatgacagctctgtaaaaacgtctgtccttgctatatctagcacaacaaaataatccaggttcaggttttcttagaatcatttcatcgttttcacacaaatcataaaatttgtttatgtttttcattatttcttgaaattcattccgatggtcattagtgcgtacccagaaatttgatgggtttaatacatatgctataaaagctatgtaggcagcctctatctccatttgtactgttttaatgggaaaacctacttttaaaatgccttttttatttagagagtctattgaccattcaatatttcccataaaactctcaactgcaaagctgtttacatcagacacacttgtctcactcaagatattggagatttttgaatcagacatcggacaaagtacttgtgtgcctacagtcttcagtagacacttagaattaactgtagactcttgagtttgtaatgtcacataatacaaacactcatccttattgaaccaatcaatgtgtgcatataccacttgtcctaataaggcctgtttaaatatactcagttgaaatattcttgcatctctatctggactgtgcaaacatgtcagagaacatggaaatgaaaataatggtactaaaataaaatcctgtttaagtttctttacataaattgagggtatagcctcgctactgccataatccataaaccaaatttttacttgatttgggggcaagagctgctgaagaattcctctatgccactgtccatttcgccttctggcaacacaaagcagtccaaaattatcacacgtgggactagtttcttgacagacggtatcataatgcaaagtcatatgtgctgtcaagttttctagctctggagtccatttaattaactgacaataaaatttacttgggctcaatgcagatgatacctttacactttcagtacttcctactgacaaagatggctgcaacttatccagaacatgctgaatatcaagtgaagtatctttattacctaatgacaattcaggccttttatgttgtaataaatctggcatttgttgagggaattcttctaacatttccacaataagacgaaatgaatctccatcaacaagtcttcctaattgtaactcgagagcctgagatataatttttggcacatttttccccaactggtagtatattcgcaaaaataccaaatacaacccgtggcggtactcaaataaattgccacaggctgaagcaatctgtggaccagcaactcttagttcttctccgcgatctatgaggagcactgtatagagttcatttttcttttccatgactcttcctctctgccattctccagatactctttcttccaccaaacaaaattcatcaatttccacattatttttcacttttggagtatgttgtatttctctctgcaatacatggtagtcaaactcacattcattactctttatgccttgaaatttcaccagaatatccttgggaagacatttaatatgtgatattgtcagatccacatctaaaaatgttggtaagaaagatgtagaatccattttcccctcgtaatcccgcaggggccccagggagcatgtgcgggcttgaaggccgaatgcggcgggggaggcctgcagctgcgcaaagcgtcccgcctggcgctgtccctggcttcctgagggcggaagctgtgtgcggcctggtaagggtggtgcccactgggagttcttgaagctggcattaggctccaggtgggcagcctcacagccttgtctctcagggccaggccatggagagactctggacgggctctggagttgggcaacatggcttctcccctttctaggtcccgtggcagccatcttgctgctgctcactctttgggtccacactgcctttacgagctgtaacactcaccgcgaaggtctgcagcttcactcctgaagccagtgagaccacgaacccaccaggaggaacaaacaactccagatgtgctgccttaagagctgtaacactcaccgcgaaggtctgcagcttcagtcctaagccagcaagaccacgaacccaccagaaggaagaaactctgaacacatccaaacatcagaaggaacaaactctggacatgccgcctttaagaactgtgacactcaccacgagggtccgtggcttcattcttgaagtcagtgagaccaagaacccaccaattccagacacattttggcaaccacaaagggactatcacctattgccaagcggtgagactatcgccaagtggtgagaccatcgtctatcgctgagcagcaaaacaatcgcctatcgccaagcaaatcgaagccatcaagctacagatggtcttacaaatggaaccccaaatgagttcaactaacaacttctaccgaggacccctggaccgacccgctggcacttccactggcctagagagttcccccttggaggacactacaactgcagggccccttcttcacttctatccagcaggaagtagctagagcagtcatcggccaaattcccaacagcagttggggtgtcctgtttagaggggggattgagaggtggcagtgtgctggcagccctcgcagccctcgctcactcttggctcctcctcggccttggcgcccactctggccatgcttaaggagcccttcagcctgccactgcactgtgggaacactggccaaggccagagccagctcactcagcttgtggggaagtgtggagggagaggcgcaggcgggaactggggctcgatgcggcgcttgcgggccagcgtgagttccggtggttggtggcttggcgggccccagactcggagcggctggcctgccctgctggccccaggcagtgaggggcttagcacccaggccagcagctgtggatggtgcgctgagtctcccagcagtgctggcccaccccaccagcactgcactcgatttctcgccaggccttagctgcctccccgcaggcaggccttgggacctgcagcccaccatgcctgagtctcccctgctgccgccgtgggctcctgcgtggcccaagcctccccgacgagcactgccccctgctccccggtgcctggtcccatcgaccccaagggctgaggagtgcaggtgcatgctgcgggactggcaggcagctccacctgcggccccatgcaggaagccagctgggctcctgagtctggtggggacttggagaatttttatgtctagctaagggattgtaaatacaccaatcagcactctgtatctagctcaaggattgtaaatacaccaatcagcaccctgtgtctagctcagggtttgtcaatgcaccaatcggcactctgtatctagttaatctggtggggagttggagaatctttatgtctagctaagggattgtaaatacaccaatcagcactctgtatctagctcaaggtttgtaaacacaccaatcagaaccctgtgtctagctcagggtttgtgaatgcaccaatcagcactctgtatctagttaatctggtggggacttggagaatctttatgtctagctaagggattgtgaatgcaccaatcggcactctgtatctagctcaaggttgtaaatggaccaatcagcactctatgtctagctcagtgtttgtaaatacaccaatcgacactctatctagctaatctagtggggacgtggagaacttttgtgtctaactcagggattgtaaatgcaccaatcagaaccctgtcaaaatggaccaatagctctctgtaaaacagactgactttctgtaaaatggaccaatcagcaggatgtgggtggggccagataagagaagaaaagcaggctgcctgagccagcagtggcaacccgcttgggtccccttccacactgtggaagctttgttctttcgctctttgcaataaatcttgctgctgctcactctttgggtccacactgcctttatgagctgtaacactcaccgcgaaggtctgcagcttcatctgaagcagcgagacacgaacccaccaggaggaacaaacaactccgatgcgctgccttaagagctgtaacaccgcgaggtctcgagcttcactcctgagccagcaagaccacaaacccaccagaaggaagaaactcaggaaaacagccgaacatcagaaggaataaactctggacacaccacctttaagaactgtgacactcgctgcgagcgtctgtggcttcattcttgaagtcagtgagaccaagaacccaccagaaggaaccaattctggacacattttggtgaccacgaagggactattacctatcactaagcggggttgtttctgctgctgcgttggtgagcacaactactccaatcagcagggtccggggactgttgcaggttcttgggcaagaggtgtttctgctgctgcattgcagatcaaggcagaccttgggaagctttcagatgatcttgataggtatacagatgtcctacagggtcgagggcaaaccttctatctcacttggagagatgtcatgctagtgttagatcaaaccctggcctttaatgaaaagaatgtggctttagctgcagcccaagagtttggagatacctggtatcttagtccagtaaatgatagaatgacagttgaagaaagggacaaattccttactagtcagcaagccgtatgtcagaggtggcagtcttacactgccgaagccatcaaaaaggggaaggagaagggagaacggcagcataagcggctggcagaggcagggaaagaccagcagagagaaagaggcaaagtcaaagacagaaggaaagagaggaagagacaaaggagtcagagagaaagagatagaagtagtaaagaaaaaacagtgcaccctattcctttaaaagccagaatcaaggccatcaaactacagatggtcttacaaacggaaacccaaatgagctcaactaacaacttctaccgaggacccctggaccgacccactggccctttcactggcctagagagttcccctctggaggacactacaactgcagggccccttctttgcccctgtccagcaggaagtagctag

SEQ ID NO: 126330 - DNA, 471 bp, Homo sapiens
  misc_feature (1)...(471): n = a,t,c or g
tgatgtcnnaggatgnnaancctaggggngcctagnnngtcnaganancaannnngggnngancacgcgtncgggggatgatgagacgaagttgacgctgcatgggttgcagcagtactacgtgaaactgaaggacgacgagaagaaccggaagctctttgaccttctggatgtccttgagttcaaccaggtggtgatctttgtgaagtctgtgcagcggtgcattgccttggcccagcagtttaaagattttcaacgacgaattcttgtggctaccaacctatttggccgaggcatggacatcgagcgggtgaacattgcttttaattatgacatgcctgaggattctgacacctacctgcatcgggtggccagagcaggccggtttggcaccaagggcttggctatcacatttgtgtccgatgagaatgatgccaagatcctcaatgatgtgcaggatcgctttgaggt

SEQ ID NO: 126331 - DNA, 4230 bp, Homo sapiens
ttaaaaccaatgcccatcattctcctcctcctcattgtctagatagaggagggcaactttcttttcatctgaaatcaccgacctttggtctaccattctctggagctgcaccttcttatcaaacatggcctgctccttgccctgttctctgtgggcctggtctccttccccagcagaggccttaaagctcacaccaactgcctggtcattcctactgtccgcgtctctccaggaaccacggtcagacacaccgagagctcccgcttcctgtgtccggctgcggatcgcctctacgttactcacatccatctgaaaggtaaacgaagtttctttgggccctggtgcaatgtgccttagcgttctgctgctgtctgctaacttgcctagctcaggggagtccgctgaaccagcaagcacaaatgttctggacacgggtccacggatggcaatgtgttcagaggtttccgtttctgtaggacctagtcgaatgtgcctaaaggatctgctaacacccgatgtcatttctgcccctgatgtgtcctctgcactatcctcctggggagattcagaaacgacactttggaaggtgctcttttcagtcataacggtttgtctacccgaggtatgactgtgagtggcctggtgcacatctgctgagccctctccgtgcacagtgctctctgagtcaccagattcccccagttggggaaccagcccatggtaaactatctgctgggtggtctgatgcctctgaggcccaatgctgatgtgcctgatggatgtgctgctccctggcaacccttccatgtgtacagaatctcctatgacacccaactccaccttgtctgaaagtggagctgtgaactggatttgcccactgaacccttctttagggcctaactggagttgcctgacagaagtctgggtacccactgactcttctgttgcaaaataatcaccaaccttccctgcagcagaaatggggccctgaaaaataatctccttttcagcatgaaattgtctgcagccaaatgtgctgtgcctccctgatccgtccatatctgcagaagactctgctgggccaggttctggcgagccccatgcctctggacaggcaggggcagggcctaggaagatgacttctctggacagtggactttgaccgggacccagcgtgacatgcctcacagaccggctggctccggtcgggctcgctgcctgacttaggtcacctcccgcacttacctccaccacttctgcagtgggtccttcatatgacattcgctcagtcctccagacttcagaggggccgagttttatgtgccttgcagcctggctcacatcctccagcacctgtgactgggcaaagcctgtggggctgctgacctccacagtggccgacactgggccctggggagtgcgctgtcccgagctgtgagaggccccaccagcaacctcgctctcgcctgaagggatgtacagctcccgggtggcccaacgcctgaagcgaatgccagcagccggggcctccgctccaccttcctcatctgggctgccaggcgctgggctgcgttgcctgctcaggctctcccgaaccaccgactccacagccttctccatctcactggcctcatctttgctcagctcctccaggtctaaccgatcggcatccacagtttgtgagacgttgacttcagcaaccagggtcacggaactgccaccagcaccctggaccttcttgacatccacggaaacgctccccggcccaccctgcccctctctggtgagggcggacagctcctccctcatgcgctcgggaagggtttcctccagctgcccgatgacctccaccagctgctgccggggctccttggaggagatgcccttcatggaggtgtggaattcgtggggtattttaatttctttttcaatgactgtgggttcggcatgaaattcaccgcttctagcttgttctttccagtgagtggaacccaggtccccctccagagagggcgctgggacatccaagggcttcacaaccttctcgcccactgcaccgtccttctgtgtcctccttcgagtcccctgcacgatttcatcctgccaagagtacctgatggtggattcctcctcgatgtggatctgcccgtacaccgagccgtcatctctgtcgtgccccccggggtgttcatctggagtggacacaaaataactctgctcgccctctgaatcacctgcctctgtcacttcttccacgtgagtcgtgttctcctggggctgcttggtccttcgatgctgattaactgagaatgtgacatcgctttctccataaccttcctcctccttaaccaacccccaggggcctggcgacacatcttcgacctcctccactttgaatgggacggaaaactcctccggcttctccccgctgacataactcacgggctcctccacgatctccacgttgacgacctttgctctcccctccctccctttcaggccgaggttgatgatgtctcctatcatctgctcggctgacttgcctttcagccccacttccttaatatccttgcttaaaaggtagtccaggccagcttcatcggaaacatcaacatcctcagtcagtttagactccacaactatttcagtctttgttttcctttccccaggaagctctttcctgtccacgtaagtgacttttgtgtctggaaaagaatcagcagatgcttctgtctctggagactgggtgaactgcttcaggatactggtaacgatgttttctgctacggtttctgtcatggaatcgccttgcagagaaccagtggcatcactggtgcccaacctgaaccgtagctctcttgcttctgcctctctaccggtcccaccaccagcatccttcacaggcgtctgcaaacctttcggggacacctctgctcttctgtcctgggatacttctagactaatcggcacctctctctctcgcacgctcttctccttcggtgagtccttctccttagccttctccttcatctgctggctttctctctgtctcgcttccttatctaactttgtcaattcttcccatcttaggtttctctcctcggaagccttctctttagaatcgaacattttctcttctggctttgttcggatggtttctggtctgtttctttcttgctccctcgtggctttcacttctgttttctttcccagaatgacggtcctctcatttgaccgtgtgctttccgaagcacctgctgccaccttgtgtcggcgatcccggtacgactcgcgggcaattgtggaatcttcacctatgtaaacggggacctcccttgtatctccggcttttggtctgtcagggaatgttttcacttgagcctcagtatttcttaaaaggccgtaggttggagagaaagttctgacgttggtttgactgctgacggcttttccgtatgagttttcctgctgggtagtggccgaggaagaatatcccgagcccaagaagcctcttctggcatcacctccaatagatgtgcccgtctgagatccacggtgccctgacaggttagaatacagtgccgagctgtgattgaaacttgccaaaggtgctttctgccttgaaaatagattcctttcattttccctctgtagtagtgagtcggtatagtgataggatttgtttctgaattctgacggcatgttttcaacgtgctcagcccagatcactatctctggattactttctccttccaataaggccaccgtcgaagccacccccaacacagggcctgtggctgcatcctcgcttctgtaggatctggaccaggtcttcacatcggcagtgagagggtttggggcgctgcaggttctggacattgctagggttttcaccatctcatcatcaattatcatccgattattcacaagcacctgctttaccgactctgtgctagccaggggagttggtccccttcttaacctctccaggtttaatctgccacctgtgaaggagacaccactggagatgaccagactttgactcttctgccaaagcggtttccacagcttgctcacaccctccactgccacatgttccacaatccggtaggtcgccacctccagactgaggccggtcttcacctgcaggaggtcctgatagtcccgcagccagtcagccatggccaaggtgagggttgccttctcatcctccaggcagtcaatcactct

SEQ ID NO: 126332 - DNA, 1335 bp, Homo sapiens
atggctgactggctgcgggactatcaggacctcctgcaggtgaagaccggcctcagtctggaggtggcgacctaccgaactccaacagaggagtcgcataattcaattttcatcttcacaagtccctctggctggcgagaggaggctggactgaaaggagacaaggacagcagtgccggcaagagaggagagtcgcatgggctggggaggcagtgcaaggctgagaaacggagggacctgcatgggatggcagcaaggaaggatgaagaggtgctgaagaagaactgcctgcatatcgtcgtggggactccaggccgtatcctagccctggctggaaataagagcctcaacctcaaacacataaaacactttatttcaaatgaatgtgataagacgtttgaacagctcaacatgtgtcgggatgtccagggaatttttcgcatgaccccaccggctaccttgagcaaagagatccgtccagtctgccacaagttcatgcaagatccagtggagatcttcgtggataatgagatgaagttgatgctgcatgggttgcagcagtactacatgaaactgaaggacaaccagaagaactggaagcgctatgaccttctgaatgtccttgagttcaaccaggtgatgatctttttgaagtctgtgcagcggcgcattgcctcagcccagctactgggaatggacattgagcgggtgaacattgcttttaattatgacatgcctgaggattctgacacctacctgcattgggtggccagagccagccggtttggcaccaagagcttggctatcacatttgtgtctgacgagaatgatgccaagatcctcaaagacatgcaggatcgctttgaggtcaatcgtagtgatctgcctgatgagagagacatcttctcctgctttgaaaagacatgggggtgtgtgccacagcaggatgagcccttggaggtgatggcggtttctgtcaaaggcacagttccaggattcggccctgccgagtgggtcactgacaagaaaattcacctggaggccaaattgtctctaataacaagtccaagacatgcattccagctggaatcctcttcccggatgattcttgcccttggaacttgggcaccatgccgtgaggagcccacagccatatggaaaacctacatgttgtttggaccaacaggtccagctaagatctcagcagccagccagcaccaatcaccagacatggttccttctacttttgccatgaccttcgtccactgtgtgttcaggcagtgtggggcaccagagaggctgtggctgaagttctcagatcgtcacatcctgtga

SEQ ID NO: 126333 - DNA, 1479 bp, Homo sapiens
ccgccatacgcgctctccctgtttagttatggcagagaacgatgtggacaatgagctcttggactatgaagatgatgaggtggagacagcagctgggggagatggggctgaggcccctgccaagaaggatgtcaagggctcctatgtctccatccacagctctggctttcgtgacttcctgctcaagccagagttgctccgggccattgtcgactgtggctttgagcatccgtcagaagtccagcatgagtgcatccctcaggccattctgggaatggatgtcctgtgccaggccaagtcgggcatgggaaagacagcagtgtttgtcttggccacactgcaacagctggagccagttactgggcaggtgtctgtgctggtgatgtgtcacactcgggagttggcttttcagatcagcaaggaatatgagcgcttctctaaatacatgcccaatgtcaaggttgctgtttttttttggtggtctgtctatcaagaaggatgaagaggtgctgaagaagaactgcccgcatatcgtcgtggggactccaggccgtatcctagccctggctcgaaataagagcctcaacctcaaacacattaaacactttattttggatgaatgtgataagatgcttgaacagctcgacatgcgtcgggatgtccaggaaatttttcgcatgaccccccacgagaagcaggtcatgatgttcagtgctaccttgagcaaagagatccgtccagtctgccgcaagttcatgcaagatccaatggagatcttcgtggatgatgagacgaagttgacgctgcatgggttgcagcagtactacgtgaaactgaaggacaacgagaagaaccggaagctctttgaccttctggatgtccttgagttcaaccaggtggtgatctttgtgaagtctgtgcagcggtgcattgccttggcccagctactagtggagcagaacttcccagccattgccatccaccgtgggatgccccaggaggagaggctttctcggtatcagcagtttaaagattttcaacgacgaattcttgtggctaccaacctatttggccgaggcatggacatcgagcgggtgaacattgcttttaattatgacatgcctgaggattctgacacctacctgcatcgggtggccagagcaggccggtttggcaccaagggcttggctatcacatttgtgtccgatgagaatgatgccaagatcctcaatgatgtgcaggatcgctttgaggtcaatattagtgagctgcctgatgagatagacatctcctcctacattgaacagacacggtagaagactcgcccattttggaatgtgaccgtctgtccttcaggagaggacaccagggtgggggtgaaggagacactactgcccccacccctgacagcccccaccccatggcttccatcttttgcatcaccaccactcctgaacccccatttttgatttgtcagaa

SEQ ID NO: 126334 - DNA, 580 bp, Homo sapiens
atgatagcaagtccctatgaagtggacccattttctgtcttggttcttaacatcagcctactggggtgtgagattgggactatttggggaacacgcaaaagggggaaccctgaaacagaacccacagtactgccaaattctcatagctgtgaatcccatggagagacagctgtggatgacagacttctctggaatccttctcccaacagtttgcaggccaaaatcctgagcatgatggaagacaataagcagctcgcgctccgcatcgatggggcggtccagtcggccagccaggaggtgaccaacctgcgagccgaactcacggccaccaaccggagactggcggaactgagcggcggcggcggccccggcccgggcccgggagccgcggccagcgcctcggcggcgggggactcggcggcgacgaacatggagaacccccagcttggagcgcaagctgctacacagatctgtgccgcagatcccagcagaacctttgtgtgccatcaactcatcctttctgtgccctcaaataacttaaattctgaaacagacaagctggaaacagaggagtcctctg

SEQ ID NO: 126335 - DNA, 742 bp, Homo sapiens
ggagagcgaggatgcggtcaaagcgctggccaaggagaaggacctgctggagcgtgagaagtgggagctgcggcgccaagccaaggaggccacagaccacgccacggcactgcgctcccagctggacctcaaggacaaccggatgaaggagctggaggccgagctggccatggccaaacagtccttagctacgctgaccaaggacgtccccaagcggcattccctcgccatgccgggcgagacggtgctcaatggcaaccaggagtgggtggtgcaggcggacctcccgctgaccgcagccatccggcagagtcaacagactctctaccactcacacccccctcaccctgcggaccggcaagcggtcagggtgagcccctgccactcccggcagccctctgtcatctccgacgcatctgccgccgaaggcgaccggtcgtccacaccgagcgacatcaactcccctcgacaccggacacactccctctgcaacggcgacagtcccggcccagttcagaagaacctgcacaaccctattgtacagtcactagaggatcttgaagaccaaaaacggaaaaagaagaaagagaagatgggattcggctccatctcccgcgtcttcgccagagggaagcagcggaagtccctcgaccccggcctctttgatggtaccgcccctgattattacatagaggaggacgcggactggtgatacgcgctcccctgcgcctgctgcccgcag

SEQ ID NO: 126336 - DNA, 6422 bp, Homo sapiens
gcgcccgcccgccggggtctcggcgatcgctgctcctcctcctccttctcctcctcttttttctcctccgcctcctccccccgccgcctcgccaccgccgcggctagggctggaggcgccgctgtcattcctgtgccggaggaaccggcgctgccggtgcctgggggtcggggcgcgggcgaagccgggccgcggaggacacaacaggtagagccgggggtgcccggccgcgcgccccccgcgcatcatgcagctctttgtcacctctctcgcccccaggccaaaatcctgagcatgatggaagacaataagcagctcgcgctccgcatcgatggggcggtccagtcggccagccaggaggtgaccaacctgcgagccgaactcacggccaccaaccggagactggcggaactgagcggcggcggcggccccggcccgggcccgggagccgcggccagcgcctcggcggcgggggactcggcggcgacgaacatggagaacccccagcttggagcgcaagtgctcctgcgggaagaagtgtcgcggctccaggaggaagttcaccttctccggcagatgaaggagatgttggcgaaggacctggaggagtcgcagggcggcaagtcctctgaggtcctctcggccaccgagctcagggtccagctggcccagaaggagcaggagctagccagagccaaagaagccttgcaggccatgaaagctgatcggaagcgcttaaagggcgagaagacagacctggtgagccagatgcagcagctgtatgccacactggagagccgcgaggagcagctccgagacttcatccgcaactatgagcagcaccgcaaggagagcgaggatgcggtcaaagcgctggccaaggagaaggacctgctggagcgtgagaagtgggagctgcggcgccaagccaaggaggccacagaccacgccacggcactgcgctcccagctggacctcaaggacaaccggatgaaggagctggaggccgagctggccatggccaaacagtccttagctacgctgaccaaggacgtccccaagcggcattccctcgccatgccgggcgagacggtgctcaatggcaaccaggagtgggtggtgcaggcggacctcccgctgaccgcagccatccggcagagtcaacagactctctaccactcacacccccctcaccctgcggaccggcaagcggtcagggtgagcccctgccactcccggcagccctctgtcatctccgacgcatctgccgccgaaggcgaccggtcgtccacaccgagcgacatcaactcccctcgacaccggacacactccctctgcaacgtaaggccagcagcagcggggcctgggcccctgggccctgcccagaaactgcaggggcgggggtggcggggtgaagccatactcgctgtttcctctcgtccacccagggagcactctggcgaatgcatttcctgttctgttctttccttttgcaagaagcgatggatgtggggagaaaaaggaatgaggcccgtttgctccttgtgtccgggagggtgaggagaatccagaggaagcgggcctgggtcggccgcaggcacagcctggaactctgccccagtgggccctgtctgggaccgtgggcttctcctcccacacattaccttccagagctcagggcctccccagcacctcctcatttccctttagagccagctctctatcctgacccaggagtcttggcatgaattgcctctggagaggcttgtgaatatggtctaagtttgtttcctttgtttatttcatcaaacactttttgattgcatactgggcaccagctcccaggaggcaaaggccctagctgcctagctcttgatgactagtggggcagacagatgggctctgcaacagtgtgggagtaaattgaaggtgggttgagcttctgaggacagttggaagccatgtcgaggctctaacatgaaatattggggtctgggtgtggggaccaccttgaatttttgttttatcacacagttggtaatgcagaggctcccctctgccatatcctgaagacagacatcatagggttagatcctcaaatgcacgagacggctttttccaaaactcagttaatgtcactttattaaccagcgaaatagataataaaaaagaaatgaggtgaacacattggacaaaaccattacttgccagtgacatgattctctacctggagaactcaagagaataacttgaaaagctattagaatgaataataagcatgtacataacagtgttgcttggaaatcagtgtgtaaaaatcaatcactttcctatagatgagtcgtaattatggaaccatttttttcaatccacaataatgaaaagtgcttataaaaatagctaagagtaaacttcagagaagctgcctcagtctgctcaggtgggcggcagagattgctggcccggggactttagatggcctcctcagagtaggaaggtcatttgcagcctggggccctgctcaggcctgggattctcttttttattgttttattttatttatttgtatgtgtgtgtgatggagtttcactcttgtcacccaggatggagtgcagtgacgcagtctcagctcactgcaaccaacaccttccaggctcaaacaattctcctgcctcagcctcccgagcagctggcattacagatgcctgccatcacacccggctaatttttgtatttttagtagagatgagatttcaccatgttggccaggctggtcttcaactcctgacctcaggcgatctgcccacctcagtctcccaaagtgctgggattatagacatgagccactgcacctggcgggattctctgttttatactggtgctttgaggaagcagtatgttcttctcttgtccccagaagagaatcctagtgacaaagtctatcttgactaacagaaccaaggcaaggaaggtgggccactggaggggtctctgacatccattccctgatcctgaaggaccactgtggagttatacctacagccagcagtgtccctgcaccattctcatcccagttgagaataccttccccccacggccatattttgtcttctcgtggtgggcccatggggactctggcagcagaaatgctgctggaaaaaccccattctgcagaaggagttctccaaaggcctcttgaattgcatttgacccagccctagtcttttgcccaccatagccttggcacattcctgctgccaggaaatgggtgctttgataagccagttgtctgcatacaggcgtttcagtgagcaggccccattctctttacccatagatttggcaaagatgttcctatccagagtggaactatcttagctgccttcagaatggattctgtttgcaaaccttgagactaaagactaaactaccattcattaattccctcacttcctcaaccctttttatccccccatctcaacaggtgtgcatgcaggtaagccaggaagagcccaaaaatagctacaggtaaccctttgccttgggcatctgacgtccaccagcaagaatagtgcagcctggactaatgactgcctcatcctctcacactctggccactaatttagagcaaaagtaggaactcagcatagagaggttggagaaggttgacggaccttggcattatgcttgcaattccagaaataaccaccaggagtctccctagtaatgactgttttgatccaaaggatctgtgggctccagacagggcagactgattctgggatgtagtgaaggcttttgtacacctgtaggctattaagggttccctccacacccacgtaaggcagggctggcaacacaatggaaatgtcctacctgcccatcctagggacctgtcgtctgaggctccctaggaaaaagggaaggagttcagacccctcctggggcagcccaaagctcaggaccaagtatgcagttaccctggagctcctgcctggaaggagcactgtgccaggaggaatctgacagcccccaattggagctgtagctctgcatccaattagctccacggtagtggactgtctgctgcctctcttgatatctgtgaatagggctaacgagtcctgcctgcccctgcgcaaactaagagattcattgtgtcggttgtgggggaagctagaggctacgtggtctcccaagtttgtttctgtcccaaaattctctattttgtgctttttctataaaagtacatttctttatgaaaagcaccaagtctaaccaagctctagctctaactcagaggacagactgggacaggaacttagacgccctggagtggctaatttgttggtcagaagatgctgggggttgagaggccagactgggcaggagaggaccccaggaactctagggaaactccaggccccatcaataagccatctgggggtatctgcttcaggagatggggggtgggctccccactgcagaggcagggtggccccctgagagatggcatccttccacggaaggccccacaccgcacgggccgcctctgctctcctgtgtcacctgtctctgctgtttcatcttcctcttctcctctggctacagggcgacagtcccggcccagttcagaagaacctgcacaaccctattgtacagtcactagaggatcttgaagaccaaaaacggaaaaagaagaaagagaagatgggattcggctccatctcccgcgtcttcgccagagggaagcagcggaagtccctcgaccccggcctctttgatggtaccgcccctgattattacatagaggaggacgcggactggtgatacgcgctcccctgcgcctgctgcccgcaggcgtgtctgtgcgtgtgggcgtgtgtgcaagcgagcgtgggtgcgcgtgtggccgtgcgtggggtgcgtgtgcacgtgtgcgctggcacacatgggtgctgggtgtggccgagcgcctctaacaaagcgaaaacacgagtgtgaacctctctcccctgcgtcgcaacctctgtaaattgatgtacataccgcaaaccgtgtgtgaacctgtcaacttctctgtccgtctttggagcgatacagttgtgttgttaatctggtttattatttttcttcagtgtttggtttttctttttctttttgtttggttcgtcggtttgtttttgtttttgtttttttccccctttctcctcccctcctcctttttatgaaacttgaaaaacttgaaggactgctgtgtaatttggtaaattaaccaaaacttatttgtcactctgtgctttgtaaatgtccctcgtccaaaccgctactccttggagccccgtctggcagaggatgaggtctgtttttgatgtcccccctcccgcccccctggtgtgaacgtgagggagcagaccctgtcctgggggtgcgcccacgtcactttaaccacaaaacgccatcgtcgtcagggtaagctctgctctctacaaagactcgcgagccgggccaaggggccttgtcttggctgggtttgtcagaggtcaaaccggctcttttaaacggcctaccagtttttaaattgcattgccgtttctttctttatgaaaaaaaagaaaaaaagaacattgtttcatttaatttatttgcacaaatgctgaaaacttattctatctaaattattacataaatattggaatgtctatttttccatggggtgggcgggaggtggatgtctctgttgacttgtctgttctggaaccatgctgctacccaactgtgcaaagtagtttagggcggccagaacccatggaccattggatttcaaagcttgctttttctgttggttcttctctctccttctctctctgtctctcccattctcctgcccatgcatgaaaggatcctccaccttcttcccacccagagctccctccagggcctttctctatatatttatttatctgacatacagaacacgactttagtgaggcagagtgctggacagtcatgggtccccttctttggggtctgtcttttgaggagaggttgagttcaggggcaagacaggcctggccacacattccaaggggtacggaccagtgggaccctggcctgagtctgttctccgaggggcctccagcagcttctgttcctccctgcagctgtgtctttcttgtcctggggtttaggatgcaggtgggccaggcaggtgttgttaggggaggcacccactttcaaaaggagggccacagtggggacacagagtccagcacctgagccctccaccctccccattctgagtggattcatcagccacacttataatctgtcaggatcccttggactccgtcccccaacttgtcacagcagcctgagcctacccaccccatgagacaagagctggcaggaacatctgccta

SEQ ID NO: 126337 - DNA, 4074 bp, Homo sapiens
tcagtcagaatggaaacagccatgcccttcgcgaatcccgtcgcggcctctgggaaccgagctcctcgtcttccttcctggagggcctccttggtaggcaaaatgggtctggacgggcccgattcggggctgtgtttttcctcccaggcgaatcccagagctggtttctgggtggctgtgcaatgccaggaagccgacggcatctttcgggccttggcatggagccaggctgggagcggatgaaagcgccccgcaggagccggcagagctgtctggttggaggaaagtttctgcacgatgggaatgaccctggagttctggggaacttggtgagatcaggaccttcccccagcagtgccccccaggtgcctgacgtactgttgtgctgttggtggtattattaccacctcgggccatgcgatgacccttttgcttataagtcattacgggctgctgaatgaccgatgagatgcagccgggaggctctggccggctccggaatgataatggccggcgggtgctttgtatgcgcgaccagcaggcctctgtgccgggcactgtggcgctgccgttggggccggcagacctgcggtcctgcctctccaagcagggcagggagtgggaatgccggacaaaatccgagtgtgaatttctaacagctctactgagatgtgattcacacagcacgccacccagccacggaagcacgcagctcgaggggcctttgccgtattcgcagggctgtgcgaacgtcttcactgtcgatttttgttgttgctcttccccaagccacacggtgtgagaacggcttctgcgcgtgtgcctggcattggggtcagcagggactgcagatgatgtaaagttacaccctgtttcatgtgcggacaccgcacgctccacaccagggacctcagcaccctccacatcagggacctcagcacccttcacaccagggacctcagcaccctccacaccagggacctcagcaccctccacaccagggacctcagcaccctccacaccagggacctcagcaccctccacaccggggacctcagcaccctccacaccggggacctcagcatcctccaagccggggacctcagcaccctccaagccacggatctcagcaccctccacatcggggacctcagcaccctccaagccggggaccttagcaccctccaagccagggacctcagcaccatctaagccagggacctcagcaccctccacaccagggacctcagcatcctccaagccagggacctcagcaccctccacacctgggacctcagcaccctccaagccagggacctcagcaccctccacgtcggggacctcagcaccctccaagccggggacctcagcaccctccaagccacggacctcagcaccctccacacctgggacctcagcaccctccaagccagggacctcagcaccctccacatcggggacctcagcaccctccaagcgggggaccttagcaccctccaagccagggacctcagcaccctctaagccagggacctcagcaccctccacacctgggacctcagcaccctccaagccagggacctcagcaccctccacaccagggacctcagcatcctccaagccagggacctcagcaccctccacacctgggacctcagcaccctccaagccagggacctcagcatcctccaagccagggacctcagcaccctctacgccggggacctcagcaccctccaagccggggacctcagcaccctccacacctgggacctcagcaccctccacaccggggacctcagcaccctccacgccggggacctcagcatcctccaagccagggacctcagcaccctccacacctgggacctcagcaccctccacacctgggacctcagcaccctccacaccggggacctcagcaccctccacgccggggacctcagcatcctccaagccggggacctcagcaccctccacacctgggacctcagcaccctccaagccagggacctcagcaccctccacgccagggacctcagcatcctccaagccagggacctcagcaccctccacacctgggacctcagcaccctccaagccggggacctcagcaccctccaagccagggacctcagcaccctccacgccggggacctcagcaccctccaagccacggatctcagcaccctccacaccggggacctcagcaccctccaagccagggacctcagcaccctccaagccagggacctcagcaccctccacaccagggacctcagcaccctccacatcagggacctcagcaccctccacaccagggacctcagcaccctccacaccagggacctcagcaccctccaagccagggacctcagcaccctccaagccgtggacctcagcatcctccacaccggggacctcagcaccctccacgccagggacctcagcaccctccaagccagggacctcagcaccctccacacctgggacctcagcaccctccacgccggggacctcagcaccctccaagccggggacctcagcaccctccacacctgggacctcagcatcctccaagccagggacctcagcaccctccacgcctgggacctcagcaccctccacaccggggacctcagcaccctccacacctgggacctcagcaccctccaagccagggacctcagcaccctccacacctgggacctcagcatcctccaagccggggacctcagcaccctccacacctgggacctcagcatcctccaagccagggacctcagcaccctccaagccagggacctcagcaccctccaagccagggacctcagcaccctccaagccagggacctcagcatcctccacgccggggacctcagcaccctccaagccggggacctcagcaccctccacgcctgggacctcagcaccctccacgccggggacctcagcaccctccaagccggggacctcagcaccctccaagccggggacctcagcaccctccacaccggggacctcagcatcctccacaccggggacctcagcaccctccacacctgggacctcagcaccctccaagccggggacctcagcaccctccaagccggggacctcagcaccctccacaccggggacctcagcaccctccacaccggggacctcagcaccctccaagccggggacctcagcaccctccacaccggggacctcagcaccctccaagccggggacctcagcatcctccacacctgggacctcagcaccctccaagccggggacctcagcaccctccacaccagggacctcagcaccctccaagccggggacctcagcaccctccacacctgggacctcagcaccctccaagccggggacctcagcaccctccacgccggggacctcagcaccctccaagccggggacctcagcaccctccaagccggggacctcagcaccctccaagccggggacctcagcaccctccaagccggggacctcagcacccgcggaccctggtgtcctctgtgacgggacaatgtcacctatcgggtggtgcccgctcctctcccggggcccagccacatgggtgccaggagccccaaccccgacttctctggaggggccgtaactccaaccagcaaaggcctttcttactggaagctgcggcgtcttgctgtgacctcgaaacccccggcaagggtcacggcggggtgagggctgcaggcctttgctcccgagttccccgtgggccttgggaacagacgccttggaagcaaattccgggaactcccagctcccgggctcaggggtgagaggggggtctccagggggtctcgacagcatagcccgggttttcttcacccctccctgtgcaccaggaccgcacagagctgccagggagctgcagatgcccccagagaatcgtccttgtgcccggtagcacccaaagggtttgttattctggggcccgagggcacagccagaacgggtcctgagggcccgacggggagttctcgaccgtgtcccggccaaacccagcgcctccagacaccagcaaaacagccacat

SEQ ID NO: 126338 - DNA, 600 bp, Homo sapiens
atgtccggcaaaggcaggatcaggccgtgccacgcggccgccggcctcaccccagtgccctccacgctgggcggcaaggagggcggccgcgagcccacccggacccccgagcggcaggggcagcccgtcgtgccaccaggcgtcagcaggcttcagtcagaatggaaacagccatgcccttcgcgaatcccgtcgcggcctctgggaaccgagctcctcgtcttccttcctggagggcctccttggaacccaaattcgaaagacagccgcatctacaattttaacacggtggcctggagagcattgcctctgatctcagccgaacagaatgccctgttcagccccaaaaggggaaatggcattggtgatccaccctggattctgataggctggaaaagcccctctggtcttcctgggacagaagcggccttaggagcaggttatcggtgtgggctgagattcggggacccgctggtctgctgtggcgttgggccacagtcagaggaccatcaagtccggggtgtcatggacccggggtcctggcctgctgtctggaccccagtcttgcctccccaacccaggacggaggacctttcttga

SEQ ID NO: 126339 - DNA, 763 bp, Homo sapiens
aacctcgtctttattaaataacaaaataagccagccttggttgcgcgcctttagtcccgactactcggagctggagcaagagaatcgttgaatcccagagaccgaagttgcagtcagccgagactggctccactgttatggaagccttacctgggcatgccccccgctgacaactgtgaaaagccatggaacagccccgccccatcccctgctgcatgagccctcacctacctctgaccttcctccttccatgaccctgctgccaggggggcttcccaaaaaagatcttgagtcttagcgatgtggtcgacacgcagagaacttggagcctcatgccagggccccctcccggagattcctggcgcccatgtctccttggggggtgactgaaggggatgggtccagactcacttgatcaacaggacatgggcctgcagcttcctgatggaatgcgcacacagctccctgctgacgaagtcaatgctgttctctgcctgcagagacaaaaacatggtgaattctcgtcacaaggcacaggcactctcgtgggcacgaaacccatctctgttggggtggctaagtcctggcgagggcaccttagccacccaccctgggtctgagcccaggaccccacatcactgcctcatcgaaggctctttagcccctggtggccagagactcctgccctctccaagtctgttctcccttcttcctgggctcgtggctacccagcctgactccatttcccatactcctttgccac

SEQ ID NO: 126340 - DNA, 416 bp, Homo sapiens
tcccgggacgacgatttcgtggggactgctggagttgcggggcctgcctgttttatttttgggcaggacagcttggagatagggcccggagttgcgggcgtcactctgctcctgcgacctaaccaggcgtgagggagtgacagcagcgcattcgcgggacgagagcgatgagtgagaacgccgcaccaggtctgatttcagaactgaagctggctgtgccctggggccacatcgcagccaaagcctggggctccctgcagggccctccagttctctgcctgcacggctggctggacaatgccagcttccttcgacagactcattccctcttcttcccgcaagacttttattaacgttgccatgggattttcggaggtcattgggcttttgtcccattaacagcccaggtgacccag

SEQ ID NO: 126341 - DNA, 1128 bp, Homo sapiens
gaactatgccttaaaagaagggtatgatttcaatggtaaaggcaaaggggaactgtgttctgggctgaaggagcagtgtaagcaaagatacagaagtgtgaaaactgggggcaggtgcatagaatgagcagcccaaggctccctgcagggccctccagttctctgcctgcacggctggctggacaatgccagctccttcgacagactcatccctcttctcccgcaaggtgtgaggctggggctgaagggaaggccagggggaaagtgggcaggaaggtgaggggggggtgtcccatattacctccagacttttgtgagtgagatccgaagagttgtggcaggtaagaaacagagtgtgtattttcggcggtgtggggggtgctctagggcaccccctcttgggtggagtggggaggggagggcctcccaggagccctcgcacgtgttcagcctgaagcagctgctgcagaggtgggtgcccggtgtggacggggagctggtggggtccaggggaggacatcccgtgagacgaaccacgaaggtggccacaggtaagggactctactgtccaaggccattttatatttgtcactattcttaccgaggatgtcttccctttataaagtgctgagtgaggcagggggtcagaaaccccgccaaggtttgcctgttagcgtctttgtcgttgcaggcccatgtcctgttgatcaagtaagtctggacccatccccttcagccacccgccaaggagacatgggcgccaggaatcttcatgatagacacgatgaaatccaccctcaaagaggtaagacggggctcaggcagctggtgtccagccactgtcgcccactctggtcccacctccgggaacactgaccctggggcctctgcaggtttcttggcattgtcacaaagggaagaagcccacctgtggctggccggctgccaggtcagagccaaggcaggcaaggccttcctgtctggcttttttttttttttttttgagatcgtggccagtatcatcagctccttcttacagtgcacacacatgctcccagcccagctgtagctctgggcctggaactatgaagacctagtgctcccagactcaacactgggactctgagt

SEQ ID NO: 126342 - DNA, 600 bp, Homo sapiens
  misc_feature (1)...(600): n = a,t,c or g
atgtcctgttgatcaaagcagtccacggatattttgattcaagacagaattactctgagaaggagtccctgtcgttcatgatagacacgatgaaatccaccctcaaagagcagttccagtttgtggaagtcccaggcaatccactgtgtccacatgagcgaaccccaagcaccgtggccagtatcatcagctccttctttacagcgcnacaacaccatgctcccccagcccagctgtagctctgggcctggaactatgaagacctagtgctcccagactcaacactgggactcttgagttcctgagccccacaacaaggccagggatggtggggacaggcctcactagtcttgaggcccagcctaggatggtagtcaggggaaggagcgagattccaacttcaacatctgtgacctcaagggggagacagagtctgggttccagggctgctttctcctggctaataataaatatccagccagctggaggaaggaagggcgggctgggcccacctagcctttccctgctgcccaactggatggagaatacaagaaccttttattctcactgcttttgaggctttttcgttgccagcaaggg

SEQ ID NO: 126343 - DNA, 622 bp, Homo sapiens
ccttttttggaacgccccggtccggaattcccgggtcgacccacgcgtccgctggaaccctctgggcagcctagctgaatgcaggatccccctcgccccagagaactccttttccaggagaccaaggtgggtcccagaatctgcaagttcagtaatagccccaggtgattctcatgcaggcaggtgagacctgcactttgagatccaggtgctactcgaagccctgcgggggctttgttcactgtacccaaagcatcgtgaaggttccttgaaggtacatccagggcatctgtgctggatgcccaccgtgacccggcctggcactccaccttcacaggccagcacaggagcccaagagctcccgggaggagaaaaaaagacctgccgctgggagaagaaaaaaaagacctttcccgggtctgcaggactcacaggtaaatccattgagagacttacccggccagccttgtacttgagaccgctgctgttctcctcctttcctgtccgcgtgacgctggaggccctgccagggggcgttccaaaacgctcagcctcccggatgcctgtggagatgaagagaggaccattttgagtcagcaggggaggctcagtcagcacgaaa

SEQ ID NO: 126344 - DNA, 1303 bp, Homo sapiens
  misc_feature (1)...(1303): n = a,t,c or g
agctggccggggnnnaattgaaatcgatagccntatgcagngngcnggaattccatccctgttcagtgacgtcaagcttttgggtccctgtcctggggccctccacgctggccgggctgtgtagagacgcccttctctccactttattgggtccagattgttgtgtggcttctcccctcctctgcagcctggggtctgaaaacagcgatgccaacagacagacagatttccaaaagaaaggtccggctcagccaaggacaaaggggcctcgcagaggctcctgggggtcagaaagctgagagtctaaccaggcaggtgccttctccacccacaggcacaagctacaacagctttccaagaagtgcatccacatcgtccccaggtccagatgcccacatcgccctgcagggaccaagaccaccatcgggcttgcttgaacaggatgtagctggtcactgttctggagctggcccctctgtagcctgtgacaatcagcttgagtctctctgccaagtctccgccttctgttcttcttgccgaccttgaagcagagttgacgtttcaggtttttccagcagacaaagctcactcaatctgatactgtggaggttgttaatttaacaaccaacccatcctcatgttgagaaaccagctccaaatgctcacctggctgtcagggatggggagcctcatgggtgaaagagggttgtgatggcataatttaaaccaaaagaggcattcgcggttgcccgtgttgcctcaggcctgctggcctcctgctgtgaacattttgggcaataccgtctctgccagtgacccccaattgtccacttgtctccagcaagatcgaaccatgtaagtgccatttctgacaagttgggtgaacgttggtttcaaatcatcagctctgcattcaagtgccctgctacaattctggctcactctgtgggaataactgcctgcctgggcacgttgctgttgctgcctcccaaacggcagtttctggggtcccaggtcatccaggctggatgtggcttgggagagacctgtggcaccaggttggagggaggtctcacctctcctttctgagctgtggactgcagcttcaggaccctatggatgaggccgaatgtcatgaagataatggaatttggagtctcaacaaagccaagccacatgccagagattcaccacctggggcccaggatcagaagtgtgcccttaggaggccaaacatccacctgtctaccaactagacatttggtctcagacagcaagaaaggctgcgtttatgtcattaggg

SEQ ID NO: 126345 - DNA, 1614 bp, Homo sapiens
atgccatttgagcagcaagtaccagggtgctccaaactcttcggaggaataagaaaagttattccagaaggaaggtctgaggtacaagaagacatgatgaacaaagaaattggtaaacatgaaggatgccgtgtttcagtgcctgttccaatccctatagaatttggagtcctgtgcctgatccaaaagacttccctgcaagccatgccggtccgtgggagccgggcaccagcactggctgccggcctgcaccccggcctgacagccctgtcacctggcaggaagcatggcctgcacttgtgtgttgcagactcggacagccagtgcagccccacgcggcagagcctcagcctgtcggaaggcgaggagcagatggaccggctgcagcaggtggagctggtgaggaccacccctatgtcccactggaaggcgggcaccgtccaggcctggctggaggtggtgatggccatgcctatgtacgtcaaggcctgcacggagaacgtgaagagcgggaaggtgctgctgagcctgagtgacgaggacctgcagctgggccttggggtgtgcagctccctgcaccggcgcaagctgcgcctggccatcgaggactaccgtgatgccgaggcaggccgcagcctgtccaaagctgccgagctggaccatcactgggtggccaaggcctggctgaatgacattggcctgtcccagtactcccaggcctttcagaaccacctggttgatgggcggatgctgaattccctgatgaagcgagacctggagaagcacctgaacgtgtccaagaagttccaccaggtcagcatcctgctggggatcgagctgctgtaccaagtgaacttcagcagggaggccctccaggagcgccgggcccgctgcgagacgcagaacattgaccccgtggtgtggaccaaccagcgggtgctcaagtgggttcgagacatcgacctgaaggagtacgcagacaacctgaccaacagcggcgtccatggtgctgtgctggtgctggagcccacattcaatgccgaggccatggccactgccctgggcatccccagtgggaagcacatcctccggagacacctggcagaggagatgagcgccgtcttccacccagccaactccacaggcatccgggaggctgaagcgttttgggaccgccccctggcaagggcctccagcgtcacgcgggcaggaaaggaggagaacagcagcggtctcaagtacaaggctggccggctgcccctggggaagataggaaggggcttcagcagcaaagatcccgatttccatgatgactatggctctcttcaaaacgaagattgcggagacgatgacccccagagcaggctggaacagtgccgtctggaaggctacaacagcctggaggtcaccaacgtgtcggcaagaagaacagaaggcggagacttggcagagagactcaagctgattgtcacaggctacagaggggccagctccagaacagtgaccagctacatcctgtccaagcagcccgagtgtggtcttggtccctgcagggcaatgtgggcatctggacctggggacgatgtggatgcacttcttggaaagctgttgtag

SEQ ID NO: 126346 - DNA, 1374 bp, Homo sapiens
atggaatactatgcagtcataaaaaaggatgagttcatgtcctttgcagggacatggatgaagctggaaaccatcattctcagcaaactaacacaggaaccagaaacccacccccctcatgttctcactcataagtgggagctgaacaatgagaacacatgggcacagggaggggaacatcacacactgaggcctttcagggagtgggggcccaggggagtgatagcattaggagaaatatctaatgtagatgatgggttgatgggtgcagcaaagagaggtggagaaaacaggagaagggataactacgacttttgtcctcaaataccaggaaaactacctgtgaatacgggacctttcatgacaaagggactttgcagatgtgattcagttaaggatctgtggatgggaagcttatctggacacagccagtgtaatcataagagtccttataataaaggggcaggagagtttacagcagagagaaggcgaggtggcagtagcagcaggggtcggagtaatgccattgctgaagagggctggaaagttattttgctgcctaaacagtttaaagcagtggttctaaacctctttcagcaattaggcaaggacattagtgacagaggggcatccactgaaaaagacagagcaatactcgaacagcaaagaggaagccacttagacattcttgtttcttcaaatatcagaagcttccacatcatagcaggagggctagggatggacttcacctcccaaaagctgttggcatttggaccaaacaaggctccccggacttctggcatcatctgctggcctgagatccagtcggcttttcagggtgttggaaacctttattttacaatccccattgtggatctcaactccaccaactatgtcctcaggcagaaaagctccaatattcacttagatactgcagaaggaaaagagaggctgaaagggttggatcaaggaagtaggaaagggaatttctggggcatttccttcccccaatcccagaatagccacagaaatcacagtcaccaagagctgctgcttctgaataacatgacagtgatgggggtagggccaccccctgtatcgtacctagcagaggttggagctggcatatcaggaggaggttctaatcattatttgtggctgggaaacttatttattgatagcatggggcagaggaaggaggcggggatggggttgtggctccctggtgatgcgactcctgtttattttgcccttcattttggaataaatggatttagccatactgctcagcctgagtgccagctgccctgcaggctcctcgaggctgagttcatggccctgcccctagtggccagagccggcttcacaggataa

SEQ ID NO: 126347 - DNA, 670 bp, Homo sapiens
tcactaagcctgcggtgctggaagtgattaccccaacgcaggttcgtctgaccatcagcgaggggcgttatcatcaggtgaaacgcatgttcgccgccgtgggtaaccacgtggttgagctgcatcgtgaacgtattggcggtattacgctggatgctgatttaacccccggtgaatatcgtccgttaactgaagaagaaattgccagcgtcgcctaacttttcaatgactttcaggagcccgttgtgaccacccgacagcattcgtcgtgtgctatagattttatccttggcctgctggacatgttgatgccgctgtccattgatatgtatgtgcccgcgctaccgatagtttcatcgcagtttggcgtaccttgctcaagggcacgattatcatcttgcatgagtcttcgatccatgataacttcaatctgacctcccaaaagctgtgggcattcgtaccaaacaaggctccccggacttctggcatcatctgctggcctgagatccagtctgcttttcagggtggtggaaacctttattttacaatccccattgtggatcgtaactccaccaactatgttctcaggcaggtacgactcctgggcaattgagacattaacaatcgtgtgtggtgcggatcttgtacatagagactgtctttgcaccat

SEQ ID NO: 126348 - DNA, 4106 bp, Homo sapiens
tcttactgtactggtaaaagaaaaaaagaaaaaacccacagaatcacagaattcatgttctcacagtagccagaagctaaaataatgtgcttctttattgcacgtcaaaccaagaaaggtataaaagccaatgattctcaatccaaatgtgaaagtcaggttcacctcaactggattcggaatgtgctgatttccattggactcaagttgatctcacttatattctgagtgccgggaggtgaatgcatcaaggatagtgatgaaggtgtgagactttcgacaataaacttgtttaaaagtttctgtaccaatatctttccctgagtagtagaacaaaacagccctgtgcctttgctagagaaccgacaatcaaacccttttctgtggaggatcaaggctgcctcattggagtgcccattgcccacctttgactgtattgttctcaaattaaccagatgaatgtcacaaggcaaagatgactgtaatggagagaattcaccttgcagctcaagggtaggtgaggagaacttatttgccattggaatgactggatgattcatgagagaagaagttatgtggctaaggagagaaggataactgaccgacttcttttcttcttccgtattaacagcacttcttttttctagtagtattcgaaatagattagctgtaatcttgttatcctggataccttgctcaaggccacgattatcatcttgcatgagtcttcgatccatgataacttcaatctgaccactattcaaactcgaaacccctaaagactgagcagagagcagtgtcaaacgatgtttggcatcctggatataggccattgtggtcatgggatagacatttgcttgaagaggcaatttgctcagtgtcattctaggttgaatctggtacccatttaggtcagtataaaatctattttggctttttatatcagaagaaattttcattgcaatctcacggttatatacttttcggatgtccacaatattggaaacttccacagactgtccttctattccctgtatgtggtatagtcggactctatgagtaacatggtcaaaaaagcaagtcacttccgaataaatccttccatgtgtcactctgacaaagggcggtgttgtgtaaacataaggcttggcattaccatcaggtaagaagaggtaggcaccacttttgtctcttttaattgtggttccataccatgaaaattgcacatttacttcatggtgtttaccatcttctttagtcatcatttgcttcataagtccagtttgatcaaaccgaagtaaaacaaaggagttctctagtgttataccttcttcagtatttatcatattctttatggtgaaaattccgctatcttctactttattcttatacaagacataatcagctaaatgtgaatttgaacttgctgattccaaaatcttatacactttcagtcccaatggcggtatatgtgctcgaaaagagatctcataggctgtttctgaaatagtatttgctgtatcccaaactgcgctgacttgaacttccacaggttttcctgaagcagagaacacttgcactgtcggggaactcacatagactgagaccaacgagattcggtcttgttctaaaggattatagaccacaaggtaccttggctccgcactcagccttattatatttttttgtggcagagaatcttgtgatttttgtttcaaatccatctccaggaaggtatcaggagagtaagagtcgtatgtgagtttgtccttcaaaataagaagaaatgcagaatttccaattatcttctccaaaaccattaacgaatgaaaaagtctggtaccataatccacaaccacccagtcttttgcagttcctgtgatagcatcatgatgttgaaacagtcccaaattccttctggcttctgtcagtgccgtgtaaagtgatgatgagagaaatttatttatcttgtatttgtgagcttgtctcagggcgaaatagtaaagaatttcagcagcccttaaatgagattccatgattctgtccattcgtttgtaaaagggtctggatgtaaaatagccactccagtaatgatcatctcgatcggcataagtgaaaaaatctccacttaaaacagggaacatcgactggcccttgtctctctgagtttcatctgctttatccagcgcatcaaaaaaatctgataaagttccaaactgtatcttaactttaaacttggactgagaattcatataatcaaaaagctgctgataattcttaaactgtaaatcccattccgtgtattcacagtagcggaaatcatctcctagtggagccaggagaactttggtacgaaaaagctttgacttctttcggtactgatctagtagcatccgagccctgctttggacatttccaggatgtattgtttctggggggactccccagggacaaccaaatctgcctccaggaagacgtttaaaatcaaactggcagcatattttaggatcaggtccacaagtgtgagggatgtcatagctgtagaagggcatcatgtggcataaaatatctgtgacagatcccagatcccaattctgtctccaaaaaaactccaatgttttatgcagtgcaaagtgttttttaactgcataatgaactctctggataagcatgtgagaaagtccagcacggtttagaagataagccattgttggtgagtgtccaaagggatcaatagcccagccggaccgaggtttcactcctatattattttccagccactgatgtccttcaattagttgatcaattaaggcaaaataatgtggagtagcttcatcaggcataacccagccacctgtcacaatttcaagctgaccattttctattaaacttttaacagcatccttcttctgaatatctataatatcccaccactttgaaaggtaagagatctcagaccaaataaacttcctccgtgagtcttctttcagctttaggaccatgttattaaaaatatactgagtcttgtctctaaagtagtcattgaaagtcttcaaccaacctgggtcgttatgggaatgaggcaccacaaagacttgaaggggttcagtgtcccattcattagattcataagtaatgtcaaatccttgcttccaaactccaccatctggattgtcaaaagaaattagactgtaaacatccaacatctgcacatctgaattgtgacttccactttgtgaagcaaacagacagtctgcagtgtcaactgagagggataattgtgagggcagaagatgtgagccagcaccttggctgaaattgctttgtgaacttttcggaccatcctccacagactcactcaaattgatgactgagtctctaatatttgagatgatctcattattctcagctagcaaacgctccaaatggtctattttttcttgcaacattgagagctggccctgagggaaggagccctcgcggcgcgggttcctggggtagtctaagtgaccccggtccagcatcaggtagagcgagaaaatcaccacacagaagatcgcactgccgaacacggtgaactggcggcttaacttcattttcctcgatagactcggggccaggacactctcctcagccaaaggagacagcgcactgtggactctaggaagcagccgccggaggctcccttctcccgggctgcgcgacctccgcgctctcggatgcgggtgcgagtccccgccttgctccgcacctagtctccggcgccacaaaacgcccttggccttcgccctggcctgccgccctccccggggtcgggcgcccctctcgaggcgagactcgccggcaactgggaaggggggcccccacaaacttgatcgcaagctcagcgccgacctccggcagggcgcgcggggcaggcggaggagaggtcgctgcccgcacttcctgccaccgccgccccaactgagtcggcaggaaaagttttctcgacgagggcaggcgtgtcctcctcacccaggggaggcgcgggttcggcagctcccgggccggggccgcgcagctaggtcagagaagcggaggggaaaggaacaagatcgcgaggagcc

SEQ ID NO: 126349 - DNA, 3912 bp, Homo sapiens
atggctgcgactcgcggcgaggagaaaatctgcatgagcatgtatcaacgcattaatggcgctgactggcgcaatattttcgtcgtcggcgatctgcatgggtgctacacgctgctgatgaatgaactcgaaaaggtttcgttcgaccctgcgtgtgatttgctgatttcggttggagaccttgttgaccgcggcgcggaaaacgtcgagtgcctggagctgattactatgccttggttccgggctgtgcgaggtaaccatgagcagatgatgattgatgggctatcggagtatggaaacgttaaccactggctggaaaacggcggcgtgtggttcttcagtcttgattatgaaaaagaggtgctggctaaggctgggtaccaagatgattttgcgttctgcgagagacttaagcgcgtccgatacatgcgtatcgctcaggcccgtaagctcggcaataaccgtatttgtcacgcggtcctgtttcttgttcccagccgtagcatcgatgtaaccatcgtcatcagcggtcctacctgctccggcatgaggcgaaacaatgacgctatgccctcgcttaccggggatcctctagagtcgacaaccgttaatcccgactgtccgcgcagagtctttacaacgttcatggcgcccaactgttttaccgacaagaaaaaaaagcctgccagtagtgccttggtggtcggtgcacaagtcgcacccaaccggcttattctttacgctctgcaagttccgttgcagatgtttcccgccaatacgctgcaggcgagcattaccggggtgttggtgatcgctttagaaatcaaacgtctggcacttggtttgggtatctttgacccgctgatcggcttaatgtcgccggattgtggttacgccgcaaagcgaaagccgcgcaacaggagcttgtccatgaacattgagttactgcaacagttgtgcgaagccagcgccgtcagcggcgatgaacaggaagttcgcgacattctgataaacacgctggaaccttgcgtgaatgaaatcaccttcgatggtctgggcagctttgttgcccgtaaggggaataaaggtccaaaagttgccgttgtcggacatatggatgaagtcggctttatggtcacccacatcgacgagagcggttttctgcgttttaccaccattggcggctggtggaatcagtcgatgctcaaccaccgggtaaccatacgcacacacaagggagtgaaaatccctggtgtgattggttccgtcgcgcctcatgcgttaacggaaaagcaaaagcaacaaccgctgtcatttgatgagatgttcattgatattggcgcgaacagtcgcgaagagctcgctactcaccgggctgttatccgggttagcgggcataacatcggtcatatatttccaccaacgttggcaaacatcagtgctggcaaccgcattccagcgttcttcagattcaatctctaccatggcaaacagcagattacgcgctttgtcgagatagatggcgtagttatgcgcaccgatctgtacagtccgaaagccgctgagggtaaaaacatccagctgcaccctaaggtcaacactgtaggaaaagtccactatcttcaaagcttgattgttcttgttacaatcatagggatcgtggattctgagcccagatttaagagagggctaaaagatggtgaattgtggaataaattctttgtgcggattctgaatgccaatgatgaggcccaagtgtctgttcttggggagcttcaacaagaaatgaatggggtttttgacactacattccaaagtcacctgaacaaagccttatggaagaaaaagcgggtggttagcaggaactgggcaaggggtacttgtggacccagagtgaccaacgagatgcttgaggatgaggatgctgaggaccacgggggtactttctgcttaggggagctggtggagctggctgtgaccatggagaacaaagcagagggcaaacggattgtaagtgaaaagcctaccagagcaaggaaccaaggcatagaggggtcacctggagggcgtgtgacccgaagcccccccacgcaggtggccatcagctcagattctgcacggaaggtaagaaaaattgcccccaccccgcacgccacggcaagcgaaatcgccgtcagttgcgtcaccgcgcgagcgagcaatcacccggtttatatccgtgataccgggattggtatcggtgacccgaaagaacccgaaggtcattatggtctgaatatcatgcgcgaacgcgcggaacggctaggtaccctggcgattttttcattgcccgttgaacaataccccgatctcgcgccaccgaatgtgcgagtgaccgctaactatcccggcgcatcggcccagacgctggaaaacaccgtgacccaggttatcgagcaaaatatgaccggcctcgataatctcatgtatatgtcatctcagagcagtggcaccggtcaggcatctgtcactttaaggggtaccgagctcgaattcgtgcaaattaaacatggcggtttcccctgccacgttgatgacagcattcaggtcaatcagcaaaagtgtattggctgtaaatcctgcgtggtggcctgtccttttggtacaatgcaaatcgtcttgacacccgtcgcggcaggaaaagtaaaagccccggcgcataaatgcgacctttgtgcggggcccgaaacgggtcctgcttgtgttgagaattgcccgccggacgcgctgcaattggtcactgacgtcgcactctccggcatggcgaaatcccgccgcttgcgcaccgcgcgtcaggaacatcaaccgtggcatgccagtaccgcggcgcaagaaatgccggtaatgagtaaagtcgaacaaatgcaggcaacgcccgcgcgtggcgagccggataaactggcgattgaagcgcgcaaaaccggttttgatgaaatttatctgccatttcgcgccgaccaggcacaacgggaagcctcgcgctgccttaagtgcggcgagcacagcgtttgtgaatggacctgcccgctgcataaccatataccgcagtggattgaactggtgaaagccggaaacatcgacgccgccgtcgagctttctcaccagaccaacaccctgccggaaattaccggacgcgtttgtccgcaagaccgtttgtgtgaaggtgcctgtactattcgcgatgagcacggcgcgctctcccggaggcgcagggctgacgagtgccgccaagccaaaaaagcgatcaaaaaacaaaggaagcttgggatgaaagtgacatttgagcagttaaaagcagcctttaatcgggtcttaatttcacgcggcgttgacagcgaaacggctgacgcctgtgcagagatgttcgcccgcaccaccgaatccggcgtttattctcacggcgttaatcgtttccctcgtttcattcaacaactggaaaacggcgatatcattcctgatgcccaacccaaacgtataaccagcctcggcgcaattgaacagtgggacgcccagcgttcgatcggtaacctgacagcgaaaaagatgatggatcgcgccattgaactggctgccgatcacggtattggtctggtggcactacgtaatgccaaccactggatgcgcggcggcagctacggctggcaggcggcggaaaaaggctatattggcatttgctggaccaactccatcgccgtaatgccgccgtggggcgcaaaagagtgtcgcataggcactaacccgctgatcgtcgccattccttccacgggtaccgagctcgaattggtgaaacccccttttgaagaaaacttttttggagaagccccccaggaaataacaaagattggttttcttccccaaacaattatttgctaa

SEQ ID NO: 126350 - DNA, 1151 bp, Homo sapiens
tcaaacagctgcatctgatttgccaacaagatttcttactgttatggttgctagatagcgatcatttgtgatatttactggcagttttgtggcattaactgtgtaattttgtaaatgtgatttccatcttgtgagagtcacttcataatccaagatttttccattggcttcaaaaggaggcaatgtaaaatcttcctcattgactgatgaaacttgctttgacctttcaaaatgtgaaatatctggactggattcatgctgactgcagttctgtttgaagtactgttgcctgggcaaaataccatcaccgccatctacatgatctactaattgtagatcttctggccgctcctctgaatctaacaagggctgggtagactcggatcttgagaagacttggactgacggaacttggtgtctgtagcccactgtgtaccacggtagaatactggacagtgcctcgaagtgttttgtgaagattcattttcatcactgctagaaatgcttggcctagaagatgacatgcatgaagaccccccaataccactgctgtgtccttcagtattaattttttcctttttgaacaggtccaatgatttcagatcttctggaaaaggctttttgtcatttgcttctatttccacaacacttacatcagtgaaattgccatctgaatacattctgttcatataagcaagctctgccaaacaccgagcactatgctgggccaggagaggactgagctggggccctctctccagaggcccagcagtaggtgccaggatatagaaggcccttaactcagggggaaggagagagaagaatggaagatttccctcaagagggtatctatttgagttgatttttggtgaaccagtaagaatttcccagcttaacagggactggggactggagaacatttgtttccttttccccacagggtcttgtccattcataccgccttctttggcataagcctggatggaatatggctcgccaactttgtcatgcaacattggatacacagagatgttatagcaccagaaaggttttaatttatcttgctggatcgtccagttcgtggcctgagacacagattcccaggaaagggtggtgggctctgagtccacatccggaaaccattcaatcat

SEQ ID NO: 126351 - DNA, 1326 bp, Homo sapiens; identical to SEQ ID NO: 115658

SEQ ID NO: 126352 - DNA, 2838 bp, Homo sapiens
gaattcacagataaaatcattttagctttactttataggtactgctgaagttgtagcaggaactactagtccttcactgaggcatgtagccgccttgccgtacagtctgtggtaagtaacttttaggcatgccttcatcagtcgcagcctccatgccaactgtttcaaatctttctacttgtccctcagtacctggaccaaaagcatctgctgcagaaacttcctgaaacattttcatttgcccagatccacaggattgtgaaatatgatctgaaatctgctgtttaagtctaacaaaatcttcctcattgactgatgaaacttgctttgacctttcaaaatgtgaaatatctggactggattcatgctgactgcagttctgtttgaagtactgttgcctgggcaaaataccatcaccgccatctacatgatctactaattgtagatcttctggccgctcctctgaatctaacaagggctgggtagactcggatcttgagaagacttggactgacggaacttggtgtctgtagccactgtgtaccacggtagaatactggacagtgctcgaagtgttttgtgaagattcattttcatcactgctagaaatgcttggcctagaagatgacatgcatgaagaccccccaataccactgctgtgtccttcagtattaattttttcctttttgaacaggtccaatgatttcagatcttctggaaaaggctttttgtcatttgcttctatttccacaacacttacatcagtgaaattgccatctgaatacatttgatcttttgaattaaaattgtgccttggaggagtgtgaggtgaccactgggcaatatgactctttgaaggatctggaacattaggccagatgtgttttttaattaggtctcgcttattaaagcagaacagcactcccagaagagttgtcaataggaatgctaagcaaacaggcacgactatggcttcaatttctccttgagcaaactttggggtaagtaaaagtgaattcttggaccatccttcccacctttcatctgtgtatgctgccattccgtaccatggtacaatggtgtcactagtcaaagagggacaatgtatattctgtgtgggaagaatccacattcacagcagtttcatttccaatgatggttctataaaatatagtataatttctgataaatccattctgaacatcaacaggaaagttggtcccactctaagacagcttcgtttttccctactttttttgtccgaacagtaggtcctttggaaggtggagcttgtttaaggtatgcctttatggattcagggcttcctggtccatcagcatatactggagtaactgttatcaaatagcatttgctctctgctaagttccctcttaaataggtgcgatgcacggtaccatcttcttgttgccagtctgtgatacagggtgctttatctgataacacacaccactcaagtatatatttctttacagattcccttggagtagtccattccacccaaagcatgttatctttggggaatgctttaagatccattacagggtgagtagcttgaaagtcacaggcagggatagttaaaacagctgcatctgatttgccaacaagatttcttactgttagggttgctagatagcgatcatttgtgagatttactgtcagttttgtggcattaactgtgtaattttgtaaatgtgatttccatcttgtgagagtcacttcataatccaagatttttccattggcttcaaaaggaggcaatgtcttccacacgagttgtacagttctgtagccttgagtatgggatggatctattttataccagaaacttggtgctttagatggtctatcttcataggtgatcccacttgcttcttcactccagtcactccagtatcccttaccatcttccttcatacagcgaatcctaaacacatattctgtaaaaggtttaaggtcttggacagtgaatgaagatcgggtggatgctgtgtcttcaggaggaatctggctccaagttgaggcatctttggtcctatattgaatgttatattttagtattataacactcttaatacttgggttggtccatgtcaattttaagatactagacagttcctctgagttgatcactgataaattatgtggcggattgggcttcactttatatacaggatcaaaattgatatgatctgatgtaaccttcccaagggcattctctgcttctacccagacttcaatgttgacaaaatacacagtagaataatcaacagtgcatgaggtgggggtgtcacgttttgctttgcaatcagcaaacttgtgtgttgcccattcagattttaaagtgaagtttgtctccaagtgtgtttcccttccaccatcccactcacacctcattttcttcccctcgttcacaatgcaactcaaatttttaggtttttctggaggcaagcctgaaattattgtgattccataaacattctgttcaagctgtccgaatgtaagaatgttgcaagtgagctgaatatttaatgaagctatatctgtaaaggtgacactggatgctgttctgtttatgatagtatattgctccttaggaatagtaaaatggtttgttttccagacaatgtaattagcatttacatgaaaataatccatacatttttcctttagcacacaaactgcagtgaaattagaatgaagttgtacaactggagattcaggactgatataaccacatggatctagaagttcacctgtagattcagtggtgaggaaaataaacaaggcttgcactacccaagtctgcaacgtcaacat

SEQ ID NO: 126353 - DNA, 1835 bp, Homo sapiens
atggggctccgtaagaagagcaccaagaacccccccgttctcagccaggaattcatcctgcagaatcatgcggacatcgtctcctgcgtggggatgttcttcctgctggggcttgtgttcgagggaacagcagaagcatccatcgtgtttctcactcttcagcacagtgttgctgtccctgcagcagaggaacaagccacgggctcaaagtccctctattattatggtgtcaaagatttggccacggttttcttctacatgctggtggcaatcattattcatgccacaattcaggaatatgtgttggataaaattaacaagagaatgcagttcaccaaagcgaaacaaaacaagtttaacgagtctggtcagtttagtgtgttctactttttttcttgtatttggggcacattcattttaatctctgaaaactgcctgtcagacccaactcttatatggaaggctcgtccccatagcatgatgacatttcaaatgaagtttttctacatatcccagttggcttactggtttcatgcttttcctgaactctacttccagaaaaccaaaaaacaagacatccctcgtcaacttgtctacattggtcttcacctcttccacattactggagcttatctcttgtacttgaatcatttgggacttcttcttttggtactgcattattttgttgaattactttcccacatgtgcggcctgttttactttagtgatgaaaagtaccagaaaggcatatctctgtgggccattgtgtttatcttgggtagacttgtgactttaattgtttccgtactcactgttgggtttcacctggctggatcgcagaatcggaatcctgatgcccttactggaaatgtaaatgtgttggcagctaaaattgctgttctgtcgtccagttgcacgatccaagcctacgtaacatggaacttaattactctctggcttcagaggtgggtagaagattctaatattcaggcctcatgtatgaaaaagaaacggtcgagatcttctaaaaaaagaacagaaaacggagtgggagtggaaacttcaaatagagtagactgtccgccaaagaggaaagagaaatcttcataatctttgcaagcgcattgattaatgtctgcaaaggaatctgctctttgaggtttctttctgcactagagatttttgtgtttttgaaaatagttcgtgctcttcggtttttgttattgaactgtttcatgtattttttaaagacatttgaggggaggaggattattatgaatgggaaaaaaagattttggttgagactaaattactcatcgtcaaaataatgtcaaaatagttgtggggatcaccactatattttgttttgatttttaacctttcaacattttcctaatgatttgcagagataactgcacaattttgcatatcaatgatactggttcttactcccaccagtgtttcataatactaacaagatggtctctcctagcaagattatgtgtttaatgcttgctttggggtaaaataaaagtacgaaaaaggtggaagtcaaatcagtattctgtaattgttagaatttattttttaagaacttacaactcagaaaagattgctagactcaccaaaataataaatgttctttattttacaggtagtgattattagtgcttcatccccatttaaaaaaacacagtactaatgggtaacacatatggaggtttgctgccatatatattgcatcaaaatatcattaattaatataaaaatattaaaatcattcctgtccattccacttgtaaatgggaattcatgaaattaaatattactttaaa

SEQ ID NO: 126354 - DNA, 367 bp, Homo sapiens
ggcacgaggagctacgtggataacctgatgtgcgatggctgctgccaggaggccggcattgggggctactgcgacgccaaatacgtctgggcagccacggccgggggcgtctttcagagcattacgccaatagaaatagatatgattgtaggaaaagaccgggaaggtttctttaccaacggtttgactcttggcgcgaagaaatgctcagtgatcagagatagtctatacgtcgatggtgactgcacaatggacatccggacaaagagtcaagcattggttatagtcatgggaaaggaaggtgtccacggaggcacacttaacaagaaagcatatgaactcgctttatacctgaggaggtctgatg

SEQ ID NO: 126355 - DNA, 534 bp, Homo sapiens
atgggaaaggaaggtgtccacggaggcacacttaacaagaaagcatatgaactcgctttatacctgaggaggtctgatgtaaatagtgatgctgtgacacttctaaggctaggatttaagaagccttgcagagtccaccagggtcccttggaacacaaattgtgggagaagcaatccctgaagaaagccagccattatggaagaaatccaacgaccctgagaccactatgctgttgcaaactttcccggttacgcccacacctttcctccttaaaatgcgacccttttgtgtgcccaccaaaaatcccacgtcaaaaaaggggcaacgcttccaatcaggctgcgtttgtcgccttccaaacggcttgttgtcctctggggcggttcccccccagagctttcggaataaaacttggcgaaagtcccttccaagataataaatccgggggccccgttataccggaagccctgggccacctttggcaaaaattaaaccttttttcgcccgttaaaagtttccaactttcaccataa

SEQ ID NO: 126356 - DNA, 1746 bp, Homo sapiens
ggttggaataaatttatttcatctgtctgtaaacaaggtgtttaatagttatggcatttttttaaatgcatattaaatcagatgagttagactgtatcccagatgtaacaaagtgcagggaaagaaatggacaaatcagcaacaagatttgtttttaaatctgtacattatccacaaggcccaaacaatagaagcaaatactagaatgtccctaaagtagtgccattcgaaagaaacccttaataggtcagttaaaatccatctcacaatagcaacagttcattttaacaatagtatggcacagaatacatatgaaaaaaattcatcacaagacagccaagtccacaataatgcaacttcatataaaaactcaagctgcaaataaaaattggtcctatgaagaacaaactggacacactccagatggttatgttgggatacctaatgtccataatggcagccttttacaattttactaaagagtagagctggtgtgcaaagaaaaaggaagaaaaatctgagctattgcaatgatggaatgtccctggggattcaatcagtatggttactgtaaggtcatgggaggaagtgctttttgctcttgttttgccattgcactcttcatatgtcctgtagacactatgaataaaggtttgtctctgctcaagtgcaacaacaatactaaaagcaaactactgcagctctcaatagctcatcaacaaaagggattttaattggttaaaaaaaaacaggcactgcataaaaaaagatggaagcaaaccaaatgcctatgtgcgaagggaggggggggcgggaaaaagagaagagtgaaggaatgatgcatgcactttttcctcccaaccatgcgctacaaaaggaagactaaatgagccaagtaaatgctcaaagtgctgaaaagacactgatcagagattgtacaaccggcaccttgcttaaatattaaacttaattttaagtaatcaatatcccattaaattgctaagacaaagtgatgcccaacttggcatgccccctcccccgagatttcaaggtatcatgcaaatcattattgtgctgcaattatgttgccagataagggttggtttaccatacagtggttaaacatacaaatgatcccattgggcaaacaggaatccatgacatttagaaaataggtaaagaaaaattagctacccattctacaggtttggtagcattgtgacccataattagggtttgttgatgaaagacagttgcctaggtagatggggagaggctgcttaacacatcagacctcctcaggttataaagcgagtttcatatgctttccttgttaaagtgtgcctccggtggacacctttccatttcccatgactataacccaatgctctacccagatctgccgacagccacattgtattgttggctccccacctttgactgtttgtcccggatgtccattgtgcagtcaccatcggacgtatagactatctctgatcactgagcatttcttctgcgccaagagtcaaaccgttggtaaagaaaccttcccggtcttttcctacaatcatatctatttctattggcgtaatgctctgaaacgacgcccccggccgtggctgcccagacgtatttggcgtcgcagtagccgacaatggcggcctcctggcagcagccatcgcacatcaggttatccacgtagctctgccaaccggcacatcttcgagagcttcgagctgcaccgcg

SEQ ID NO: 126357 - DNA, 648 bp, Homo sapiens
atgggggctaaccagttagtggtgctcaacgtgtgtgacatgtattggatgaaggaatatacctcatccattggaattggagtttttcattcagaaattgaagtctatggcagagaatttgcttatggtggccatccttaccccttttctggaatatttgaaatttccccaggaaatgcttctgaactaggagaaccatttaaatttaaagaagttgttttagggagcacggacttcctagaagatgatatagaaaaaattgtagaagaactgggaaaagaatacaaaggcaatgtttatcatttaatgcataaaaactgcaatcatttttcttcagctttatcagaggccagagctgaagcaatgccaggcatcctgggaaaacagtgcattaaccatccagagcagtcacacccctctgtacctgagctgaagcagtaccttgtctcctgggaaaacagtactttggccatcgagagcagtcatgcctccccagtgcctaagtttaagcagcaccctacctaccaccctgccttccagcacactaaggaccaagtgcaggtgaaagcctctatgaaagtgactgtagaaaaatgggaagacgccattgtttcaccagatgcacagacatcaatgcagggacaatag

SEQ ID NO: 126358 - DNA, 865 bp, Homo sapiens
  misc_feature (1)...(865): n = a,t,c or g
ctccggccccgcggagacggagcggcttgaggacgaggcggcggccgcggggaggaggatgggggctaaccagttagtggtgctcaacgtgtacnacatgtattggatgaacgaatatacctcatccattgggaattggagtttttcattcaggaattgaagtctatggcagaggatttgcttatggtggccatccttaccccttttctcggaatatttgaaatttccccaggaaatgcttctgaacttaggagaaacatttaaatttaattctttaagagaagctgttgttttagggagcacggacttcctaagaagatgatatagaaaaaaattgtacgaagaactgggaaaggattaccaaaggcaaatgcttaatcatttaaatgcataaaaactggcaatcatttttcttcagcctttatccagagattcctttgtggggaaagagatttcctcgctgggatcaatccgactttgccctacttcaagctcctggtatacccttttcttacagagttgcctccccgaaggagttgggctcacgccccgcagcccctgcagtcctagtgtccagccaagaactccaggatgaactgggaggaagcagaggatgctgccgcatccgctttccgtggcaagcagctggcagcaggctccagacccgggcgccacactaaactataaatgtctccaaagtcacacattcagaactgtctctggcagtcgaatatcactagagaaaagtaaacagagaagcatcctttagatattttgtatgcaaagatggctctcccccaaatcccagtttttcagctcaggattatatttgtaatcaaaaaaaaaaaaaaaaaaaaaattggcg

SEQ ID NO: 126359 - DNA, 2498 bp, Homo sapiens
acaacataccagaatctctgggatgcattcaaagcagtctgtagagggaaatttatagcactaaatgtccacaagagaaagcaggaaagatccaaaattgacaccctaacatcacaattaaaagaactagaaaagcaagagcaaacacattcaaaagctagcagaaggcaagaaataactaaaatcagagcagaactgaaggaaatagagacacaaaaaacccttcaaaaaattaatgaatccaggagctggttttttgaaaggatcaacaaaattgatagaccgctagcaagactaataaagaaaaaaagagagaagaatcaaatagacgcaataaaaaatgataaaggggatatcaccaccaatcccacagaaatacaaactaccatcagggaatactacaaacacctctacgcaaataaactagaaaatctagaagaaatgcataaattcctggacacatacactctcccaagactaaaccaggaagaagttgaatctctgaatagaccaataacaggagctgaaattgtggcaataatcaatagcttaccaaccaaaaaaagtccaggaccagatggattcacaggcgaattctaccagaggtacaaggaggaactggtaccattccttctaaactattccaatcaatagaaaaagagggaatccatgaacattgatgcaaaaatcctcaataaaatactggcaaaccgaatccagcagcacatcaaaaagcttatccaccatgatcaagtgggcttcatccctgggaggcaaggctggttcaatatatgcaaatcaataaatgtaatccagcatataaacagagccaaagacaaaaaccacatgattatctcaatagatgcggaaaaggcctttgacaaaattcaacaactcttcatgctaaaaactctcaataaattaggtattgatgggacgtatttcaaaataataagagctatctatgacaaacccacagccaatatcatactgaatgggaaaaaactggaagcattccctttaaaaactggcacaagacagggatgccctctctcaccactcctattcaacatagtgttggaagttctggccagggcaatcaggcaggagaaggaaataaagggtattcaattaggaaaagaggaagtcaaattgtccctgtttgcagatgacatgattgtatatctagaaaaccccattgtctcagcccaaaatctccttaagctgataagcaacttcagcaaagtctcaggatacaaaatcaatgtacaaaaatcacaagcattcttatacaccaacaacagacaaacagagagccaaatcatgagtgaactcccattcacaattgcttcaaagagaataaaatacctaggaatccaacttacaagggatgtgaaggacctcttcaaggagaactacaaaccactgctcaaggaaataaaagaggatgcaaacaaatggaagaacattccatgctcatgggtaggaagaatcaatatcgtgaaaatggccatactgcccaaggtaatttacagattcaatgccatccccatcaagctaccaatgactttcttcacagaattggaaaaaaccactttaaagttcatatggaaccaaaaaagagcccacatcaccaaagcaatcctaagccaaaagaacaaagctagaggcatcacactacctgacttcaaactatactacaaggctacagtaaccaaaacagcatggtactggtaccaaaacagagatatagatcaatggaacagaacacagccctcagaaataacgccgcatatctacaactatctgatctttgacaaacctgacaaaaacaagcaatggggaaagggttccctatttaataaatggtgctgggaaaactggctagccatatgtagaaagctgaaactggatcccttccttacaccttatacaaaaatcaattcaagatggattaaagacttaaacgttagacctaaaaccacaaaaaccctagaagaaaacttaggcattaccattcaggacataggcatgggcatggacttcatgtctaaaacaccaaaagcaatggcaacaaaagacaaaattgacaaatgggatctaattaaactaaagagcttctgcacagcaaaagaaactaccatcagagtgaacaggcaacctacaaaatgggagaaaattttcacaacctactcatctgacaaagggctaatatccagaatctacaatgaactcaaacaaatttacaagaaaaaaacaaacaaccccatcaaaaagtgggcgaaggacatgaacagacacttctcaaaagaggacatttatgcagccaaaaaacacatgaaaaaatgctcaccatcactggccatcagagaaatgcaaatcaaaaccacaatgagataccatctcacacctgttagaatggcaatcattaaaaagtcaggaaacaacaggtgttggagaggatgtggagaaataggaacacttttacactgttggtg

SEQ ID NO: 126360 - DNA, 528 bp, Homo sapiens
gaaaacctaggcaataccattcaggacacaggcatgggcaaagacttcatgactgaaacaccaaaagcaatgacaacaaaagccaaaattgacaaacgggatctaattaaactaaagagcttctgcacagcaaaagaaactaccatcagagtgaacaggcaacctacagaatgggagaaaatttttgcagtctatccatctgacaaagggccaatatccagaatctacaagcaacttaaacaaatttacaagaaaaaatcaaacaaccccatcaaaaagtgggcaaagaataggaacagacacttctcaaaagaagacatttatgtggccaaaaaacatatggaaaaaagctcatcatcactggtcattagaaaaatgcacatcaaaaccacagtgggataccatctcatgccagttagaatggcaatcattaaaaagtcaggaaacaacagatgctggagaggatgtggagaaatgttagtgggagggtcaattagttcaaccattgtggaagacagtgtggcaatt

SEQ ID NO: 126361 - DNA, 1362 bp, Homo sapiens
atggatgcaaaaatcctcaataaaatactggcgaaccgaatccagcagcacatcaaaaagcttatccaccatgatcaagtgggcttcatccctgggatgcaaggctggttcaacatacacaaatcaataaacgtaatccagcatataaacagaaccaacgacaaaaaacatacgattatctcaatagatgcagaaaaggcctttgacaaaattcaacagcccttcatactaaaaactctcaataaactaggtattgatgggacttgcttcaaagagaataaaatacctatgaatacaacttacaagggatgtgaaggacctcttcaaggagaactacaaaccactgctcaaggaaataaaagaggatacaaacaaatggaagaacattccatgctcgtgggtaggaagaatcaatatcgtgaaaatggccatgctgcccaagaattggaaaaaactactttaaagttcatatggaatgaaaaaagagcccgcatcgccaagtcaatcctaagccaaaagaacaaagctggaggcatcatgctacctgatttcaaactatactacaaggctacagtaaccaaaacagcatggtactggtaccaaaacagagatatagatcaatggaacagaatagagccctcagaaataatgccacatatctacaactatctgatctttgacaaacctgacaaaaacaagcaatggggaaaggattccctatttaataaatggtgctgggaaaactggctagccatatgcagaaagctgaaactggatcccttccttgcaccttatacaaaaattaattcaagatggattaaagacttaaatgttagacctaaaaccatacaaaccctagaagaaaacctaggcaataccattcaggacataggcatgggcaaggacttcatgtccaaaacaccaaaagcaatggcaacaaaagccaaaattgacaaatgcgatctaattaaactaaagaacttctgcacagcaaaagaaactaccatcagagtgaacaggcaacctacagaatgggagaaaatttttgcaatctactcatctgacaaagggctaatatccagaatctacgatgaactcaaacaaatttacaagaaaaaaacaaacaaccccatcaacaagtgggcaaaggatatgaacagacacttctcaaaagaagacatttatgcagccaacagacacatgaaaaaatgctcatcatcactggccatcagagaaatgcaaatcaaaaccacaatgagataccatctcacaccagttagaatggcgatcattaaaaagtcaggaaacaacaggtgctggagaggatgtggagaaataggaacacttttacaatgttggtga

SEQ ID NO: 126362 - DNA, 2650 bp, Homo sapiens
atgaccgatcccacagaaatacaaactaccatcagagaatactacaaacacctctacaaaaataaactagaaaatctagaagaaatggatgaattccttgacacgtacactcccccaagactaaaccaggaagaagttgaatctctgaatagaccaataacaggatctgaagttgtggcaataatcaatagcttaccaaccaaaaagagtccaggaccagatggattcacagccgaattctacaagaggtacaaggaggaattgataccattccttctgacactattccaatcaatagaaaaagagggaatcctccctaactcattttatgaggcaagcatcattctgataccaaagctgggcagagacacaaccaaaaaagagaattttagaccaatatccttgatgaacactgatgcaaaaatcctcaataaaatactggcaaaacgaatccagcagcatatcaaaaagcttatccaccatgatccagtggggttcatccctgggatgcaaggctggttcaatatacacaaatcaataaatgtaatccagcatataaacagagccaaagacaaaaaccacatgattatctcaatagatgcagaaaaggcctttgacaaaattcaacaacacttcatgctaaaaactctcaataaattaggtattgatgggacatatttcaaaataataagagctatctatgacaaacccacagccaatatcatactgaatgggcaaaaactggaagcattccctttgaaaacttgcacaagacagggatgtcctctctcaccactcctattcaacatagtgttggaatttctggccagggcaattagaaaggagaaggaaataaaggttattcaattaggaaaagaggaagtcaaattgtccctgtttgcagatgacatgattgtatatctagaaaaccccattgtctcagcccaaaatcttcttaagctgataagcaacttcagcaaagtctcaggatacaaaatcaatgtacaaaagtcacaagcattcttatacaccaacaacagacaaacagagagcgaaatcatgagtgaactcccattcacaattgcttcaaagagaataaaatacctaggaatccaacttacaagggatgtgaaggacctcttcaaggagaactacaaaccactgctcaaggaaataaaagaggatacaaacaaatggaaggacattccatgctcatggataggaagaatcaatatcgtgaaaatggccatactgcccaaggtcatttacagattcaatgccatccccatcaagctaccaatgccttttttcacagaattggaaaaaactactttaaagttcatatggaaccaaaagagagcccacatcaccaagtcaatcctaagccaaaagaacaaagctgcaggcatcacgctacctgacttcaaactatactacaaggctacagtaactaaaacagcatggtactgggaccaaaacagagatatagatcaatggaacagaacagagccctcagaaataacgccgcatatctacaactatctgatctttgacaaacctgagaaaaacaagcaatggggaaaggattctctatttaataaatggtgctgggaaaactggctagccatgtgtagaaagctgaaactggatcccttccttacaccttatacaaaaattaattcaagatggattaaagacttaaacattagacctaaaaccataaaaaccctagaagaaaacctaggcattaccattcaggacataggcatgggcaaggacttcatgtctaaaacaccaaaagcaatggcaacaaaagccaaaattgacaaatgggatctaattaaactaaagagcttctgcacagcaaaagaaactaccatcagagtgaacaggcaacccacaaaatgggagaaaattttcacaacctactcatctgacaaagggctaatatccagaatctacaatgaactcaaacaaatttacaagaaaaaaacaaacaactccatcaaaaagtgggcaaaggatatgaacagacacttctcaaaagaagacatttatgtagccaacagacacatatgcagccaacagacacatggaaaaatgctcatcatcaactggccatcagagaaatgcaaatcaaaaccacaatgagataccatctcacaccacttagaatggcaatcattaaaaagtcaggaaacaacagctgctggagaggatgtggagaaataggaacacttttacactgttggtgggactgtaaactagttcaaccattgtggaagacagtgtggcgattcctcaaggatctagaatcagaaataccatttgacctagcaatcccattactgtgtatatacccaaaggattatacatcattctgctataaagacacatgcacatgtatgtttattgcagcactattcacaatagcaaagacttggaactgacccaaatgctcatcagtgatagactggataaagaaaatgtggcacatatacacaccatggaatactatggagccataaaaaggaacaagatcatgtcatttgcagggacatggatgaagctggatgccatcatcctcagcaaactaacgcagaaacagaaaaccaaactccgcatgttcttactcataagtaggagctga

SEQ ID NO: 126363 - DNA, 733 bp, Homo sapiens
atggaatactatgcagccgtaaaaaggaatgagatcatgtcctttgcagggacatggaagaaactagaagccatcatcctcagcaaactaacacaggaacagaaaaccaaataccccatgttctcactcatagaatgcatccattcaaatattgctacaacttgcagcgaacaccactctgatgagaataaagaaaaggccatctgcaggttgatttttggccctaaaagtgatgatacggcggctacttccacgaacacccctctacccaaagcactgaataggagccggtgtcagtcacgctgctccaggggagagtcgccggcagcttccggagctccaaatacagacgagctgagggggggagagggagagcaaagccacgcgggtggggagtggaaataaaggggagcagagaggagaagggggtggaggaaagaaggggcagatgggccgtgggagaaaatacagggagatggggaaggcagagccagggaacgccagcctgcctgccaagcgccaggctatgcgagaaatggattcagtgcatgaggcagtattgcaaagaagtctggaaagatccggaggctcctggctgaaggaggcacagataggttggatacccgaagatctgtgcagagaaatgggtaatggatccttaggaatcaagagacggcatgtgtgtccccagacccaatatgaggataaaggctctgggaggagaaggagctag

SEQ ID NO: 126364 - DNA, 486 bp, Homo sapiens
tttttttttatgcacacataatgtttattgcagcactattttacaatagcaaaaacatggaaccaatccaaatgcacatcaatgatagactggataaagaaaaatgtggcacatacacaccatggaatactatgcagccataaaaaggatggggattcatgtcctttacaaggacatggatgaaactagaagccatcatcctcagcaaactaacacaggaacagaaaaccaaaccaccacatgttctcactcatacgtgggagttgaacaatgagaacacatggacacagagagggtaacaaaacacacaacagggggtagggggtgagcgggcgaacttagaggatgggtcagtagggccagcaaaccaccatggcacacgtatacctatataacaaacctgcacattctgcaaacgtatctcattttttttttagaggaaataaagaaaaatgatgaggccatgtcaaaaagaatcaggagcta

SEQ ID NO: 126365 - DNA, 432 bp, Homo sapiens
attttttgttgagatctgaaaacttaatataagtgtgtctgttggtattgcttggttagagagctaaaatatttctaattgggtttattttgtattttgcctatagatacactctgtgcagttttagagagagacacactcagtattcgagaaagtcgactttttggagctgttgtacgctgggcagaagcagaatgtcagagacaacaattacctgtgacttttgggaataaacaaaaagttctaggaaaagcactttccttaatccggttcccactgatgacaattgaggaatttgcagcaggtcctgctcaatctggaattttgtcagatcgtgaagtggtaaacctctttcttcattttactgtcaaccctaaaccccgagttgaatacattgaccgaccaagatgctgtctcaggggaaaggaatgc

SEQ ID NO: 126366 - DNA, 936 bp, Homo sapiens
atgtatgatacactctgtgcagttttagagagagacacactcagtattcgagaaagtcgactttttggagctgttgtacgctgggcagaagcagaatgtcagagacaacaattacctgtgacttttgggaataaacaaaaagttctaggaaaagcactttccttaatccggttcccactgatgacaattgaggaatttgcagcagggaaagtattcatagagaagagaaggcgaccaaggcctatccctcaggaaatacccatatttaggagacaagaacaggaaatagaaaacttgaagaggggcagtgtgacaattgaaaaactaagaaaaatgcttcctcacctagtatcgggaatcaagaaggatatttggaaaaggggcttcttagaatgcttcctcgcagtttcccttgccagaaacctagcagccatcctggactcttccatctctcttactccagatactcagtgtctccctaagtcctgtgaacttcagcttctgactgaactttctcttctgtttgttcactcctcttcattccttcatgtcaccctcttagttacagccctcatcatttttcacacaaaccaagcagaaatgggagctatagatggtcatagctcccttaccctggcccctaatttccctggctctgattccaggctctccaagcagccttcaaatgatgattctcttaaagagatttcccaaagggacagaatgttctcactagcagatcccactatacagtctatttggcagttgtgttcttcactcaagttaataagctggcatcttgataagaaattagctccttgccaattgcccagcctagatccattttcagaaacactggctacgtggatttctgaaacctgcagagttaaggaaggaactcaagaccatgctgactccaccatggcaatgggctga

SEQ ID NO: 126367 - DNA, 2013 bp, Homo sapiens
aaaatttctaacaagtataggtagttcttggtaatggaattaaattttatgtgtatttcatgtatataaattttgtatgtatttatttatttaataggtcttcatcctccaggtccacctttagcaagacctattctcccccgagaacgaggtgctttggatagaattgttgaatatttggttggtgatggtccacaaaacaggtatgcacttatatgtcagcagtgtttttctcataatggcatggctttgaaggaagaattcgaatacattgcttttcgatgtgcctactgttttttcttgaaccctgcaagaaaaaccagacctcaggctccaagacttcctgagtttagttttgagaagaggcaggtggtggaaggttcaagttcagttggtcccttgccatcaggaagtgtgctttcatcagacaaccagtttaatgaagaatctttagaacacgatgttcttgatgataatacagagcagacagatgacaaaataccagctacagaacagacaaaccaagtgattgaaaaagcatctgactcagaggaaccagaggagaaacaagagactgagaatgaggaagcctcagtgattgaaaccaactccacagttcctggagctgattctattcctgatcctgaactaagtggagaatctttgacggcagagtagtaaatgcttccacgtgccttcaactggatatttatagtcttactgatgtcagttattgctttttcggtggcacttactttttttgcccctctaagggtatgcttgtgtatcatttgaattcagattgcctagctatttgaacatctcaaagttatatatactgggtattaaaattaaaagcaagttatatcagtgaagtaggatccttttgaatgtacaaagacccacactattgagacagcttttagatacttttttgtccattctaaaagtaagcaaacatgattgccttcttgttttctgtatgtataacccgtaaatatccattttgacataggaagaactttggttaagagtaagttctctaattgtgtttgttttaaggaatgaaacttggttaagattttgactacttcattattaaaaattgatagaattttagctcctgagatatttacaactgggagaaatgtctatttaggtgtttacattaagcggtatgaaagttgttaccacataggcactggtacgaattctcaataagaatgcagtggaacagttaagtagaactgtaactacgttggcactggtacgaattctcagtgagaatgcaatgaaacagtcaactgcagtgtttctttttgatgtcttttattttacaactgggccaaagcgacattatgtatataattagtttatatttacacactagcatataggaaatatttctgcacttgacccctatttgaattctgagcattatttataagtataaaatgatgatatataagtgaattttggtgctcttgtttggtattttattaaggaaaatgaaaataatctgggcatcagtttcattttgctaaatatctagtcttcttccaacacagtatcttgggtgggtgacttggctacctgaaaaatctgagggggaatagtctcacaatacaataaatctgtagattctgcttagagcaaattatggtacttttattcagacttgtttcctttctagttaacagaaatagtgacatttagaggttttaatcagaagttaggtttttctgattcaggaacatcgtaggccagccatttgtaatttttaactttgagaaacaaattttgtgagaataggtagtgggttgctggtagttaattggatttaatatttgtattaaggattaactggaaaaaaatgtgtctcagtgctaattcttggacctttaatacagtgtgcttatctgttacggcctccttttatctctcttctccaatattaaaaaaaatggaaatcaaattattatgctgaagggaaaaatatacctgtataagaaa

SEQ ID NO: 126368 - DNA, 342 bp, Homo sapiens
atgaaggaaaaaatgttaagggcagccagagagaaaggtcgggttaccctcaaagggaagcccatcagactaacagcagatctctcggcagaaaccctacaagccagaagagagtgggggccaatgttcaacattcttaaagaaaagaattttgaacccagaatttcatatccagccaaactaagcttcataagtgaaggagaaataaaatactttacagacaagcaaatgctgagagattttgtcaccaccaggcctgccttacaagagctcctgaaagaagcactaaacatggaaaggaacaacgggtaccagccgctgcaaaatcatgccaaaatgtaa

SEQ ID NO: 126369 - DNA, 546 bp, Homo sapiens
catcgtggaggaattcgctcactcttgtcctctggagacaaaccagaggctgtcatggtaatcgggaaaggtctgctagggactggagctcggatgccctgcatcaagactcgattgcagacctgtccgaggagagtttccgccaggaggggtcccggattccccaggctaggcccaggttgggccggggctcaccgccgactcgcagagggatgaaaggctcttcaggccccacatcccctaccccccggaccagggagagcagtgagctggagctgggatcctgctctgctacaccagggctgcctcaggccaggcccccacggccccgctctgcccctgccttttctcctatatcctgtagtctatctgactccccatcctggaattgttacagcaggggtcccttgggccaaacctgaggtttgttttggtccctaaatctcccccactgactgtttctccccgggtctgaataatgcctttaatgttcaatccaggaatatagccccaagatggggtaacagtggggaaaatatgctagtt

SEQ ID NO: 126370 - DNA, 474 bp, Homo sapiens
atggtccttgccttcagagacctcatgtctagcatggggacagacgcggacccatgggctctgggcctgcgggatttgaagtcttcacgaatgaaaggcggagacctgaaggatgggcagtacctcctggcagagctggaggaaggtattctggggcgtggaaagagcgaggccagtcctgagaatgccgcgcgggagcggagccgggtcaggacgctgcgccaggccttcttggctatgcaggctgctctgcctgccgtgccgcccgacaccaagctctccaagttggacgtgctggtgctcgccgccagctacatagcccacctcacccgcacactcggccacgagttgcctggccctgcctggccgcccttcctgcgtggactccgctacttgcaccctctcaagactgtgactcatgcttatgggcctggattttctaccagcccccagattctcagccatcagacttga

SEQ ID NO: 126371 - DNA, 966 bp, Homo sapiens
atggtccttgccttcagagacctcatgtctagcatggggacagacgcggacccatgggctctgggcctgcgggatttgaagtcttcacgaatgaaaggcggagacctgaaggatgggcagtacctcctggcagagctggaggaaggtattctggggcgtggaaaggctgctctgcctgccgtgccgcccgacaccaagctctccaagttggacgtgctggtgctcgccgccagctacatagcccacctcacccgcacactcggccacgagttgcctggccctgcctggccgcccttcctgcgtggactccgctacttgcaccctctcaaggtgccaaggtgcccagagaagtacagcgcaagcatatctgacctccttcagcccattcatcttacagatggaaaggagcgcagaaagtttaagaaaaaggccagggagcagttgctcactcttgtcctctggagacaaaccagaggctgtcatggtaatcgggaaaggtctgctagggactggagctcggatgccctgcatcaagactcgattgcagacctgtccgaggagagtttccgccaggaggggtcccggattccccaggtaacacatttggttgctgctgctaggaacagccctgccaccaactccgattcagtccagatccccatgctagctctggggactgggcgctacagccccgggccgttacctggggcggagaaagcgccactttcattcctgcttcttgggattgttgacggccacgtagtgatagagaacgacaagcaagaagagcgacacgcccagcatgttggcgaagatggcgagctgcacgccagccacggccacggccacggcggggctgggcccgtggaacggcccctgcgtgcctctgacctgaccagtccggctcggctccgacgccaccagcgaacaagcccgaagtcagagacctggaccggaacttcgtag

SEQ ID NO: 126372 - DNA, 543 bp, Homo sapiens
gtcgacttttttttttttttttttttgggaccacaaaaaaaagtctatatttttatattggggggaggtgtgagaatttgcaagcccccgtatactgggccctcgattctagtggcaggctttctttgttccataggattaaggaagactcttgaggaaataaaagttgtttggaaaaatcccaggtgtagttgctttgtatgttgtgatgggtagaagggatgaaagtgaagtgttgaaggcccctcataccctccatcttgcctcgagactatgtcctggaaccctagaaaagagggggaaagacctggggcggagaaagcgccactttcatttcctgctttttgggattgttgacggccacgtagtgataggagaacgacaaggcaagaaggagcgacacgcccagtatgttgtgatgggtagaagggatgaagtgaagtgtgaaggcccctcataccctccatcttgcctcagactatgtcctggaaccctggggcggagaaagcgccactttcattcctgcttcttgggattgttgac

SEQ ID NO: 126373 - DNA, 2148 bp, Homo sapiens
atgccccaacccccaggccacagaccagcaccagtccatggcctgttaggaaccaggcgcacgacaggtggtgagcagcagagctctgattatacaaaaccaggagacattgaccctacatcagtagcaagtcccaaagatccagaagatataccaacatttgatgaatggaagaagaaagttatggaagtagaaaaagaaaaaagtcagtcgatgcatgcatcttctaatggaggttcacatgccaccaaaaaggtccagaaaaatcgaaataattatgcctcagtagaatgtggtgccaaaattctagcagctaatccagaagccaagagcacatctgctattcttatagaaaatatggatctttacatgttgaatccttgcagcactaaaatttggtttgttattgaactttgtgaaccaattcaagtaaaacagcttgatattgcaaattatgaattattttcttctactcctaaagattttctggtttctatcagtgacagggtatttggcactagcatggtggaagaatatgaagaaattgctgattcccagtatcactcagaacgccaggaactatttgatgaggactatgattatccactggattataatactggagaggataaatcctcaaaaaatcttcttggttctgctacaaatgccattctaaatatggtgaatattgctgctaatattctgggagcaaaaactgaagacctgacagaaggaaataaaagtatatctgagaatgccactgccacagctgcacctaaaatgcctgaatcaactcctgtttcaactcctgttccatctcctgagtatgtaaccactgaagtacacacacatgacatggagccgtcaacaccagatactccaaaagagagtcccattgtacagttagttcaagaggaggaagaggaggcaagtccatctacagtgacccttctgggcagcggtgaacaggaagatgaatcatcaccctggtttgagtcagagacacaaatattttgcagtgaactgaccacaatttgttgtatttctagtttttcagaatacatatataaatggtgttcagttagagttgctctttatcggcagcgcagccgaactgctttgagtaaaggaaaagattatcttgtgttagctcaaccacccttactacttcctgcggaatcagtagatgtttcagtattgcaacctctgagtggagaattggaaaatacgaatatagaaagggaagctgaaactgttgttctgggtgatttaagtagtagtatgcaccaggatgacttggtgaatcacactgtagatgcagttgaacttgaaccaagccattctcaaactctttctcagtctcttcttttagatattaccccagaaatcaatcccttgcctaaaatagaagtatctgagtctgttgaatatgaggcaggacatataccgtcaccagtgattccccaagagagttctgttgagatcgataatgaaacagaacaaaagtctgagagctttagttctatagagaaaccatctattacctatgaaacaaataaagttaatgagttaatggataatattataaaagaagatgtgaactccatgcaaattttcacaaagctgtctgaaacaatagtgccaccaataaatacagccactgtacccgacaatgaagatggggaagccaaaatgaatatagctgacacagcaaagcaaactttgatttctgttgtggattcttcttcattacctgaagtaaaagaagaagaacagtctccagaagatgcccttttgagagggttacagaggacagctacagatttttatgctgaattgcaaaattctacagatctaggatatgctaatggaaatcttgtacatggatcaaaccaaaaggagtcagtatttatgagacttaataatcgtattaaagccttagaagttaacatgtctctcagtggtcgctatctggaggagcttagccaaaggtaccgaaaacaaatggaagaaatgcaaaaggctttcaataaaacaatcgtgaaacttcagaatacttcaagaatagcagaggagcaggccctggtgtgtgatgttccccaccctgtgtccaagtattctcattgttcaattcccacctatgagtga

SEQ ID NO: 126374 - DNA, 1884 bp, Homo sapiens
atggccttcctagaaacttctgcacccctgtatgaacacatatggacacttcaggttgctttctccactgttggtctgggagagaccctgaaagttgccatgatcagcatgtccacatcatctgggtattttcttcagctattacaatactgctgctcctcaaccatcaccatcactggatacaagggcttcctaagagacctgaaggtggagacaagggccgatggtgtaatgaggacaatggctcccgaaaagctgctaaagagtatgccaatactacagggacaaattgatgcactgcttgaatttgatgtgcatccaaatgaactaacaaatggtgtcataaatgcagcatttatgcttcttttcaaagatcttatcaaactttttgcttgctacaatgatggtgttattaacttactcgggacatggatgaagctggaaaccatcattctcagcaaactattgcaacgacagaaaaccaaacactgcatgttctcactcataggtgggaatcgaacaatgagaacacttggacacaggaaggggaacatcacacaccagggcctgttgtgggaaaagttttttgaaatgaagaaaggacaatgtaaagatgctctagaaatttacaaacgatttctaactagaatgacacgagtgtctgaatttctcaaggttgcagagaacctagaacagagccttgaccctctgaaagcgctcagaaacgaaaccgatcaactatatacaacattcaccacagtcaacccttacgggaaaaaagaatgtaaaaacaaaaagccctatccaaatgaaagcaaattgacaaagaaaaagaaaagccagctccctcagacgagaaggaatcagctcaagaacttaggcaatgcaaaaaatgcagaaaaagcatttgacaaattccagcatccgtttatgattaaaacgcttagcaaaactggcatacaagggacgtacatcaatataataaaagccatctatgacaaacccacaaccagcataatactgaatggggaaaagttgatagcatttcctctgagaactggaacaagacaagaatgcctactctcaccactcctcttcaacatagtaccggaagtcctagccagagcaatcaaacaagagtacgaaatggcatccaaattgcaagttggtattgataaaggtgacattcctgacctcacacagtcttctccagccacaactgttacgtctcctaattctacaccagctaaaactattgacacatccccaccggttgatttatttgcaactgcatctgcggctgtcccagtcagcacttctaaaccatctagtgatctcctggacctccagccagacttttcctctggaggggcagcagcagccgcagcaccagcaccaccaccacctgctggaggagccactgcatggggagcacagatttcagatccatttgcaccagaacctacccctcctactacaactgctgaaattgcaactgcctcagcttctgcctccactactacaactgttactgctgtcactgctgaagtggatctctttggagggcattttgagaatatggtaaagaaattggaggaagaaaatggtgaaagcaagagagatttggcaggctttggtgtaatcaatatgtacccctgggaacatacatttaacacactgtcacctaccactctgctacatgccatgctccagtctctaaggttggccaacatcatccaagacaaggagcactccactagacacagctttgttgccactgctgcacaaaagacattttctgctgccttgctgtccattcctatggaacaggagaaacctgtttgtaaaagagtaggagaaaaaggattgcagacccttgaataa

SEQ ID NO: 126375 - DNA, 1074 bp, Homo sapiens
atggtgaactataccattcagagctttcaaccctacctgcaggagcattccatccagtatgaacaagataaattccaggaactccgtgataaacagcccagtctcctcaattataccacaaaatggctaaccaaggcagccacagacatcactacactgtgtctgagttctcctgactcacctagctcctcctgcagcatggcatgttcacttccaaactggggaggtaacaactcagagcccaccagtccaacaatggtgctataccaaggctacctgaacctcctcctctgggatcctgaaaatgaagaattatctgagactctgctgatggacagaatctggctccaggaactggcattccagttgcaccagttaactgtcctggcctcagtcttgctagtggccagaagcttctctggtgaagttttattcagatcacctgaatttgtggatatactgaaatgcaccaccaaggccctaactgaggaatttatctccagggacatggatggagctggacaccatcattctcagcaaactatcgcaaggacaaaaaaccaaacaccgcatgttgtcactcataggtgggaattgaacaatgagaacacttggacacaggaaggggaacatcacacactggggcctgttgagtctctgctacactttcctggaggcctcattctcattgaaggggagctggcagaactgggttggaagtttgtcattctgaagtatcataatcagcaggtatttggcccgtactatgctgagatcctaaaaaacatcatccatccagctcaagcacaagaaacagatagtgctgcaccccagccatggcaacaggagagaaagctgaatgagaatccagtgggccctccggtttcccttcactggctgatcattcttcagtatgctggcctgagccagaatcagggcatcaggcattcagctaaggacaggtctcagcttccacgggatttctctttctttcaagtgattctaggagtcactcctagtctggggctccaactgccaggttatgaatatcagctgactcagcatcacaaatga

SEQ ID NO: 126376 - DNA, 500 bp, Homo sapiens
ccactccgaagtgtgtgggttgctagaaacccacccggctttgcttttgttgaatttgaagatccccgagatgcagctgatgcagtccgagagctagatggaagaacactatgtggctgccgtgtaagagtggaactgtcgaatggtgaaaaaagaagtagaaatcgtggcccacctccctcttggggtcgtcgccctcgagatgattatcgtaggaggagtcctccacctcgtcgcagagtcaccatcatgtctcttctcaccaccctctgaatctgcattagccagtcaactagccctttcagcgtcatgtgaccagcgcgccccattcagcttggctggtgtcgtttcacatgacccaggctggccagtcgtcaggttgcaccgccctttggttcccgagcatgctgttttctctcagccttctctccaaccttaaccaaatcggcagcagccacctcgaccgcccacacaattcctggccaatcagctcagctgtt

SEQ ID NO: 126377 - DNA, 362 bp, Homo sapiens
cagaggcggggtgggagtggggctcccgaggcagtgcagttggctgtagctgggcgcctcggttaggtgcgctgtcagtcctttccgagtgcctggcccagtctctcccgcctcggcccaacatggacttcagagaaattctcatgatagcttccaagggacaaggtgtcaacaatgtgccgaaagggacctgctccagctgtgagagaagcttctccttcttggagatctgcgacgaggtggaggactactcctacgataatcatcttgagggcgacgaccccaggagggaggccctggtgtgtgatgttccccaccctgtgtccaagtgttcttattgttcaattcccacctatgagtga

SEQ ID NO: 126378 - DNA, 1180 bp, Homo sapiens
atggccatactgcccaaggtaatttatagattcaatgccatccccatcaagctaccaatgactttcttcacagaattggaaaaaactactttaaagttcatatggaaccaaaaaagagcccacatcgccaagtcaatcctaagccaaaagaacaaagctggaggaatcatgctacctgacttcaagctatattacaaggctacagtaaccaaagcagcatggtactggtaccaaaacagagatatagaccaatggaacagaacagagacctcagaaataatgccacatatctacaaccatctgatctttgacaaacctgacaaaaacaagaaatggggaaatgattccctgtttaataaatggtgctgggaaaactggctagccatatgcagaaagctgaaactggatcccttccttacaccttatatgaaaattaattcaagatggattaaagacttaaatgttagacctaaaaccataaaaaccctagaagaaaacctaggcaataccattcaggacataggcatgggcaaggacttcatgtctaaaacaccaaaaacaatggcaacaaaagccaaaatggacaaatgggatcaaattaaactaaagagcttctgcacagcaaaagaaactaccatcagagtgaacaggcaacctacagaatgggagaacattttcgcaacctactcatctgacaaggggctaatatccagaatctacaatgaactcaaacaaattgacaagaaaaaaccaaacaaccccatcaaaaagtgggcgaaggatatgaacagacacttctcaaaagaagacatttatgcagccaaaagacacatgaaaaaatgctcatcatcactggccatcagagaaatgcaaatgaaaaccacaatgagataccatctcacaacatttagaatggcgatcattcaaaagtcaggaaacaacagggacatggatgaagctggaaatcatcattctcagcaaactatcgcaaggacaaaaaaccaaacaacacatgttctcactcataggtgggaattgaacaatgagaacacatggacacaggaaggggaacatcacacaccggggcctgttttgagggatttgaaaacttgtacagtaagaacatgcacattagttactcaaatacaaaatgtgaagagttctttgggggagaatcctg

SEQ ID NO: 126379 - DNA, 7893 bp, Homo sapiens
ggtcgacttttttttttattattattattattattattattattattgttacattaggttctagggtacatgtgcacaacgtgcaggtttgttacatatgtatacatgtgccatgttggtttgctgcacccgtcaactcgtcatttacattaggtatgtctcctaatgctatccctccccgcttccctgaaccccggcaggccccggtgtgtgatgttccccaccctgtgtccatgtgttctcattgttcagttcccacctatgagtgagaacagtgtggcgattcctcaaggatctagatctagaaataccatttgacccagccacccccattactgggtatatacccaaaggattataaatccatgctgctataaagacacatgcaaaccgtatgtttattgcggcactattcacaatagcaaagacttggaacccaaccccaaaatgtccatccaatgatagactggattaagaaaatgtggcacatatacacccatggaatactatgcagccataaaaaaggatgagttcatgtcctttgcagggacatggatgaagctgaaaactatcactctaagcaaagtatcacaaggacagaaaaccaaacaccgcatgttctcactcataggtgggagttgaacaatgagaacacatggacacagggcgggcaacatcacacaccagggcctgttgaggtgtgggggactttgcaaaggattcctcagttgtctgcagctgatcttctctgtccctagagtcaggtaaactggggctgaaggccatgaggtcggtcttgggtgggccctcaccagagcacaccctcggcctcctctgctgcgagtatgaccagctccccaccgcactggagcacaccagcgtgggcttgcccggagcgcacgcgccctcggtgggcagcgcagagcaccgcagcgcggtgtacagcagcagcgtgagcaccaaaaggctggacaccgcgcagatggcaatgatcaggtatacgttgacatccaccagcgcagcatcgggacccacagcgcccaccaacgcccgtgaggaggcctttggcgcctgtccactctccacaagtgacaccagcacagtggccgtggccgtcagcgcgggctcgccgtggtccttcaccagtaccagtaggcggtggcgcggagcgtccgtttcgtccagggcacgcgttgtgctgatctcgccagtgtacagccccacgcggaacgggatgcgcgcgccaccagtccccggctgcagctcgtacgaaagccacgcgttgtagcccgagtcagcatccaccgcgcgcacctttgccaccacgtggcccacacccaccgaccatggcaccagctcgctcactgcgccaccagtgccacccgcccgaggcgctagcagtgctggcgcgttgtcgttttcgtccagcacgaacacctgcagcgtcacgttgctgcccagaggtggcacgccggcatcgcgagcggtcacctgaaactgcagcagctctagctcctcgtggtccagcggctgcagcgcgtacaccttgccgctctccgcatgcaccgaaacgtagctcgacagcgcgcgctcccctacccgccgctctaccagcgagtaggacaccagcgcgttctcctgcgcgtccgcgtcccacgcagacacagtgaagatgtggcagcccggcgggttgttctccttcacgaacactgtgtactcgggctgcgcgaacgccggagcgttgtcgttcacatcagccacctccacagaaacactggccgtggcccacagcgaaggcgagcccccgtctcgcgcggtcaccaccagctcataggctgacacgctctcgcggtccagggcactgtccagcaccaacgagtagtaattcttgaaggtggacaccagcttgaaggggacgtgggacgtcaaggagcaggtgaccagcccattgacacccatgtctttgtcggacacgctgatcagggcgatgactgtacccagtggagcgtcctctctaattggaagtgataaagacttgaattccaaatctgggacattatcgttgttgtcttctacttccacaataactctacaatggccagaaagtgggagctgtcccttatcaatgccctctacaataatttcataggatttgctttcttcaaagtcaatatatccctttacaataatttgtccagtaattggatctatgtgaaacttggatttcacatttggcgaaatatcatttgagaatgaataaacaatgtccccattcaatccttcgtctaaatctgaggcgttaagtttaattaccaatgttccattaggaacattttctagtaatctcaccttataaatggttctgtcaaaagctggggcattgtcattggcatccagtactgtgatgagtaactgaacggtgccagtcaactcgggtttgcctccatcagtggctgtgagcactaaaaaaatctccggagcttcttctctgtctaaagatttccgtaatataagcccaagaccttttaccagctcgtcatcaggtggtttttccagagaaaagtattcatttgggctcagtctgtaagtgagcagggcgttctccccgatatctgcatccgaggcgccctctagtggaaaccgagagtcaagcggcctggattccgcgatggacaggttcttttgtgttgctgggaacaccggcgggttatcgttaatgtccctcacctccacgtccacatggaaaacctgcagcggcctgtctacgatcacctccaggtggatgctgcactccgcgctccgccggcacagctcctcccggtcgatccgagaattcacaaacaaaatgccattctgcagatttacctccagaaggcctccgcggcccttggacgccacccggaacaggcgcggcaccagctccgccagctccagtcccaggtcctgcgcgatgcggcccacgaaggtgccgtgtttggcctcctcggagaccgagtagtggagctgaccgttccctgcctcccaggctgcgaggagaagaagtaagagcagcagacgccgggattcctggccgcttccccaggaaaactccatctttagtgcacagtattttgttctgattaaatatcgtttctcaaagtcaagggaaattttggctgagagatcaacgtccacatcctgtttctcctctctatcccggctaattggacaaggaggaaggctagggctaaaagccatgaggtcggtcttgggcaacccctctccagagcacaccctctgctgcctctgctgcgagtatgaccagctccccaccgcgctggagcacaccagcgtgggcttgcccggcccacagtcgccttcggttggcggcgcggagcaccgcagagcagtatatagcagcagtgtgagcaccaacagactggacaccgcgcagatggcgacgatcaagtacacgttgacatccaccagtgcagcttccgggcccgtggcgccagcggacgcctgggacgaggccttgggtgcctggccactctccaccagcgacaccagcacagtggccgtggcggtcaatgagggttcaccgtggtccttcaccagcaccagtaggcgatggcgcggggcgtccacctcgtccagggcacgggtcgtgctgatctctcccgtgtacagccccacgcgaaacgggatgcgcgcaccgccggtcccaggctgcagctcatacgaaagccacgcgttgtagcctgagtctgcatccactgcgcgcaccttcgctaccacgtggcccgcacccactgaccgcggcaccagctcgctcactgcgccaccgatgccacccacccgaggcatcagcagtgccggcgcgttgtcgttctcgtccagcacgaacacctgcagcgtcacgttgctgcccagaggcggcacgcccgcatcgcgcgcactcacctggaactgcagcagctctagctcctcgtggtccagcggctgcagcgcgtacaccttgccgctctccgcgtgtaccgacacgtagctcgacagcgcgcgctcccccacccgccgttccaccagcgagtaggacaccagggcgttctcctgcgcgtccgcgtcccgcgcagacaccgtgaagatgtggcagcccggcgggttgttctccttcacgaacaccgtgtactcggactgcgagaatgccggcgcattgtcgttcacgtcggccacctccacggacacgctggccgtggcccacagtgaaggcgagcccccgtcccgagcagtcaccaccagctcataggccgacacgctctcgcggtccagagggctgtccagcaccaatgagtagtaattcttgaaggtggacaccagcttgaaggggacgtggggcgtcagcgagcaggtgacctgtccattgactcctgagtcgcggtcggacacgctgatcagagcgatgactgtgctaagtggagagtcttctaatacaggtaaagatagtgattgaataactaactcaggtacattatcattgatgtccacaatttcgagtagaactgtgcagtgatctgacattgggggatttcctttatccgtggcttctacctggatttcatatgacttactttcctcgaaatctatgttaccctttacactgatttgtccattgactggatctaaatggaattttgacagaatatctgctgacatgtccgtattgaaagaatacgcgatatccttatttactccttcatccaaatcggtggcgttaacggtcaccactagggtaccatttggtgcattttcgagtaatctgactttatagatcgtcctctcaaacgctggggcgttgtcgtttacatctaaaacagtgatctttagttgagtcgtgccagtgagctctggtttcccaccatcaattgctgttattagtaaataatgcttaggagtgtcctctcgatttaaattttttttcaacacgagtccaagggatttaatttcctcatcatttcttttaacgtccaaggtaaaatattcagtggaatcaagactgtaagtcaacaacgaatttgttccgatatctgcatctgatgcgccctctagcgaaaaccgagagccaggctgtcgggattcggaaataaacagattctttacagccattggaaaaactggcgcgttgtcattaatgtccttcacttccacctccacatggaaaacctgcagcggcctgtccacgatcacctccaggtggatgctgcactccgcgctccgcccgcacagttcctcgcggtctatccgagaattcacaaacaaaatgccattctgcagatttacctccagaaggtccccgtgtcttttggacgccacccggaacaggcgcggcaccagctccgccagctccagccccaggtcctgcgcgatgcggcccacgaaggtgccatgcttggcctcctcagagacggagtagtggagctggccgctccccacctccgaggcactttgctgaatttttaaagatggtagctttcctacgtattctgattctgagagctgtttctcttctgcggagtctggaccttgagataagctagggctgaaggccatgaggtccgtcttgggggggtcctccccagagcacaccctctgccgcctctgctgcgagtaagaccagctccccacggcgctggagcacaccagcgtgggctttcctggcgcgcgcgcaccctcggtgggtggcaccgagcaccgcagcgcagtgtacagcagcaccgtgagcaccaacaggctggataccgcgcagatggcgatgatcaggtacacgttgacatccaccagcgtagcctctgagcccgcggcgcccacccacgcccgcgacgaggccttgggtgcctggccactttccaccaacgacactaacacggtggccgtggctgtcaacgctggttcgccgtggtccttcaccagcacgagtaggcggtgtcgaggggagtcagcctcgtctagggcacgtgtcgtgctgatctcacccgtgtatagccccacgcggaacgggatgcgagcgctgccagtacccagctgaagctcgtacgaaagccacgcgttgtagcctgagtcagcgtccactgcgcgcaccttcgccaccacgtgccctgcacccaccgaccacggcaccagctcactcactgcgccagcagcggtgccagccctaggcgccaacagtgccggcgcgttgtcgttctcgtccagcacgaacacctgcagcgtcacgttgctgcccagaggcggcacgcccgcatcccgcgcgctcacctggaactgcagcagctccacttcctcgtggtccagcggctgcagcgcgtacaccttgccgctctccgcgtgcaccgaaacgtagctcgacaacgcgcgctcgcccacccgccgctccaccagcgagtaggacaccagcgcgttctcctgcgcgtccgcatcccacgctgacaccgtgaagatgtggcagcccggcgggttgttctccttcacgaatactgtgtactcaggctgtgcgaacgccggcgcgttgtcgttcacgtcggccacctcgatggacacgctggtggtggcccacagtgaaggcgagcccccgtcccgtgcggtcaccaccagctcataggctgacacgctctcgcggtccagggcgctgtccagcaccaacgagtagtaattcttgaaggtggacaccagcttgaaagggacgtggggcgtcagggagcaggtgacatgtccattcgtaccagagtcgcgatccgacaccgtgatgagagcaatgacagtgcccagggaagcgttctctgagatgggaagtgagagagacgttattgagacttctggtgtgttatcattgatgtccacaagttttaatgaaattttacaatgtcctgacattgaaggggttcctttgtcagttgcagtgacctgaatctcgtaggactttgcttcttcataatctaattttcccttagttctgatttcccctgagatgggatctatggtaaacttagtctgtatagtggaggacacatcactaccgagtgaatacacaatctcgctgttcggtccttcatctgcatcagaagcgtttaacttaaccactaaggtcccatttgccgtattctctaacaattttactttgtaaactgattgggcaaaagttggttcattgtcatttacatctaataccttaataagtatttgaacggtgcccgtgagctcaggtttgcccccatcagtagccaccagtaacaaattaacctcagcagtttcctctctgtccagcgatttccccagcacgagagacaaagattcgcttagttcatcatttgcctgtatatctaggaagaaaaactcactggagctgagcttgtaggagagaagagcatttactcctatatctgcatcagatgctccctctagaggaaaccgagaatcaagcagccttgattcgggaaaccggatagtctttactgtcattggaaatattggcgggttgtcgttaatgtccttcacctccacttccacatggaaaacctgcagcggcctgtccacgatcacctccacgtggatgctacattccgcgctccgcccgcacagctcctcccggtcgatccgagaattcacaaacaaaatgccattctgcagatttacctccagaaggtccccgtgtcttttggacgccacccggaacaggcgcggcaccagctcctccagctccagccccaggtcctgcgcgatgcggcccacgaaggtgccgtgtttggcctcctcggggacggagtagcggagctggccgctccccacctcccaggctgcgaggagcagaagcgagagcagccgtgtccaggcccctcggccccttctgatagaagacgccat

SEQ ID NO: 126380 - DNA, 842 bp, Homo sapiens
cgtggacgccgggtgagtgagagagttggttggtgttgggccggaggaaagcgggaagactcatcggagcgtgtggatttgagccgccgcattttttaaccctagatctcgaaatgcatcgtgattcctgtccattggactgtaaggtttatgtaggcaatcttggaaacaatggcaacaagacggaattggaacgggcttttggctactatggaccactccgaagtgtgtgggttgctagaaacccacccggctttgcttttgttgaatttgaagatccccgagatgcagctgatgcagtccgagagctagatggaagaacactatggtggcctgccgtgtaagagtgggaacttgtccgaatgggtgaaaaaaagaagtagaaatcgtggcccacctccctctttggggtcgtcgccctcgagatgattatcgtagggaggagtcctccacctcgttcgcagatctccaaggaaggagaagcttctcttcgcagccggagcaggtccctttcttaggagatagggagaaagagagagatcgctgttttcggggagagaaaatcacaagccgtcccgatccttctctaggtctcgtagtcgatcttaggtcaaatgaaaggaaatagaagacagtttgcaagagaagtggtgtacaggaaattacttcatttgacaggagtatgtacagaaaattcaagttttgtttgagacttcataagcttggtgcatttttaagatgttttagctgttcaaatctgtttgtctcttgaaacagtgacacaaaggtgtaattctctatggtttgaaatggatcatacgaggcatgtaataccaagaatg

SEQ ID NO: 126381 - DNA, 2402 bp, Homo sapiens
atggatgaagctgcaaaccatcattctcagcaaaccatcacaagatccgaaaaccaaacacctcatgttctcactcataagtgggagttgaacaatgagaacacatggacacagggaggggaacatcacacaccagggcctgtcaggggtaccttgggacaactgacatttgcaagacttaacctgagccccatcagttacaagagtttggaggcctcagctgtcacttctgtttccatggaaactcaaatcagattgccaaaaatgaggttttggtatcaggatgatgctggcctcataaaatgtgttggggaggagttgctctttttctattgtttggaaccatttcagaaggaatggtaccagctcctctctgtacctctggtagaatttggctgtgaatccgtctggtcctgggctttttttggctgggacatggatgaagctggaaaccatcattctcagcaaactaacacaggaacagaaacccaaaacacttgcatgttctcactcataagtgggagttgaacaatgagaacacatggacacagggaggggaacatcacacaccagggcctgttgggggatgttcacttatccaagtggaaatcagatggtttatcgaaatggtatgtaagagagaagtttacagatacgaccattcatggtggtggcagttgcagcaacagcagcaggatccccagggcagactgcaggcctctgggggctgggctctcagaagggtgccaggccacagccaaaatgctcaggcagaagcaaggtggctgtactgtgagcctagggaaggcaggtcccccttagcgggaacagtgaaagcaagggtgctcaatgtgcttgctcctttaccctgcagcagcagcagccgtgatacacatttttgggcttcctcaggcatgagccaaatatcagacactctatccctcaaactccaagagaccctcacgttcctcaacatccttctcttccaaagaaagggagaggggaagaacagcatgtcaacaacactctccaaagaattcctgactctcagcttctttgacttcaacctgtttcaaaactcaatgttggaagttctggccagggcaattaggcaggagaaggaaataaagggtattcaattaggaaaagaggaagtcaaattgtccctgtttgcagatgacatgattgtatatctagaaaacccccttgtctcagcccaaaatctccttaagctgataagcaacttcagcaaagtctcagaatacaaaatcaatgtacaaaaatcacaagcattcttacacaccaataacagacaaacagagagccaaatcatgagtgaactccccttcacaattgcttcaaagagaataaaatacctaggaatccaacttacaagggatgtgaaggacctcttcaaggagaactacaaaccactgctcaatgaaataaaagaggatacaaacaaatggaagaacattccatgctcatgggtaggaagaatcaatatcgtgaaaatggccatactgcccaagaccattacttttaacactttcatcaaccctgaaagtcaaaagcattctaacataagctacaaccttcttgtccttgtattacacctttctacagaaagagaaaataaaaatgagttgagtttacaggttgctgacaagtttggtgaaatgtctgctggagaaagaggcaaaatgacccaaaaggaaactcccgggcctgttgactctgagcaagctggggcagaacgcttccgagggctctctggagctcagacggcgctcagcgaacaactttttgacgtgaaggaagatagaaatttagccataaaattccatccaaaacttccactgaattggagtgaaagggaagcaatgcagaaatcagagggctctggaggtacacagttgaaaaacagagcaacaggtaactatgatcaaaggacatcatcaagcacacagttaaaacacaggaatgcagttcagggaagcaaatcctcattgtcaaccagttctccagagtctgcaagaaaacttcatcctagaccaagtgataaactgaaccctaaaacaattaatccgggtctgagagagactaagcatccatacacttttgtgtcaaaggagggttttagagaattacttttggtcaaaggtgctcctgaaaaagctattcctttgctacctagactgattcctgtgctaaaggcagctctggtccattcggatgatgaagtgtttgaaagaggattgaatgctctagttcagctaagtgtcgttgttggtccttctctaaacgaccatctgaagcatctgcttacaagcgccctggtgtgtgatgttccccttcctgtgtccaagtattctcattgttcaattcccacctatgagtga

SEQ ID NO: 126382 - DNA, 4152 bp, Homo sapiens
tcagcctcctgagttgtcctcttcagcatcccccaggtgacgtccggggcttgtgtcatccatggaagcctcatcgtctggggctgtggatcctgtagggtcagttccttcatctccggtaccaggttggatccagactgctgcttttccatgtttaccagaaccatcagtaaacagtgttaaagcattaggtatgggggagtgaactatttttgtgggtaagattaccagggtatgagataagaaataaaggagtttatcagcaggaagtatgtgctctatttgtcctgtgtaatcagagaaagctatttgcagattaatagatactggcaatactgctttgaattgctttttacttaaaggaatcctgatgacatcagggtcataacctagtgactgattgcattgtttgtggcctgaatagatgactttagtaagtaactgactatagggagatagtgttttagtcccggtatgtggcaaaaaacccattctaggaagcatagcccgggggccatctgtcctattaaccctgtaggggagtgtttggtgagaaagataaaacaattggattgaataacgtggatcaatgcgatctagctgcccctgagagacggcttgttctatttcctcaatttccctttttgctgcaggggttaaatatccaaagccaagtttctggccagttttgatcactaatgattgaaatgtctgcccctgtgcccagtaagccagtaaaattcttatttccaatttcttcatgggtccttgatcagtgattaattgattccaatatactcctgtggctcctgtgctcccaaaacttcccttccccctttcctttccatagagactggggacccagtatgataaaatcagtaactgagctatctttgatccagggggaagaatatgcagacctttacagtccatcataaccaatatctctctgtgataatcactatcaattaccacggtgagcacattaattcctttactagataggctagaccaccctaggactaatcccactgttcctggaggcagcaggccccagatcccggttgcaacccttttagggtcttctccttcttttagcattaatttgttgaggcagagtaagtccagtcctgtgctccctgtggtggctgctctgagagagaggactgtgggcttcccatctgatcgaggaaagctgctggcattgccccagttgcgagcggggcctggggcttgctccttgatgaggggatcaaggtagcggatgctgtgagcatcatgagtcaccagatgagggattccttttgtgcccacaaagatttttctcactttacccaatttgtacttagcctcctcgggtgtaatacgatgtacagcaaagcgacccttggtgtcatagatcagatggaaattatctcccgtcttgtcaatgctgatgacatccatgaatccagcagggtaggttatatcagttcgtaccttgccatcaaccttaatgaacccctgcatgcaaatctttacttcatctcctgtcagggcatacttaagtctgttccttaggaaaatgatgagggggagacactctctcaacttgtgaggacagagttggttttctgattccttctcatttgggtaggctctgtcagagggaaggtctagggctgaaggctgttgttcagattcttttgtcctgcagggtgttctcttgatgtagtactctcccccttttcctatggatgtggcttcttgctctcccacttcatggagacttctgagcttggattcttccattttctctgaatctagctcttcaactagagctatccccgcatcctggcttgatgccatactcaattctttgttgggagctgagtaccaaggcaccagtttgcggccatcacggcgcttagcctcagtccaggagccactgtaggagcctgccatccactgaacactgaagccactgctggttttctgcactactcttgcaatttgtggtcgatctttgtactttggacagcaaatagcgatgacatccatgacgtcaacactttcattcatctgtgctgccaactccgtagagtctgaatttcgttttgaccttctcaatgaccctgaagtgcctcctcctctatcctccccatcactttcatcatcttctgtctctgctgctgtattatttttagggctgcctcctccaagcagtgaggtaattgctttgttccgagcatttgtgctagctgaaacctccccttcttcttcttcttcatcagggtccagatgttccatgagaagtttgaaatctagatactgttttactatactccttttcacctcttctgtgattttggaattagccatgtcactccgcaggaagtccagtgtttgttttggatgaaaatgaactcctgtttttcggtttatcgctttatcatatacttttgcagattcagatggagagtacttctgaattttactatcagaaaatccacaaagattcttcaaatgttgttttaacatgagaagtaataaaataccctgggacacatttgcaaattcgattaaaggagctgaattttctggcaaacatttcatcactgaatttatatcgtcttctgaatctgaatctgaatctgaatctacacgtttccgtgacttccgaggcctggaaacttcttcttcactgtcgcttgactcattttccttactaggtgatgattttctctctttccttttgtcctttaccatagatgctgtgtcatcaaagaggttgagtaaagaaataagaaaggctcgtctgtgttggcggtttccacggatcatggagtaaaggtgtgaacacaaagcgctagaggactcgtcttgtctgaaaccccttacaggatcttttaggcatgtgttgattgcctgttgtacctggtaagacatcttcataccagccactgctttcatatgaatgaatccagcatattttttgtctatttccacaagttgctgatcagccttgttccgcatagcaggttctgggtctgtgcccatagcaattaaatatggcacacactgaactggatgaataagaccttgatttagagtcaatgcaatgacatttagggcaaagtggcgtacacttgactgggtgtgaaaaaatgcctcaagcacctgtttgagataaagctgcatgatggaactactcatccctgaggaaacatcacccatttcttttaagtcttcctgttttgcaactttcttccagtctctatctgcctgctgcatacgtgtatcttcttcttgtaggtaggtctggaggttttttaacacttgtatttttaaattgactgaggagttcttatcagataaaatattattatatagattcttcacttcttgctcgaacattagacttggatgctgaataaaggcaaatcctagaccaatgatagcttttgtttgtacttcttcatctgagtgttttgtaaaatacatcaatagttcaagtactttatcttttatgttaaccttgctgttgcctttaaaatcttccagatcaaaatcaaaatgccgacatagtgctccaacggtgaaaagggatctaagaagtgctggtttgtttgttagaagtgaagtgttatttgggtcctcttggtgttgactttttaattttgaaatggcaccatagtatctattgaaacaagcccacacaaatttaaaattttgtgtcactttatttacaacagctccaagacagctcacacaatgttgcactacagtcatgccatatttgatgatgagcttcattagatcttcctcaatagtggcaagaaaagtttcacttggatgctccatcagtggtacaactagctctaggatttttgcaacattgcagataaccatgaaatcattttgcgtactacatttagtggtaaggtatggttgcatagtcattgcatgtttaaccatgagctggggtcttattttgctgaataagaacaaagtggttatgcaagctaccaatcttccagaattcacacctttattgtcagagtcagctagagattcctcatatttaagaatgtgctcaactaggttatcaacaagttgagtacaagctttcttcacaggtttatatgaggaatcctcttcggacttcaacaa

SEQ ID NO: 126383 - DNA, 3801 bp, Homo sapiens
atgagaacagacacaacataccagaatctctgggacacattcaaagcagtgtgtagagggaaatttatagcactaaatgaccacaagagaaagcaggaaagatccaaaattgacaccctaacatcacaattaaaagaactagaaaagcaagagcaaacacattcaaaagctagcagaaggcaagaaataactaaaatcagagcagaactgaaggaaatagagacacaaaaaactcttcaaaaaattaatgaatccaggagctggttttttgaaaggatcaacaaaactgataaaccactagcaagactaataaagaaaaaaagagagaagaatcaaatagacgcaataaaaaatgataaaggggatatcactaccaatcccacagaaatacaaactaccatcagagaatactacaaacacctctatgcaaataaactagaaaatttagaagaaatggataaattcctcaacacatacactctcccaagactaaaccaggaagaagttgaatctctgaatagaccaataacaggatctgaaattgtggcaataatcaatagcttaccaaccaaaaagagtccaggaccagatggattcacagctgaattctaccagaggtacatggaggaactggtaccattccttctgaaactattccaatcaatagaaaaagagggaatcctccctaactcattttatgaggccagcatcatcctgataccaaagctgggcagagacacaaccaaaaaagagaattctagaccaatatccttgatgaacattgatgcaaaaatcctcaataaaatactggcaaacagaatccagcagcacatcaaaaagcttatccaccatgatcaagtgggcttcatccctgggatgcaaggctggttccatatacacaaatcaataaatgtaatccagcatataaacagaaacaaagacaaaaaccatatgattatctcaatagatgcagaaaaggcctttgacaaaattcaacaacgcttcatgctaaaaactctcaataaattaggtattgatgggacatatttcaaaatgataacagctatctacgacaaacccacagccaatatcatactgaatgggcaaaaactggaagcattccctttgaaaactggcacaagacagggatgccctctctcaccactcctattcaacatagttttggaagttctggccagggcaattaggcaggagaaggaaataaagggtattcaattaggaaaagaggaagtcaaattgtccctgtttgcagatgacatggtatgtctagaaaaccccattgtctcagcccaaaatctccttaagctgataagcaacttcagcaaagtctcaggatacaaaatcaatgtacaaaaatcacaagcattcttatacaccaacagacaaacagagagccaaatcatgagtgaactcccattcacaattgcttcaaagagaataaaatacctaggaatccaacttacaagggatgtgaaagacctcttcaaggagaactacaaaccactgctcaaggaaataaaagaggatacaagcaaatggaagaacattccatgctcatggataggaagaatcaacatcgtgaaaatggccatattgcccaaggtaatttacagattcaatgccatccccatcaagctaccaatgactttcttcacagaattggaaaaaactactttaaagttcatgtggaataaaaaaagagcccgcatcaccaagtcaatcctaagccaaaagaacaaagctggaggcatcacactacctgacttcaaactatactacaaggctacagtaaccaaaacagcatggacctggaagacccccttgccaaataccgtgggtgccccaactgcggaagtgggaaagggagaaccccgcctctcccaaacacacacccccactggagaagctgaagaacaggcgctggtatccacggctgagagacccatagatggctcacatcacaggactctgtgcacacacccccccagtagaagccaagagccaagtagactcactgagtggctagacccagaagagagacaacaatcactacagctaggctcacaggaagacacacccataggaaaagggggagagtactacatcaagggaacaccccgtgggacaaaagaatctgaacaacagccatcagccctagaccttccctctgacagaggctacccaaatgagaaggaaccagaaaaccaactctggtaattaatatgacaaaacaaggctctttgacactccccaaaaaatcacactagctcaccagcaatggatccaaaccaagaaaaaaatccctgattaacctgaaaaagaattcaggaggttagttattaagctaattagggaggcaccagagaaaggtgaagcccaatgcaaggaaatccaaaaatcaatacaagaagtgaagggagaaatcactcagggaaatagatagcttaaagaaaaaaacaataaaaagttcaggaaactttggacacacttttagaaatgcgaaatactctggaaagtctcagcaatagaattgaacaagcagaagaaagaaattcagagcttgaagacaaggtctttgaattaacccaatccaacaaagacaaagaaaaaagaataagaaaatataaacaaagcctcaaagaagtatgggattatgttaaaggaccaaacctaagaataatcagtgttcctgaggaagaagagaattctaaaagcttggaaaacatatttggggaaataatcgaggaaaacttgcccagccttgctagacacctagacattctaaatacaagaagcacaaagaatacccaggaagttcatcgcaaaaagatcttcacccaggcacactgtcatcaggttatccaaagttccaaagttaagacaaaagaaagaatcttaagagctgtaagacagaagcaccaggtgactcacctaacatgtaaggagtcatataaacttaaagtaaaagggtggaaaaggcattttatgcaaatggacaccaaaaatgagcagggaattaaaaatgaaaatcacttgatcatctcaatagatgtagaaaaagcatctgacaaaatccagcaacgctttatgattaaaactcacaaaatcggcatacaagggacatacctcaatgtaataaaagccatctatgacaaacccacagcaaacataacactgaatagggaaaagttgaaagcattccctctgagaactggaacaagacaagaacatctgctctcaccactcctcaacatagtactggaagtcctagccagagcaatcagacaagagaaagaaataaggggcacccaaatcggtaaagaggaagtcaaactgtcactgttcgctaatgatatgatcatctacattgaaaatcctaaagactcctccagaaagctcctggaactgataaaagaattcagcaaagtttctggatacaagattaatgtacacaaatcagtagctcttctacacaccaccagcaaccaagcagagaatcaaatcaagaacccaacccctattataatagttgcaaaaaaaatcaaatactcaggaatacacctaaccaaggagtcaaaagacctctacaaggaaaactacagaatgctgctgaaagaaatcatacatgacacaaacaaatggaaacacatctcatgctcatggatgggtgcaatcaatattgtgaaaatgaccatactgctaaaagcaatctacaaattaaatgcaatccctatcaaaacatcaccatcattcttcatagaattagaaaaaaaatgctaa

SEQ ID NO: 126384 - DNA, 258 bp, Homo sapiens
atggcccattacaaagccgccaacttgaagcgtgagcagttccggaggtacttggagaagtcaggggtgctggacacactgaccaaggtgttgcatcacttaggaactgctaccccagaaaatccagaaatagagctgctgtgcctagaactggcgaaaacgaaagagaaatataaagctattgtagaaaaaaataaaaaactgaaagcaaagcttgctcagtatgaaccacctcaggaggagaagtatgctgaatag

SEQ ID NO: 126385 - DNA, 557 bp, Homo sapiens
atgtcgcgccgacctgaattcccggatcgacgatttcgttcccaacccgtcagtcgcggtctccggcgccagctacgccgttgccgctgtgactatggcccattacaaagccgccgactcgaagcgtgagcagttccggaagtactttgaaaaagtcgggggtgctggacacgctgacccaaggtgttggtagccttatatgaagaaccagaagaaacttaacagtgctttggatttttttaaagcatcacttaggagctgctactcccagaaaatccagaaatagagctgcttcgcctagaactggccgaaatgaaagagaagtatgaagctattgtagaagaaaataaaaaactgaaagcaaagcttgctcagtatgaacccacctcaggaggagaagcgtgctgaattaggattcttctcagtttgaaagacaatgaaaaatggtttttgtatggacttggaatagtttgtatagtattataatcttttctgaacagatgctatagaactcttttaatatgtttaattcacctatcacactctgttaaaaacac

SEQ ID NO: 126386 - DNA, 860 bp, Homo sapiens
  misc_feature (1)...(860): n = a,t,c or g
ttttttttttttttttttaagcattttggttatttttagttaaaagaaaaaccagctttgctccaaaggcgaccaaagtgaaacctaaaggtcagaaggaagctgggttccgggctttcctgcaagactcttgcctcccaaaaacctggaaattgaggagagggccgcttccggagcttctggggaaaggttggtgcaacaacaggggttcccgttggtgggggccgaagaagaccccccagccccaccacacggtccaactggattgggtgtgaagtggggttccccaaacgaactgcccatgtggctaagtcccacttgaccatgaattggaccatttaaccaattccttgggggggcaattaaaaattaaggaaatggacacagggaacccaaacagagtggccttaattcggtttggattcctgaattcaacaaatcaggaaaatagtcctttancctgggtgcaaacccataatttcatttttccttgggagcgaatttcgaaggaaggtgaagatcgttcctgggggtcgatgttcaacgcaccggtgctccgtgcccttcaggatgaagctagtgcatgaaggctggcatactagggtggtaggtgggggtgtcccattgtgctcttgatgggaaatgcccttctgtgttncacgacgatgatttccctgcacttcccttctggcttctgcagtcgctttcagtgtctcctccaacctctgcccagggtggagtgcagtggtgcagtcacggctcactgtagccttgacctcctgggctcaggcgatctctccacttcagccatttccgaccgatccggtagccccgcgtagcgaacacttagcgagtcctgt

SEQ ID NO: 126387 - DNA, 450 bp, Homo sapiens; identical to SEQ ID NO: 119663
  misc_feature (1)...(450): n = a,t,c or g

SEQ ID NO: 126388 - DNA, 2037 bp, Homo sapiens; identical to SEQ ID NO: 119665

SEQ ID NO: 126389 - DNA, 327 bp, Homo sapiens
atgggggagtcctggaggattggatttggagggatcaagtttgtggttctagcagatcctaggcaagctggaatagattctcttctccgaaagatttatgagatttactcagactttgccctcaagaatccattctattccttagaaatgcctatcagtgctccagccggtgaggagtaccagctggagaatccttttgtcctagtaaccccggcaacgggatgcctaatctcagacccccagcagccccaaaggttccacccagaacttgtggctgcccagagctcagctccgaatcccaacctggaacctccgctgggggaatga

SEQ ID NO: 126390 - DNA, 989 bp, Homo sapiens
attcggcacacggggcaaggcagcgatggcgatttttagtgtgtatgtggtgaacaaagctggcggcttgatttaccagttggacagctacgcgccacgggctgaggctgagaaaactttcagttatccgctggatctgctgctcaagctacacgatgagcgtgtgttggttgctttcggccagcgggacggcatcccgagtgggtcatgcagtgctggccatcaatggcatggacgtgaatggcaggtacacggccgacgggaaagaggtgctggagtatctgggtaaccctgctaattacccggtgtccattcgatttggccggccccgcctcaacttctaatgagaagcttatgctggcctccatgttccactcgctctttgccatcgggctcccagctgtctcctgaaccagggaagctcaggcattgagatgctggagacagacacattcaaattgcactgcctaccagacactgacagggatcaagttttgtggttctaagcagatcctaggccaagctggaatagattctcttctccgaaagatttatgagatttactcagactttgccctcagagaatccattctaattccttagaaatgcctatcaggtgtgagctctttgaccagaacctgaagctagctctggaggtggcagagaaggctggaacttttggacctgggtcataggctgaacctgttatggacccccaaattctgagagttcctgcaacaagaatactgctgttggacactccagtggaaatcccagcagccttgttagtgcacttgaaagtgggagaatgctgaccctggatgacttgtactgattcctgagccttaacactgtgctctttccttctgtatataccatggtcttactttccaactctgtacagatttatttatggaggagctaggtccataaatgttgtaataaatattcctttgatcttggtgtttgcaaaaaaaaaaaaaaaaaaa

SEQ ID NO: 126391 - DNA, 1660 bp, Homo sapiens; identical to SEQ ID NO: 123526

SEQ ID NO: 126392 - DNA, 1117 bp, Homo sapiens
gagtacagaaacccaacagacagtggaggttagtgcaagatctcaggatcatcaatgaggctgttgtccctctataccaagctgtacgtaacccttatactctgctttcccaaataccagaggaaacagggtggtttacagtcctggaccttaaggatgcccttttctgcatcgctgtacatcctgactctcaattcttgcttgcctttgaagatcctttgaacccaacgtctcaactcacctggactgttttaccccaagggttcagggatagcccccatctatttggccaggcattagcccaagacttgagccagttctcatacctggacactcttgtccttcggtacgtggatgatttacttttagccgccccttcagaaaccttgtgccatcaagccacccaagtactcttaaatttcctcgccacctgtggctacaaggtttccaaactaaaggctcagatctgctcacagcaggttaaatacttagggctaaaactatccaaaggcaccagggccctcagtgaggaacgtatccagcctatattggcttatcctcatcctaaaacccgaaaacaactaagagggctccttggcatcacaggcttctgccaaatatggattcccaggtacagcgaaatagccaggccattacatacactaattaagaaaactcagaaagccaatacccatttagtaagatggacacctgaagcagaagcagcttttcaggtcttaaagaaggccctaacccaagccccagtgttaagcttgccaacggggcaagactttttccttatatgtcacagaaaaaacaggaatagctctaggagtccttacacagcactatggagaggaaaggaattcctgacttccgacggaatacctatcaaacatcaggaagccattaggagattattattggctgtacagaaacctaaagaggtggcagtcttacactgccagggtcatcagaaaggaaaggaaagggaaatagaagggaaccgccaagtggatattgaagccgaaaaagctgcaacgcaggaccctccattagaactgcttatagaaggacccctagtatggggtaatcccctctgggaaaccaaacccca

SEQ ID NO: 126393 - DNA, 421 bp, Homo sapiens; identical to SEQ ID NO: 122631

SEQ ID NO: 126394 - DNA, 4805 bp, Homo sapiens; identical to SEQ ID NO: 123522

SEQ ID NO: 126395 - DNA, 2226 bp, Homo sapiens; identical to SEQ ID NO: 117488

SEQ ID NO: 126396 - DNA, 3867 bp, Homo sapiens; identical to SEQ ID NO: 118520

SEQ ID NO: 126397 - DNA, 2186 bp, Homo sapiens
ctgatggcagtgtgggtcagggagggggtgttgccattactggggatggggaagctgtttcttctggcaaaaaagtttcatcagagtttacaaactcagtgtccccagctctatcagggtcctcccatacgtccccattccaagttgcagggtcccattcttttccaatcaatgccctcactttaacagtagacacctggtgagactgtgcatgcacctttcattgcaggtcagccacaaagattgttaaggacctaaaagcccaaggcctagtaaaaccatgcaatagcccctgcagtactccaattttaggagtacagaaacccaacggacagtggaggttagtgcaagatctcaggattatcgatgaggttgttgtatatgtggatgatttacttttagctgcccgttcaaaaaccttgtgccatcaagccacccaagcactcttaaacttcctcatcacctgtgactacaaggtttccaaaccaaaggctcagctctgctcacagaaggttaaatacttagggctaaaattatccaaaggcaccagggtcctcagtgaggaacgtattcagcctataccagcttatcctcatcccaaaaccccaaagcaattaagagggttccttggcataacaggcttctgccgaatatggattcccaggtacagcgaaatagccaggccattatacacactaattaagaaaactcagaaagctgatacccatttagtagaatggacacctgaagcagaagtggctttccaggctctaaaggaggccctaacccaagccccagtgttaagcttgccaatgggacaagacgttcctttatatgtcacagaaaaaacaggaatagctctaggagtcctaggagtcctgacacaggtccgagggccagcttgcaacccatggcatacctcagtaaggaaatggatgtagtggcaaagggttggcctcactgatattgaagccaaaagagccgcaaggtgggaccctccattacaaatgcttatagaaggactcctagtatggggtaatcccctccaggagaccaagccccagtactcagcagaagaaatagaatggggaacctcacgaagacatagtttcctcccctcaggatggctagccactgaagaaggaaaaataattttgcctgcagctaaccaatggaaattacttaaaacccttcaccagacctttcacttgggcattgatagcacccatcagatggccaaatcattatttactggacgaggccttttcaaaactatcaagcagatagtcagggcctgtgaagtgtgccaaataaataatcccctgccttatcaccaagctcctccaggagagcaaagaacaggccattactcaggagaagactggcaactagattttacccacatgcccaaatctcagggatttcagtatctactagtctgggtagatattttcactggttgggcagaggccttcccttgtaggacagaaaaggaccaagatgtaataaaggcactaattcatgaaataattcccagattcggacttccccgaggcttacagagtgacaatggccccgttttcaaggctacagtaacccagggagtatcccaggcattaggcatacaatatcacttacactgcgcctggaggccacaatcctcaggaaaagtcaagaaaatgaatgaagcactcaaacgacatttaaaaaagctaacccaagaaacccaccttgcatggcctgctctgttgcctacagccttactaagaatccaaaactctccccaaaaagcaggacttagcccatacaaaatgctgtatggatggcccttcctaaccaaggaccttgtgcttgaccgagagatggccagcttagttgcagacatcacctccttggccaaatatcaacaagttcttaaaacattacagggaacctgttcccgagaagagggaaagtaattattgcaccctggtgacatggtattagtcaagtcgccccagatgcagtccatggctaagatctaccacggacccctggaccggcctgctagcccatgctctgatgttgatgacattgaaggcacggcttccgaggaaatctcaactgcacgacccctactacaccccaatttagcgggaagcaattagagcagtcattggccaacctccccaacagcacttactcta

SEQ ID NO: 126398 - DNA, 1929 bp, Homo sapiens; identical to SEQ ID NO: 121630

SEQ ID NO: 126399 - DNA, 841 bp, Homo sapiens
atgcctgaaagccccactcccttgttagggagagacattctagcaaaagcaggggccattatacacctgaacataggagaaggaacacctgtttgttgtcccctgcttaaggaaggaattaatcctgaagtctgggcaacagaaggacaatatggacgagcaaagaatgcccatcctgttcaagttaaactaaaggattctgcctcctttccctaccaaaggcaatacccccttagacctgaggcccaacaaggactccaaaagattgttaaggacctaaaagtgcaaggcctagtaaaaacatgcaatagcccctgcgatactccaattttaggagtacagaaacccaatggacagtggaggttggtgcaagatctcaggattatcgatgaggccattgtccctctatacccagctgtacctaacccttatactctgctttcccaaataccagaggaagcagagttgtttacagtcctggaccttaaggatgcctttttctgcatccctgtacatcctgagtctcaattcttgtttgcctttgaagatccttcaatcccaatgtctcaactcacctggactgttttaccccaagggttcagggatagtccccatctatttcaccatacattagcccaagacttgagccagttctcatacctggacactcttgtcctttgcctcccgttgagaaaccaacaggagtgccatcaagccacccaagtgctcttaaatgtcctcgctacctgtggctacaaggtttccaaacaaaaggctcagctctgctcacagcaggttaaatacttaggggtaaaattatccaaagggaccagggccctca

SEQ ID NO: 126400 - DNA, 1428 bp, Homo sapiens; identical to SEQ ID NO: 117503

SEQ ID NO: 126401 - DNA, 309 bp, Homo sapiens
atggtggtggctgcttccaagatggtggcaagcctcgtgttctctgccctggggttcttggcctcacagattccaaggaatggaatcttgggccatgtggaactgtggcaagcctttagcccaatcaagagtggcaatgggtgccttgctggatcaagagcacagcagacaccctgccagatccagagggatagaagtcagcggcgggtctgcgactgcggccggcatcagtggtggacagcgagcgaaagctcagctcgagctgtaacaaacacggaccagaagagtgcagttgcaagatttaataga

SEQ ID NO: 126402 - DNA, 900 bp, Homo sapiens; identical to SEQ ID NO: 117494

SEQ ID NO: 126403 - DNA, 1650 bp, Homo sapiens; identical to SEQ ID NO: 117498

SEQ ID NO: 126404 - DNA, 1002 bp, Homo sapiens
gcggagcagggtttatctcctcagacaaaggtggaaaggctgatggcagtgtgggtcagggagggggtgttgccattactggggatggggaagctgtttcttctggcaaaaaagtttcatcagagtttacaaactcagtgtccccagctctatcagggtcctcccatacgtccccattccaagttgcagggtcccattcttttccaatcaatgccctcactttaacagtagacacctggcagtactgtgcatgcacccgaggccgatcaaggactccaaaagattgttaaggacctaaaagcccaaggcctagtaaaaccatgcaatagcccctgcagtactccaattttaggagtacagaaacccaacggacagtggaggttagtgcaagatctcaggattatcgatgaggttgttgtatatgtggatgatttacttttagctgcccgttcaaaaaccttgtgccatcaagccacccaagcactcttaaacttcctcatcacctgtgactacaaggtttccaaaccaaaggctcagctctgctcacagaaggttaaatacttagggctaaaattatccaaaggcaccagggtcctcagtgaggaacgtattcagcctataccagcttatcctcatcccaaaaccccaaagcaattaagagggttccttggcataacaggcttctgccgaatatggattcccaggtacagcgaaatagccaggccattatacacactaattaagaaaactcagaaagctgatacccatttagtagaatggacacctgaagcagaagtggctttccaggctctaaaggaggccctaacccaagccccagtgttaagcttgccaatgggacaagacgttcctttatatgtcacagaaaaaacaggaatagctctaggagtcctaggagtcctgacacaggtccgagggccagcttgcaacccatggcatacctcagtaaggaaatggatgtagtggcaaagggttggcctcact

SEQ ID NO: 126405 - DNA, 2220 bp, Homo sapiens; identical to SEQ ID NO: 117499

SEQ ID NO: 126406 - DNA, 8279 bp, Homo sapiens
atgtggggcagcgatcgcctggcgggtgctgggggaggcggggcggcagtgactgtggccttcaccaacgctcgcgactgcttcctccacctgccgcggcgtctcgtggcccagctgcatctgctgcagaatcaagctatagaagtggtctggagtcaccagcctgcattcttgagctgggtggaaggcaggcattttagtgatcaaggtgaaaatgtggctgaaattaacagacaagttggtcaaaaacttggactctcaaatgggggacaggagctgcatgctgtttcccttgaacaacatcttctagatcaaattcgaatagtttttccaaaagccatttttcctgtttgggttgatcaacaaacgtacatatttatccaaattgttgcactaataccagctgcctcttatggaaggctggaaactgacaccaaactccttattcagccaaagacacgccgagccaaagagaatacattttcaaaagctgatgctgaatataaaaaacttcatagttatggaagagaccagaaaggaatgatgaaagaacttcaaaccaagcaacttcagtcaaatactgtgggaatcactgaatctaatgaaaacgagtcagagattccagttgactcatcatcagtagcaagtttatggactatgataggaagcattttttcctttcaatctgagaagaaacaagagacatcttggggtttaactgaaatcaatgcattcaaaaatatgcagtcaaaggttgttcctctagacaatattttcagagtatgcaaatctcaacctcctagtatatataacgcgtcagcaacctctgtttttcataaacactgtgccattcatgtatttccatgggaccaggaatattttgatgtagagcccagctttactgtgacatatggaaagctagttaagctactttctccaaagcaacagcaaagtaaaacaaaacaaaatgtgttatcacctgaaaaagagaagcagatgtcagagccactagatcaaaaaaaaattaggtcagatcataatgaagaagatgagaaggcctgtgtgctacaagtagtctggaatggacttgaagaattgaacaatgccatcaaatataccaaaaatgtagaagttctccatcttgggaaagtctggcctaaagacataagtgaagaagacataaaaactgtattttattcatggctacagcagtctactaccaccatgcttcctttggtaatatcagaggaagaatttattaagctggaaactaaagatggtccttctagatcctatggtaaaagaagaaaacaaggagtgaattccttaggcgtatcctccttggagcacatcactcacagcctcctgggacgccctttgtctcggcagctgatgtctcttgttgcaggacttaggaatggagctcttttactcacaggaggaaagggaagtggaaaatcaactttagccaaagcaatctgtaaagaagcatttgacaaactggatgcccatgtggagagagttgactgtaaagctttacgaggaaaaaggcttgaaaacatacaaaaaaccctagaggtggctttctcagaggcagtgtggatgcagccatctgttgtcctgctggatgaccttgacctcattgctggactgcctgctgtcccggaacatgagcacagtcctgatgcggtgcagagccagcggcttgctcatgctttgaatgatatgataaaagagtttatctccatgggaagtttggttgcactgattgccacaagtcagtctcagcaatctctacatcctttacttgtttctgctcaaggagttcacatatttcagtgcgtccaacacattcagcctcctaatcaggaacaaagatgtgaaattctgtgtaatgtaataaaaaataaattggactgtgatataaacaagttcaccgatcttgacctgcagcatgtagctaaagaaactggcgggtttgtggctagagattttacagtacttgtggatcgagccatacattctcgactctctcgtcagagtatatccaccagagaaaaattagttttaacaacattggacttccaaaaggctctccgcggatttcttcctgcgtctttgcgaagtgtcaacctgcataaacctagagacctgggttgggacaagattggtgggttacatgaagttaggcagatactcatggatactatccagttacctgccaagtatccagaattatttgcaaacttgcccatacgacaaagaacaggaatactgttgtatggtccgcctggaacaggaaaaaccttactagctggggtaattgcacgagagagtagaatgaattttataagtgtcaaggggccagagttactcagcaaatacattggagcaagtgaacaagctgttcgggatatttttattagagcacaggctgcaaagccctgcattcttttctttgatgaatttgaatccattgctcctcggcggggtcatgataatacaggagttacagaccgagtagttaaccagttgctgactcagttggatggagtagaaggcttacagggtgtttatgtattggctgctactagtcgccctgacttgattgaccctgccctgcttaggcctggtcgactagataaatgtgtatactgtcctcctcctgatcaggatggaagttccagctctgatagtgacctaagtctgtcttcaatggtctttcttaaccatagcagtggctctgacgattcagctggagatggagaatgtggcttagatcagtcccttgtttctttagagatgtccgagatccttccagatgaatcaaaattcaatatgtaccggctctactttggaagctcttatgaatcagaacttggaaatggaacctcttctgatttggaggacgaatccatgaaccaaccaggaccaatcaaaaccagactggctattagtcagtcacatttaatgactgcacttggtcacacaagaccatccattagtgaagatgactggaagaattttgctgagctatatgaaagctttcaaaatccaaagaggagaaaaaatcaaagtggaacaatgtttcgacctggacagaaattctttgatgaaatcactgagctgacatacctgccctcttttcaccataaagctgctcctcaccaggccgagccaggtcccaattcttcctcagcctctgctcccccaccctataatccttttatcacctcctctcctcacactcagtccggcttacagtttcgttctgtgactagccctcccccatctgcccaacaatttcctcttaaagaggtggctggagctaaaggcatagtcaagacagctttagagactgctcccacactagctctccctgtctcatcccaacccttttcattacacacagccgaagtgcagggctgtgcagtcggaattcttacacaaggaccgggaccatgccctgtagcctttttgtccaaacaacttgaccttactgttttaggctcgccatcatgtctccatgcggtagcttccgctgccctaatacttttagaggccctcaaaatcacaaactatgctcaactcactctctacagctctcacaacttccaaaatctattttctttctcacacctgacgcatatactttctgctccccggctccttcagctgtattcactctttgttgagtctcccacaattaccattcttcctggcccagacttcaatctggcctcccacattattctggataccacacctgaccctgatgattgtatgtctctgatctacctgacattcaccccatttccccatatttccttcttttctgttcctcatgttgatcacatttggtttactgacggcagttccaccaggcctgatcgccactcaccagcaaaggcaggctatgctatagaatcttccacatccatcattgaggctactgctctgcccccctccactacctctcagcaagccgaactgattgccttaactcgggccttcactcttgcaaagggactacacgtcaatatttatactgactctaaatatgccttccatatcttgcaccaccatgctgttatatgggctgaaagaggtttcctcactacgcaagggtcctccatcattaatgcctctttaataaaaactcttctcaaggctgctttacttccaaaggaagctggagtcacacactgcaagggccaccaaaaggcgtcagatcccattactctaggaaatgcttatgctgataagggtgtccgctgtgctcctgatccagcgaggcgcccattgccgctcccaattgggctaaaggcttgccattgttcctgcacggctaaaattggaggaaaataccgggcacttgtcggccagttaaaaacgattagtgtggccaccggacttaagactcaggacaggacgatagatggttcctcccaggtgattgaggaaaaaaaccacaatgggtattcagtaattgatacggggactcttgtggaagcagagttagaaaaattgcctaataactggtctcctcaaacgtgtgagctgtttgcactcagccaagccttaaagtacttacagaatcaaaagactatctcaatcctgattcaaaaggaacccagcccagctctaggactcacccctgagcgcaaaggcaatgttgggcatgctggtaaaggaccactagaatccagcagcccagacccctttctttgtggtcaagaaaggcgggaaaaggggtgcaggactgctacatcggtaagcataactaatccgataaacagaggtccatgggtggttacgcaccctggaaaggaactcacccctgagcacaaaggcaatgttgggcacgctgggagagacattctagcaaaagcaggggccattatacacctgaacataggagaaggaacacccgtttgttgtcccctgcttgaggaaggaattaatcctgaagtctgggcaacagaaggacaatatggacgagcaaagaatgcccgtcctgttcaagttaaactaaaggattccacctcctttccctaccaaaggcagtaccccctcagacccaaggcccaacaaggactccaaaagattgttaaggacctaaaagcccaaggcctagtaaaaccatgcagtaacccctgcagtactccaattttaggagtacagaaacccaacagacagtggagaaaccttgtgccatcaagccacccaagcgctcttcaatttcctcgctacctgtggctacatggtttccaaaccaaaggctcaactctgctcacagcaggttacttagggctaaaattatccaaaggcaccagggccctcagtgaggaacacatccagcctatactggcttatcctcatcccaaaaccctaaagcaactaaggggattccttggcgtaataggtttctgccgaaaatggattcccaggtatggcgaaatagccaggtcattaaatacactaattaaggaaactcagaaagccaatacccatttagtaagatggacaactgaagtagaagtggctttccaggccctaacccaagccccagtgttaagtttgccaacagggcaagacttttcttcatatgtcacagaaaaaacaggaatagctctaggagtccttacacagatccgagggatgagcttgcaacctgtggcatacctgactaaggaaattgatgtagtggcaaagggttgacctcattgtttacgggtagtggtggcagtagcagtcttagtatctgaagcagttaaaataatacagggaagagatcttactgtgtggacatctcatgatgtgaatggcatactcactgctaaaggagacttgtggctgtcagacaactgtttacttaaatgtcaggctctattacttgaagggccagtgctgcgactgtgcacttgtgcaactcttaacccagccacatttcttccagacaatgaagaaaagataaaacataactgtcaacaagtaatttctcaaacctatgccactcgaggggaccttttagaggttcctttgactgatcccgacctcaacttgtatactgatggaagttcctttgtagaaaaaggacttcgaaaagtggggtatgcagtggtcagtgataatggaatacttgaaagtaatcccctcactccaggaactagtgctcagctagcagaactaatagccctcacttgggcactagaattaggagaagaaaaaagggcaaatatatatacagactctaaatatgcttacctagtcctccatgcccatgcagcaatatggaaagaaagggaattcctaacttctgagagaacacctatcaaacatcaggaagccattaggaaattattattggctgtacagaaacctaaagaggtggcagtcttacactgccggggtcatcagaaaggaaaggaaagggaaatagaagagaactgccaagcagatattgaagccaaaagagctgcaaggcaggaccctccattagaaatgcttataaaacaacccctagtatagggtaatcccttccgggaaaccaagccccagtactcagcaggagaaacagaatggggaacctcacgaggcagttttctcccctcgggacggttagccactgaagaagggaaaatacttttgcctgcaactatccaatggaaattacttaaaacccttcatcaaacctttcacttaggcatcgatagcacccatcagatggccaaatcattatttactggaccaggccttttcaaaactatcaagcagatagtcagggcctgtgaagtgtgccagagaaataatcccctgccttatcgccaagctccttcaggagaacaaagaacaggccattaccctggagaagactggcaactgattttacccacaagcccaaacctcagggatttcagtatctactagtctgggtagatactttcacgggttgggcagaggccttcccctgtaggacagaaaaggcccaagaggtaataaaggcactagttcatgaaataattcccagattcggacttccccgaggcttacagagtgacaatagccctgctttccaggccacagtaacccagggagtatcccaggcgttaggtatacgatatcacttacactgcgcctgaaggccacagtcctcagggaaggtcgagaaaatgaatgaaacactcaaaggacatctaaaaaagcaaacccaggaaacccacctcacatggcctgttctgttgcctatagccttaaaaagaatctgcaactttccccaaaaagcaggacttagcccatacgaaatgctgtatggaaggcccttcataaccaatgaccttgtgcttgacccaagacagccaacttagttgcagacatcacctccttagccaaatatcaacaagttcttaaaacattacaaggaacctatccctgagaagaggaaaagaatattccacccaagtgacatggtattagtcaagtcccttccctctaattccccatccctagatacatcctgggaaggaccctacccagtcattttatctaccccaactgcggttaaagtggctggagtggagtcttggatacatcacacttgagtcaaatcctggatactgccaaaggaacctgaaaatccaggagacaacgctagctattcctgtgaacctctagaggatttgcgcctgctcttcaaacaacaaccaggaggaaaaatcgaagctgtaaaactacaaatggagcccaagatgcagtccaagactaagatctaccgcagacccctggaccggcctgttagcccacgatctgatgttaatgacatcaaaggcacccctcctgaggaaatctcagctgcacaacctctactacgccccaattcagcaggaagcagttagagcggtcgtcggccaacctccccaacagcacttaggttttcctgttgagatgggggactgagagacaggactagctggatttcctaggctgattaagaatccctaagcctagctgggaaggtgaccacatccacctttaaacacggggcttgcaacttagctcacacctgaccaatcagagagctcactaaaatgctaattaggcaaagacaggaggtaaagaaatagccaatcatttattgcctgagagcacagcaggagggacaatgatcgggatataaacccaagttttcgagccggcaacggcaaccccctttgggtcccctccctttgtatgggagctctgttttcatgctatttcactctattaaatcttgcaactgc

SEQ ID NO: 126407 - DNA, 4349 bp, Homo sapiens
  misc_feature (1)...(4349): n = a,t,c or g
actgcactcttctggtccatgtttcttacggctcgagctgagcttttgctcaccgtccaccactgctgtttgccaccaccgcagacctgccgctgactcccatccctctggatcctgcagggtgtccgctgtgctcctgatccagcgaggcggcgcccattgccactcccagtcgggctagaggctcaccattgttcctgcacaggctaagtgcctggggttcatcctaatcgagctgaacactaatcactgggttccatggttctcttctgtgacccacggcttctaatagaactataacacttaccacatggcccaagattccattccttggaatccgtgaggccaagaactccaggtcagagaatacgaggcttgccaccatcttggaagcggcctgctaccgtcttggaagtggttcaccaccatcttgggagctctgtgagcaaggaccccccggtaacattttggcaaccaacgacggacatccaaagtgatgggaaacgttccccgcaagacaaaaacgcccctaagacgtattctggagaattgggaccaatttgaccctcagacactaagaaagaaacgacttatattcttctgcagtgccgcctggcactcctgagggaagtataaattataacaccatcttacagctagacctcttttgtagaaaaggcaaatggagtgaagtgccataagtacaaactttcttttcattaagagacaactcacaattatgtaaaaagtgtgatttatgccctacaggaagccttcagagtctacctccctatcccagcatccccgactccttccccaactaataaggaccccccttcaacccaaatggtccaaaaggagatagacaaaagggtaaacagtgaaccaaagagtgccaatattccccaattatgacccctccaagcagtgggaggaagagaattcggcccagccagagtgcatgtgcctttttctctcccagacttaaagcaaataaaaacagacttaggtaaattctcagataaccctgatggctatattgatgttttacaagggttaggacaattctttgatctgacatggagagatataatgtcactgctaaatcagacactaaccccaaatgagagaagtgccaccataactgcagcctgagggtttggcgtctctggtatctcagtcaggtcaatggatanggatgacaacagaaggaaaganaatgattccccacaggccagcaggcagttcccagtctagaccctcattgggacacagaatcagaacatggagattggtgctgcagacatttgctaacttgtgtgctagaaggactaaggaaaactaggaagaagtctatgaattactcaatgatgtccaccataacacagggaagggaagaaaatcctactgcctttctggagagactaagggaggcattgaggaagcgtgcctctctgtcacctgactcttctgaaggccaactaatcttaaagcgtaagtttatcactcagtcagctgcagacattagaaaaaacttcaaaagtctgccgtaggcccggagcaaaacttagaaaccctattgaacttggcaacctcggttttttataatagagatcaggaggagcaggcggaacaggacaaacgggattaaaaaaaaggccaccgctttagtcatgaccctcaggcaagtggactttggaggctctggaaaagggaaaagctgggcaaattgaatgcctaatagggcttgcttccagtgcggtctacaaggacactttaaaaaagattgtccaagtagaaagccccaggtatgcttgaccattgagagccaagaggttaactgtctcctggacgccggtgcggccttctcagtcttactctcctgtcccggacaactgtcctccagatctgtcactatccgaggggtcctaggacagccagtcactagatacttcttccagccactaagttgtgactggggagctttacccttttcacatgctttcctaattatgcctgaaagcctcactcccttgttagagagagagattctagtaaaagcaggggccattatacacctgaacataggagaaggaacacccatttgtcgtctcctgtttgaggaaggaattagtcctgaagtctgggcaacagaaggacaatatggacaagcaaagaatgcccattttgtccaagttaaactaaaggattccacctcctttccctatcaaaggcagtaccccctcagacccgaggcccaacaaagactccaaaagattgttaaggacctaaaagcccaaggcctagtaaaaccatacagtagcccctgcaatactccaattttaggagtacagaaacccaaaagacagtggaggttagtgcaagatctcaggattatcaatgaggctgtttttcctctatacccagctatacctagcccttatactctgctttcccaaataccagaggaagcagagtggtttacagtcctggatcttaaggatgcctttttctgcatccctgtacatcctgactctcaattcttgtttgcatttgaagatccttcaaacccaacatctcaactcacctggactgttttaccccaagggttcagggatagtccccatctatttggccaggcattagcccaagacttgagccagttctcatacctggacactcctgtccttcagtgcatggatgatttacttttagctgcccgttcagaaaccttgtgccatcaagccacccaagcgctcttaaatttcctcactacctgtggctacaaggtttccaaaccaaaggctcagctctgctcacagcaggttaaatgcttagggctaaaattatccaaagtcaccagggccctcagtgaggaacgtatccagcctatactggcttatccttatcccaaaaccctaaagcaactaagagggttccttggcataacaggtttctgccgaatatggattcccaggtacggcaaaatagccagaccgttatatacgctaattaaggaaactcagaaagccaatacccatttagtaagatggacacctgaagcagaagcagctttccatgccctaaagaaggccctaatgcaagccccagtgctaagcttgctaacggggcaagacttttcctcatatgtcacaaaaaacaaacaaacaaagaaaaaaaaaaacatgaatagctctaagagtccttgcgctggtctgagggacgagtttgcaacccgtggcatacctgataaggaaattgatgtagtggcaaagggtcagcctcattgtttacgggtagtggtggcagtagcagtcttagtatctgaagcagttaaaataatacagggaagaaatcttactgtgtggacatctcatgatgtgaatggcatactcactgctaaaggagacttgtggctgtcagacaaccatttacttaaatatcaggctctattacttgaagggccaatgctgcgactgtgcacttgtgcagctcttaacctggacacatttcttccacacaatgaagaaaagatagaacataactgtcaacaagtaattgctcaaacctatgccactcgaggggaccatttagaggttcccttgactgatcccaaccctaacttgtatactgatggaagatcctttgtagaaaaaggacttcaaaaagtggggtatgcagtagtcagtgataatggaatacttgaaagtaatcccctcactccaggaactagtgctcagctggcaaaactcactcgggcactagaattaggagaaggaaaaagggtaaatatatatacagactctaagtatgcttacctagtcctccatgcccatgcagtaatatggagagaaagggaattcctaacttctgagggaacacctatcaaacatcaggaagccattagggaattattattggccgtacagaaacctaaagaggtggcagtcttacactgccggggtcatcagaaaggaaaggaaagggaaatagaaaggaaccgccaagcagatattgaagccaaaagagctgcaaggcaggaccctccattagaaatgcttatagaaggacccctagtatggggtaatcccctctgggaaaccaagccccagtattcagaagaagaaatagaatggggaatctcacgaggacatagttttctcccctcaggatggcaagccaccgaacaaggaaaaatacctttgcctgcagctaaccaatggaaattacttaaaaccactcaccaaaactttcacttatgcattgatagcacccatcagatggccaaattgttatttactggaccaggacttttcaaaactctcaagcagatagttggggcctgtaaa

SEQ ID NO: 126408 - DNA, 344 bp, Homo sapiens
ctagatcattttgagtaattccatgtcatccacacacattggcctcccagtgttacaggaaaggggtctcgatccagaccccaagagagggttcttggatcttgcacaagaaagaattcagggcgagtccatagagtaaggtgaaagcaagttttttaagaaagtagaggaataaaagaatggctacttcataaacagagcagccccgagggccatgggttgcccatttttatgattatttcttgatgatatgctaaacaaggggtggattattcatgcttccccttttataccatatagggtaacttcgtgatgttaccatggcatttgtaaaccatcatggt

SEQ ID NO: 126409 - DNA, 912 bp, Homo sapiens
atggcaaagcttgctgtactagaggctttggaaagaagcatatgtggtcgttttgcaggaaacttggatttaactggccagaagcaggtattcaaagcagagaacaatccctgggtgacccccattgcagaccagttccagcttggcgtgtcccatgtttttgagtatatccgttctgagacatacaaatatgctgggattacaggcttgccgatacttccaccccgtggtgaagaagagggtgcagaggaatacagaggatgtaaggaagaatacgtgtggatcctgggacctgtgtggtcctgtgtaatggctcttggagttttgttacaggaaaggggtcccgatccagaccccaagagagggttcttggattttgcacaagaaagatccagggtgagtctgcagggcaaagtaaaaaagcaaagcggtgttcctgtgacggcagggtccccagtgcgttctgatcgggaaacccacgacacgtttccaactctgtacagaagcatcaaccatgacttggtaatgagaaagaaagtggacggaaatcaagacgagcaacaacaaacatcaacacatttgggttccagggtccctaaggttccaatcgtaatcagcatccaactgtctgctagcaaaccatttctaataattaatttggccatcacagagaaaactgtcacgttccacaggagagatgtgaaggcaagctcttgcatgacagctgcaatgtcatcaattggggggacggttccgagcgtgtctccagagggaagaattcagggcgccgccgtgtcgccagctcggctccttcgctacattgctggctacaccgcgctaaactctcccgcctctcggaccttgcgcgcccccctcggcccccccatagtaatagtgcccgcggccccctga

SEQ ID NO: 126410 - DNA, 1758 bp, Homo sapiens
ctatgatcggcgttcacagtgaccttcctcagagcacgtcctcaagttcttctgagtctgtgtggtcctgtgtaatggctcttggagttttgttacaggaaaggggtcccgatccagaccccaagagagggttcttggattttgcacaagaaagatccagggtgagtcctgctcagagccaaactgtacaacccagcccgtgccttcctgctctcctgcctggatgggaagtcggtctgctgtgaaagtgggcacgactgctactggatgtgaacctgggatgaatatcccctgaattcttccctctggagacacgctcggaaccgtccccccaattgatgacattgcagctgtcatgcaagagcttgccttcacatctctcctgtggaacgtgacagttttctctgtgatggccaaattaattattagaaatggtttgctagcagacagttggatgctgattacgattggaaccttagggaccctggaacccaaatgtgttgatgtttgttgttgctcgtcttgatttccgtccactttctttctcattaccaagtcatggttgatgcttctgtacagagttggaaacgtgtcgtgggtttcccgatcagaacgcactggggaccctgccgtcacaggaacaccgctttgcttcagtgagtttttgatgactgcttcatgtttctgggaggtatttcgttcctgtgcgtttctggagttttcatcttttgaaaaaaatgactcataagagcccttcatattgttagatttttactaatgctttcttgctggtttaattttaggttaagtctttcctatccacaacagcataggccttgttctccctcgtgcaatctcaaaagctcaaaaggcaattaaaaaaattcaggcggaggcatacatggcacctataaaaatgatatcaacgtctatccctaaaccaggggatgggacctgggggaaacccacttccccacaatttaaatgttctatcaggaaatttgtctagaagccagaagttttagaccttgctctgtggcctctctgattgaaatgcgaagtctgtttcctaagtaactcagaacttgtttgtttgattttgatttttgacttttttatatgccccagtgggtcctggtcttggggagctcaactgggaagccgaaaggattacagcagagattttatatgccccagtgggtcctggtcttggggagctcaactgggaagccgaaaggacacagcagagaagggcaggccccctctcccaggccatttgactctcccaggccatttgaaaagacggtgcatcttcacataccaatttttttgtgtcggccttctggggttgacagccctttcagtgagcacaaaacctcagcttgcatttattttgattttcgtaggtatcactgttgaaaagaaggaaagctgcctatcacagatgttaaacaaacaattgattgtttaatgactctgcaactgtggtttccaccctgggtgtggtgtagcgcgtgcacatttacacaacttccttggcatcgaagtcgcttagaagaatgcttcgatgcgagcagattttccgccgtgacaaaatacacagttgaggttttttctctctctctttcacagttcttgtctaccagcccctggcagaaatcaccatttcttccggcgaaggaatgctactttccaaaatcctttgggcagaatctcctaaaaaattgtttttcctgcttcctaaatttaaaaaagtct

SEQ ID NO: 126411 - DNA, 1083 bp, Homo sapiens
atggagaaggagaaagaggaggaggaggaggaagagagaagaaaagcggaggaggagaaggagggaaagaaggaaaatgaatggtggagaggagaggagagagttcttcaggctctttggaagcaccctttcatgctctcgactccaccaagggtgcgtgcacgaaactcccaagtggacattgagtgccagccattgtctctcaacatcccttcaaggggcaagagggtggttttcctgaagcagctggctagtggcttattacttgtgactggacctctggtcctcaatcgagttcctctacgaagaacacaccagaaatttgtcattgccacctcaaccaaaatcgatatcagcaatgtaaaaatcccaaaacatcttactgatgcttacttcaagaagaagaagctgcggaagcccagacaccaggaaggaggatctgaacacgaagcaatgagggagtggaaactgacctgtgtgaagggtgttcccagtaaggagaagtgtagaagtcctgagatggctgcttatgaagctgctcaaggaacaacagaagccaaggagacagagcaggcatattcacactgtaagaatgtactggaatccaatcacaccctcatcctcttcccaaaccacgaaaagtgcacagggcaaaaaatgcaccgggcaagaagacagcttatagaatgcaaagtacagcttataagagaggacaggaagaagtgtctggagatagttttcgttgtcacagctaaggagggggaggtgctacagacatctcctgagacatccaaattgttggccctggatttagatcttaacgccatttgttacacagcaccaattagggtacgtgtgcaggttggttacataggtaaacttgtttcctgggggtttgttgtacagattatttcatcacccaggtggaatagattagaaaaccgaagagccacactacacttatttcagccaaggactgaaactggagcctgccacaagcatcttctagaacagctccaacagaaggatccaggagatgggccaccagcaagtcatagtggagtccaaacaagtgtgaagtga

SEQ ID NO: 126412 - DNA, 993 bp, Homo sapiens
  misc_feature (1)...(993): n = a,t,c or g
aggttcccagaaagtctgtgcacagtggagatgccgaataccataaagtactgaaagaagaagcatcagatagtagagagaacaaagttggaacgacctggcttcaaatcctgagtggctcctttgctagccgtgtgactgagcacattactcagcctttgcaagagtcagtttccctgtggatatcctcagaacaaaatattcctcccaagtttatgggaagattaaataaattaagaaaggccacgtataagaggaagtactcagccgctaaatccaaggttgaaaagaaaaagaaggagaaggtttttgcaactgttacaaaaccagttgggtggtgacaagaacggcggtaccccgggtggttcaaactcgcaacactgcctagatatcatcctactgaagatgtgccccggaagattgttgagccaccgcaaaaaaacctctttagtcagcacgtgagaaaaactgcgaaaacagcattacccccggggaccattctgatcatcctcactggaacgccacaggggcaagaagggtggttttcctgaaaccagctggctagtggcttaatacttgtgcactgcacctctggtcctcaatcgagttcctctgcgaagaacacaccagaaatttgtcattgccacttcaaccaaaatcgatatcagcaatgtaaaaatcccccaagaaaaaaaanaaaaccccattncttactgatgcttacttgagagaagaagaagctgcggaagcccagacccccaggaagggtgagatcttcgacacagtaaaaagaggaaatatgaggattacggagacagcgcacgattgatcagaaagctgtggactcacaaattttaccaaaaatcaaagctattcctcaagctcccagggctacctgcggatcctgtgtttgctctgacggaatggaatttatcctcacaaattggtgttctaaatgtcttaagaaccctaattaagtagctgactacaaaa

SEQ ID NO: 126413 - DNA, 558 bp, Homo sapiens
gggtcaactaacacctcatacaggagagctctggctggcatctggtgggtgccctctggacgaagcttccagaggaaggagcaggctgcaatctttgctgttctgcagcctctgctggtgatactcaggcaaacagggtctggagtggctccccagcaaactccagcagacctgcagcgggaaaatgaacaaatgaaaaggaatagcatcaacatcaacaaaaaggacatccacacaaaaaccccagaaaccccatgcgaaggtcacaaacatcaaagaccaaaggattacaactccttgccagcaagggaacaaaactggacagagaatgagtttgatgaattgacagaagtaggcttcagaaagagggtaataacaaactcctccgagctaaaggagcatgttctaacccaatgcaagaaagctaagaaccttgaaaaaaggttagaggaattgctaagtagaataactagtttagagaagaacataaaagacctgatggagctgaaaaatgcagcacgagaactttgtgaaccatacacaagtatcagtagctga

SEQ ID NO: 126414 - DNA, 300 bp, Homo sapiens
atgaggaaaagccagtgcaaaaaggctgaaaattccaaaaaccaggacacctcttctcctccaaaggatcacacctccttgtcggcaaaggaacaaaactggacagagaatgagtttgacaaactgatagaagtaggcttcagaagggacatggatgaaggtgaaaactatcattctcagcaaactaacacaggaacagaaaaccaaacactgcatgttctcactcataagtgggagttggacaatgagaacacatggacacagggaggggaacatcacacaccggagcctgtcatgggg

SEQ ID NO: 126415 - DNA, 591 bp, Homo sapiens
atggccaaacaggaacaactccagtttgtagctcccagcaagatcaatgcagaaggcagagcacctcggggaaggggtggctgtgggcgcagcttcagcagacttaaatgttcctgcctgccagctctgaaaagagcagtggatttcccggcacagctttcaacctctgctaagggacagactgcctcctcagaaagtaacagcatcaacatcaaccaaaaggacgtccacacagaaactccatctgaacctcaccaacatcaaagacctaaggtagataaatccacaaagatgaggaaaaaccagcgcaaaaaggctgaaaattccaaaaaccagaatgcctcttctccaaaggatcacaactcctcaccagcaagggagcaaaactggatggagaatgagtttgatgaattgacagaagtaggcttcagaaggtgggtaataacaaactcctctgagctaaaggagcatgttctaacccaatgcaaggaaggtaaaaaccttgaaaaaaggttagaggaattgctaactagaataaccagtttagagaagaacataaatgacctgatggaactgaaaaacacagcatga

SEQ ID NO: 126416 - DNA, 267 bp, Homo sapiens
atgaggaaaaaacaggacaaaaaggctgaaaattccaaaaaccagaatgcctcttctcctccaaaggatcacaactccttaccagcaagggaacaaaactggatggagaatgagtttgatgaattgacagaagtaggcttcagaaggtgggaattgaacaatgagaacacatggacacaggaaggggaacatcacacactgaggactgttgtgggctggggggaggagggagggatagcattaggagatatacctaatgctaaatga

SEQ ID NO: 126417 - DNA, 873 bp, Homo sapiens
atggccgaatcggaacagctccagtctacagctcccagcaagatcaatgcagaaggcaggcaaacagagtctagagtggacctccagcaaactccagcagacctgcagcagaggggcctgaatgttagaaggaaaactaacgaacaaaaaggaatagcatcaacatcaacaaaaaggatgtccactcaaaaaccctatcagaaggatcacaactcgtcggcagcaagggaacaaaactggatggagaatgagtttgatgaattcacagaagtaggcttcagaagttgggtagtaacaaactctttcaagctaaaggatcatgttctaacccaatgcaaagaagctaagaaccttaaaaaaagaattggaaaaaactactttaaagttcatatggaaccaaaaagagcccacattgccaagaccatcctaagcaaaaagaacaaagctggaggcatcacactacctgacttcaaactatactacaagcctacagtaaccaaaacaacatgggacatggatgaagctggaaaccatcattctcagcaaactaacacaggaacagaaaaccaaacactgcatgttctcactcttaagtgggagttgaacaatgagaacacatggacacagggaggggaaggaacatcacacaccgaggccctgtccctgcaatcattcaaagaacagactccctcaactgtgcaatacaaacgaaagagaagtgacaggcactcagaggtcttggccaccaacatacgttcttgtgggacagtgccacaaaccttcaacccttacagccacaaggaactgtttgctgcctttggatttttcaggtccccaaatatgtctaaggtaaaagttggcactgaattctaa

SEQ ID NO: 126418 - DNA, 557 bp, Homo sapiens
agattgtgagtccatgttttgtctgttgtgcctataaaggaaatttgaaatctgtatcattctactataaagacacatgcacacgtatgtttattgcagcactgtttacaatagcaaagacttggaaccaaccaaaatacccacaaatgatagaccggataaagaaaacgtgacacatatacaccatggaatactatgcagccatagaaaaggatgagttcatattcttcacagggacatggatgaagctggaaaccatcatcctcagcaaactaacacaggaacagaaaaccaaacaccgcatgttctcactcataagtgggaattgaacaatgagaatacatggacacaggaaggggaaacaccacaccctggggcctgttggggggatgggggctaggggagggatagcattaggagaaatacctgatgtagatgatgggttgatgggtgcagcaaagtaccatggcacatgtatacctgtgtaacaaacctgcacattcagcacatgtatcccagaacttaaagtataataaaaataaataaataatttcagt

SEQ ID NO: 126419 - DNA, 240 bp, Homo sapiens
atggatgaagctggaaaccatcattctcagcaaactaacacaggaacagaaaaccaaacaccacatgttctcactcacaagtgggagttgacctatgagaacacatggacacaggactttaatgtgactacatcttggaatgacttcctgcctttgcaggaaacaggcagcttcctgactgagacggaagttactagtccttattgccggttcgttttcattgtcctggttgccctcaag

SEQ ID NO: 126420 - DNA, 298 bp, Homo sapiens; identical to SEQ ID NO: 124253

SEQ ID NO: 126421 - DNA, 590 bp, Homo sapiens
cccatcaaagtgacagcccagagcacaagatcatctttaataaaaccccaacttcaccgggaaagaggatggaaatcatagatgacgatgtacccagcttccacgccaatggctaccagagaaaggtgtcatctgtgtgggtgcggagtggcatgtgggttggctactagtaccctggctaccgtgggctgcagtacctgctggagaagggagactacaaggacagcagcgactttggggcccgtcaccctcagggacatggatgaagctggaaaccatcattctcagcaaactaacacagaagcagaaaaccaaacaccacatgttctcactcataagtgggagttgaacagtgagaacacatggacacaaggaggggaacatcacacaccgaggcctgtcagggagtgggggacaagagggagagagagcattgggacaaataccaaatgcatgcacggcttaaaacctagatgacaggttgatgggtgcagcaaaccaccatggcacatgtatacctgtgtaacaaacctgcacgttctgcacatgtatcccagaacttataataaaaaagaaaccagtaagtgctc

SEQ ID NO: 126422 - DNA, 529 bp, Homo sapiens
ctcctctttctgtacagattgcaaagggggtctccagagagtgtgtggagcaatattccttttttggaactttacttcttttttcacttctagttcttccctgagtgtggtcagaatcaggaagctgtactaaggctgctgtggtggaaccatcaaaaactccttctctttccctccactccccaactggccccggtttgtgatgttcccctccttgtgtgttctcattgttgagacatgtgagacttggatatgtactctcattgttcaactcccacttatgagtgagaacatgcggtgtttgattttctgttcctgtgttagtttgctgaggatgatggtttccagcttcgtccatgtccatgatcacaaggtgaagtcccacagtagaccgtctgcaatctgaggagcaaggaagccagtccgagtcccaaaacctcaaaagtagggaagctgacagtgcagccttcagtctgtggttgaaggtctcagagcccctgttgcctggactgtagagggcgttgcaagc

SEQ ID NO: 126423 - DNA, 1209 bp, Homo sapiens
atgtggtggtcatatgagaaggaaggccagcattctgtagtcttatggtcagatgatgaagtgtcagccttttacattcccatctccagggtatggggcaggagttttctcatcagacaagataggtcagatgacctttatggaaaggacatgaaggatgagctgcaaggaagctgctcaagatcacacagctcgggaaaaggaaaaagtagagctgaaatttccatcgctgcccttccgaaggaaagaactgctctagccatgcacctggctgggatcgccaatttcccttgttaccttggatttcccctggccccagggctcaggacgcttgtccatgcctgtcctatggacttgtcttatcccaggttccttagaaataggataatgggtctgctgtggtttgaatgcatttctgccaaaattcaggacatgggtgaagctggaaaccatcatcctcaacaaactaacacaggaacagaaaaccaaacactgcaagttctcactcataagtgggagttgaacaatgagaacacgtggacacaggaaggggaacatcacacaccgggcctgtcgggaggacaaagttctcatcatgggggattgccttccccagcacccttccagatagcatcagcagccactcccatagctagtgggaaagccagaatgctatcccctggtaaaggagcacatgtggcttgtgaaatcacaggagaagccagaactgcacagtctgctgggattgtgcaaaggcactggggctgctgtggtttacaccattgtgggcacaatggaggccatgccagagccctactctcacctcaaggacacatggctggtgctaggggaggaagaaaaagatggggtagcaacctgggctctgtattaaacaagcagcatggggataggtgggctgagcagaactggggaggtaaattaaccagtacagcactcgcctggtgtgggcagcttcactgtgcttgtctgcctgttcctgctcccccaagaatggagctgaaattcattaccctgctgtgtgtctcaatcattcatgtacctcatgagctttctggggcattagatgacagtcagatgaatgcaggggcaaacggaagagggcctgtagagacaccaggattccaaagtttcatagaaatggtgatgcagtatccgggagaattgaaaaccgagttatcacctagttga

SEQ ID NO: 126424 - DNA, 909 bp, Homo sapiens; identical to SEQ ID NO: 119785

SEQ ID NO: 126425 - DNA, 2192 bp, Homo sapiens
ggagaaaatttacagaaacccagagccaaaggtgctctcaggggatcccctgaaacattcaaagccattgcggccccagaagcttgggtaggcggggaagcagctggagtgcgaccgccgcggcagccaccctgcaaccgccagtcggaggtgcagtccgtaggccctggcccccgggtgggcccttggggagtcggcgccgctcccggggagctgcaaggctcgcccctgcccggcgtggagggcgcggggggcgcggaggatattcttggtgatcttggaagtgtccgtatcatggaatcaatctctatgatgggaagccctaagagccttagtgaaacttttttacctaatggcataaatggtatcaaagatgcaaggaaggtcactgtaggtgtgattggaagtggagattttgccaaatccttgaccattcgacttattagatgcggctatcatgtggtcataggaagtagaaatcctaagtttgcttctgaattttttcctcatgtggtagatgtcactcatcatgaagatgctctcacaaaaacaaatataatatttgttgctatacacagagaacattatacctccctgtgggacctgagacatctgcttgtgggtaaaatcctgattgatgtgagcaataacatgaggataaaccagtacccagaatccaatgctgaatatttggcttcattattcccagattctttgattgtcaaaggatttaatgttgtctcagcttgggcacttcagttaggacctaaggatgccagccggcaggtttatatatgcagcaacaatattcaagcgcgacaacaggttattgaacttgcccgccagttgaatttcattcccattgacttgggatccttatcatcagccagagagattgaaaatttacccctacgactctttactctctggagagggccagtggtggtagctataagcttggccacattttttttcctttattcctttgtcagagatgtgattcatccatatgctagaaaccaacagagtgacttttacaaaattcctatagagattgtgaataaaaccttacctatagttgccattactttgctctccctagtatacctcgcaggtcttctggcagctgcttatcaactttattacggcaccaagtataggagatttccaccttggttggaaacctggttacagtgtagaaaacagcttggattactaagttttttcttcgctatggtccatgttgcctacagcctctgcttaccgatgagaaggtcagagagatatttgtttctcaacatggcttatcagcagtctacacttggatatgtcgctctgctcataagtactttccatgttttaatttatggatggaaacgagcttttgaggaagagtactacagattttatacaccaccaaactttgttcttgctcttgttttgccctcaattgtaattctggatctgtctgtggaggttctggcttccccagctgctgcctggaaatgcttaggtgctaatatcctgagaggaggattgtcagagatagtactccccatagagtggcagcaggacaggaagatccccccactctccaccccgccgccaccggccatgtggacagaggaagccggggcgaccgccgaggcccaggaatccggcatcaggaacaagtctagcagttccagtcaaatcccggtggttggggtggtgacggaggacgatgaggcgcaggattccattgatcccccagagagccctgatcgtgccttaaaagccgcgaattcctggaggaaccctgtcctgcctcacactaatggtgtggggccactgtgggaattcctgttgaggcttctcaaatctcaggctgcgtcaggaaccctgtctcttgcgttcacatcctggagccttggagagttccttgggagtgggacatggatgaagctggaaaccataattctcagcaaactaacacaggaacagaaatccaaacactgcatgttctcactgataagtgggagttgaacaatgagaacacatggacacagggaggggaacgtcacacaccagggcctgtcgggggtgggaggcctagcaattcattagaattacctgtgaagcttttaaaatgtaaggtttggatggaatgctcagaccctaccttagacccaattaagcccacagctttgagg

SEQ ID NO: 126426 - DNA, 439 bp, Homo sapiens
cttgtggctgtaagggttgaaggtttgtggcactgtcccacaagaacgtatgttggtggccaagacctctgagtgcctgtcacttctctttcgtttgtattgcacagttgagggagtctgttctttgaatgattgcagggacagggcctcggtgtgtgatgttccttcccctccctgtgtccatgtgttctcattgttcaactcccacttaagagtgagaacatgcagtgtttggttttctgttcctgtgttagtttgctgagaatgatggtttccagcttcatccatgtcccatgttgttttggttactgtaggcttgtagtatagtttgaagtcaggtagtgtgatgcctccagctttgttctttttgcttaggatggtcttggcaatgtgggctctttttggttccatatgaactttaaagtagttttttccaatt

SEQ ID NO: 126427 - DNA, 538 bp, Homo sapiens
acatgcacatgtgtgtttattgcagcactatttacaatagcaaagacttggaactgatcaaaatgcccatcaatgagagattggataaagaaaaatgtggcacatacacaccatggaatactatgcagccataaaaaggaatgagttcatgtcctttgcagggacatggatagagctggaaaccatcatcctcagcaaactaacacaggaacagaaaaccaaacactgcatgttctcactcataagtgggagttgagcaatgaggacacatggacacagggaggggaacatcacacaccggggcctgttggggggtgaggggccaggggagggacagcattaggacaaatacctaatgcatgcggggcttaaaacctagatgatgggttgataggtgcagcaaaccaccatgacacatgtatacctatgtaacaaacctgcatgttctgcacatgtatcccagagtgtaaagtaaaataaaaaataaaaattaaacacaaataacatttctaataaaacacagctcttatctgttcta

SEQ ID NO: 126428 - DNA, 395 bp, Homo sapiens
atgataggatcaaaaatcaatgaaattgaacataaaaaacaacagagaaaaatcaaagaagcgaagacccggttctttgtaaagatcaataacaaatctctagcaagacaaagaaaaaacagagaagacaatataagaactgaaataagggacatggatgaagctggaaaccatcattctcagcaaactaacacaggaacagaaaaccaaacactgcatgttctcactcataagtgggagttgaacaatgagaacccatggacacagggaagggaacatcacacaccggggcctgtgagggggtggaggaatgtggatcttcagacaagtttgatcagttcccagctgtcatctgtacagccacacgacagtgcctttcttaccattatgagtaa

SEQ ID NO: 126429 - DNA, 1421 bp, Homo sapiens
gagagagcacctggcggaagggatggctgtgggcacagcttcagcagacttaaacatttctgcctgctggctccgaagagagcaacagatctcccagcacagtgctcgagctttgctaagggacagactgcctcctcaagagaactccagctggcatccggcaggtgcccctctgggacgaaacttccagaggaaggagcaggcagcaatctttgctgttctgcagcctccactggtgatacccaggaaaacagggtctggagtggacctcgagcaaactccagcagacctgcagaagaggggcctgactgttacaaggaaaactaacaaacagaaagcaatagcatcaacatcaacggaaaggacgcccacgcagaaacccccattcaaaagtcaccaacatcaaagaccaaacgtagataaatccgcgaagatgaggaaaaaccagagcaaaaaggctgaaaattccaaaaaccagaatacctcttctcctccaaaggatcacaactcctcgccagcaagggaacaaaactggatggagaattgagtttgatgaattgacagaagtaggcttcagaaggtgggtaataacaaactcctctgagctaaagaagcatgttctaacccaatgcaaggaagctaagaaccttgaaaaaagggacatggatgaagctggaaaccatcattctcagcaaactaacacaggaacagaaaaccaaacaccgcatgttctcactcataaatgggagttgaacaatgagaacacacggacacggatatacaagaagcatggtgctgccatctgcttggcttcagggatctaccattctgtggatctgccattctggggtctggatctaccattctgggatctggaggacagtggatctaccattctggggtctggaggacagtggccctcttctcacagctccactaggcagtgcaccagtgtggattctgtgtgggggctttgatctcacatttccttctgtactgccctttattccagttcccaacaagttctttatctccattgagatcgcttcagcctgaactttattgtccatatcactatcagcattttggtcaaagccattcaacaagtctctaggaagttccaaactttcccacatcttcctgtcttctgagctctccaagtctctaggaagtacaaacctctgcctgttacccatttcaaagtcacttccacattttctgtatcttgggaagaggattctagtttctatggctaggcttgggggagcatgggagagtgagaaaatgcggtgtttggttttctgttcctgtgttagtttgctgagaatgatggtttccagcttcatccatgtgcctgcaaaggacatgaactcatccttttttatggttgcatagtattccacggtgtatatgtgccacat

SEQ ID NO: 126430 - DNA, 1012 bp, Homo sapiens
atggatctgtccgcctgggtcctcccgccctgggggccggagcgcgcggcgggagagccgggggagcgctctcggagggagcgcgctttctttggagtcggcgaaacccgggtgagttcgaagagcctgtgcgagggtctgcgggcaccgggcgccgctggggggactctccggcctttcctttttgtcctgttctctccgcttccgttaaccctgcggaccttccgtccgcccctcggagggaagcctgctagctcgggaccgcttcagtttttattgaaaccagacaacggcagcccttggtactcagggagggatgaggctggtgggaaagcgagagggcggggactcgggggcgaccggggcggccctttctgggagcctgatccctggagaggcgggacgggttggctgcgagggaggcgcgcggcggggggggcggttgtgctctgcgccgggggagctagagtgtgtgttgtcttgcgagttgtaaggaaaagtgcctttttactgtttccacgccgggacatggatgaagctggaaaccatcattctcagcaaactaacacaggaaccagaaaaccaaacaccgcatgttctcactcgtaagtgggagttgaacaatgagaacacatggacacagggatggggaacatcacaaacccagggcctgttgaggggtggggggtggggggcaagggaagggagagcatcaggccaaatacctaatgcatactggggcttaaaacctagatgatgggttgacaggttgatgggtgcagcacaccaacatggcagatgtatacatatgtaacaaacctgcacgctgtgcacatgtaccctaaaacttagagtccaataaaaaaaaaagcccaaagaaaaaaaaaagaaaaatatttcatgttcatggataggaagagtcaatatcattaaaatggccatagtgcccacaggaatttacagattcaatgcaattcctatcagataccaacgagattcttcacagaatttg

SEQ ID NO: 126431 - DNA, 346 bp, Homo sapiens
cccacgcgtccgggaaccgccatcttccagtaattcgccaaaatgacgaacacaaagggaaagaggagaggcacccgatatatgttctctaggccttttagaaaacatggagttgttcctttggccacatatatgcgaatctataagaaaggtgatattgtagacatcaagggaatgggtactgttcaaaaaggaatgccccacaagtgttaccatggcaaaactggaagagtctacaatgttacccagcatgctgttggcattgttgtaaacaaacaagttaagggcaagattcttgccaagagaattaatgtgcgtattgagcacattaagcgtctaatcgcga

SEQ ID NO: 126432 - DNA, 588 bp, Homo sapiens
atgatgaacacaacgggaaagatgagaggcaccccatatgtgatttttaggccttttagaaaacatgaagttgttcctttggccatgtacatgcaaatctgtaagaaaggtgatatcatagacatcaaaggagtgggtactgttcaaaaaggaatgccccacaagtgttaccatgggaaagctgaaagagtctaccttgttccccagcatgctgctggcattgttgtaaacaaacaacttaagggcaagattcctgccaagagaattaatgaaaatgatcagaaaaagaaagaagccaaagagaatggtacctgggttcaactgaagcgccagcctcctccacccagaaaagcagactttgtgagaaccaatgggaaaaagcctgagctgctagaccctcttccttatgaattccgcggatcctctccctataatgtcaacgctctagacaaaagccctgctgagtacaacaaaaccgaaaacctgacagaggaaaaacctttatatctttatatctacaagcccaaacacaattgtccctgcaggatgaaaatgcatatgtgctgcatcttcacatccaatccataa

SEQ ID NO: 126433 - DNA, 15583 bp, Homo sapiens
gggcagcagcagtcagcgcacgccgagcggctgccgggggaagcagaggcgccggaggctggggcaccgccgacgcctcgggagccatggccgaagggggagaaggaggcgaggacgagatccagtttctgaggactgaggatgaagtggtactccagtgcatcgccaccattcataaggagcagaggaagttctgcctggcagccgagggacttgggaatcgcctgtgcttcttggaacccacttcagaagccaagtacattcctccagatctctgcgtctgcaattttgtgctggaacagtccctatctgtcagagccctgcaggaaatgcttgccaacacaggtgaaaatggcggcgaaggggcagcacaaggaggtggccacaggaccctgttatacggccatgcagttctcctgaggcactctttcagcggaatgtatctaacatgcttgactacatcaagatcccagacagacaaacttgcctttgatgtaggtctacgggaacatgccacaggagaagcctgttggtggactatacatcctgcttccaaacagaggtccgaaggagagaaagttcgaattggcgatgacctcatcctcgtcagcgtgtcctctgaaagataccttcatctctcagtatcaaatggtaacatacaagtggatgcctcctttatgcaaacactctggaatgtacatcctacgtgctcaggaagtagcatcgaagaaggatacctacttggtgggcatgtagtacgtcttttccatggtcatgatgaatgtttgacgataccatctacagaccagaatgattcccagcacaggaggatattctacgaagctgggggagctgggactcgagccaggtctctttggagagtggaaccccttcggataagctggagtggcagtaacatcagatggggccaggctttccgactccggcatctcaccacaggccactacctggccttgacagaagaccaaggccttatactgcaagaccgggcaaagtcagacaccaagtccacagctttctctttccgggcatcaaaggaactcaaggagaaattagactccagtcacaagcgagacatagaaggcatgggagttccagaaatcaagtatggagattctgtctgctttgtgcagcatatagccagtggtctgtgggtgacctacaaagcacaagacgccaaaacttcccgcctgggacctctaaaaagaaaggtcatactccatcaggaaggccacatggatgatggattaacactgcagagatgccaacgtgaggagtcccaggctgctcggatcatccggaacactacagccttattcagccagtttgtcagtggaaacaatcgcacagctgcccccatcaccctgcctatagaagaagtcctgcagaccctacaggacttgatcgcctacttccagcccccagaggaggagatgcgacatgaagacaagcagaacaagctccgctcactcaaaaacagacaaaatcttttcaaggaagagggaatgttggcccttgtcttaaattgcattgaccgcttaaatgtctacaatagcgtagcacactttgcagggattgcaagggaagagagtggcatggcctggaaagaaattctgaacctcctctacaaattgctggctgctctcattcgcggaaacagaaacaattgcgctcaattctccaataaccttgattggctcatcagtaaattggacagactagaatcttcctcaggtatcttggaagttttgcactgcatcttaactgaaagcccagaagccttaaatctgatagcggagggccacatcaagtcgatcatctccctgttggataagcacgggcggaatcacaaggttctggatatcctgtgctccctctgtctctgcaatggggttgcagtgagagccaaccagaatctgatctgtgacaacttgctgccccggagaaacctactcctgcagacacgactgattaacgatgtaaccagtatccggccaaacatcttcctgggagtcgcggagggctcagcccagtacaagaagtggtacttcgagctgattatcgaccaggtggaccccttcctaacagcagagcccacacatctgcgggtgggctgggcctcttcttcaggctatgccccatacccaggaggtggagaaggatggggaggcaatggtgttggtgacgacctgtactcctatggctttgatggacttcacctttggtcaggccggatacccagagctgtggcttccatcaaccagcacctcctgagatcggatgacgtgggtaagctgctgcctggacctcgggggtgcccagcatctcattccgcatcaatgggcagcccgtgcaggggatgtttggagaacttcaacacagacgggctcttcttccctgtgatgagcttttcagcaggtgtcaaagtacgtttcctgatgggtggacgtcatggagagtttaagttcctgcctccctctggctatgccccttgctatgaagccttacttccaaaagagaagatgagattggagcctgtcaaagaatataaacgtgatgctgatggcattagagatctcttgggtaccacccagttcctctcccaagcctctttcatcccatgccccgtagacaccagtcaggttattttgccacctcacctagaaaagatccgagacagactagctgaaaacatccatgagctttggggaatgaataaaatagaacttggctggactttcggcaagatacgagatgacaataaaagacaacacccttgccttgtggagttttcaaagctcccagaaactgagaagaactataacctgcaaatgtcaactgaaaccttaaaaaccctcttgaccctgggttgccacattgctcatgttaacccagctgctgaggaggatctcaagaaggtcaaactgcccaaaaactatatgatgtccaacggctataagccagcccctttggatttgtctgatgtgaagctgttacctcctcaagaaattttagtggataagcttgcagaaaatgcacacaatgtttgggcaaaagacagaataaaacaaggatggacctatggcatccaacaggatttgaagaacaaaagaaatccccgtctggtgccatatgcattactggatgagcgtaccaagaagtcaaacagggacagcctgcgggaagctgtgcgcacttttgttggttacgggtataacattgagccatcagaccaagaactagctgactcggctgtggagaaggtcagcatagacaagatccgatttttccgggtagagcgatcttatccagtgagatctggaaagtggtattttgagtttgaagtggtgactggaggagacatgcgagtcggctgggcgaggccaggctgtcgacctgatgtcgagctgggggccgatgaccaagcctttgtgtttgaaggcaacaggggccagcgttggcatcaaggaagtgggtattttgggcgtacctggcagccaggggatgtggtcggatgtatgattaacctggatgatgcttcaatgatcttcacactgaatggggagctgctgatcaccaacaaaggctctgaacttgccttcgctgactacgagattgagaatggcttcgtgcccatctgctgtctgggtctatctcagatcggccgcatgaatctcgggacagatgccagtaccttcaagttttataccatgtgcggtctccaagagggctttgagccttttgctgtcaacatgaacagagatgttgctatgtggttcagcaagcgcctcccgacgtttgtcaacgtgccaaaggatcatccacacatagaggtcatgaggattgatggcaccatggacagccctccgtgtctcaaggtgacgcataagacatttggcacacagaatagcaatgccgacatgatctattgccgcttgagcatgcctgtcgagtgccactcctccttcagtcacagcccctgtctggacagtgaagctttccagaaaaggaaacagatgcaagaaatactctctcatacaacaacacagtgctactacgccatccgcatctttggtggacaggatccatcctgtgtctgggtcggatgggtgactccagactatcacttgtacagtgaaaagtttgacctgaataaaaactgcacagtgactgtcaccctaggggatgaaagaggccgggtccatgaaagtgtgaaacgcagcaactgctacatggtctggggtggagacattgtagccagttcccagagatcaaatcggagcaacgtggacctggagatcggctgtctcgtggatctggccatgggcatgttgtccttctcagccaatggaaaggaactgggcacctgctaccaggtggagcctaataccaaagtgtttccagcagtcttcctgcagcctacaagtacttctttgtttcagtttgaacttggaaagctgaagaacgcaatgcccctgtcagcggccatattcaggagtgaagaggagaacccagtcccacagtgtccacctcggctggacgtccaaaccatccagcccgtgctctggagccgcatgcccaacagcttcctgaaggtggagaccgagcgtgtgagcgagcgccacggctgggtggtgcagtgcctggagcccctgcagatgatggcgctccacatccccgaggagaacaggtgtgtggatatcctggagctctgtgagcaggaggacctgatgcggttccattaccacacgctgaggctctacagcgcggtgtgcgccctgggaaacagccgcgtggcctacgccctgtgcagccacgtggacctctcccagctcttctatgccattgacaacaagtacctccccggcctccttcgatctggtttctatgacctgctcatcagcatccacctggccagcgccaaggagaggaagctgatgatgaagaacgagtacatcatccccattaccagcaccaccaggaatatctgcctcttcccggacgagtccaagaggcatggactgcctggggtgggcctgagaacatgtctcaagcccgggttcaggttctccaccccttgctttgttgtgactggtgaggatcaccaaaagcagagccccgagattcccttggagagtctcaggacgaaggctctgagtatgctgacagaggcagtgcagtgcagcggggcccacatccgagaccctgtaggggggtctgtggagttccagtttgtgcctgtgctgaaactcattggaaccctgctggtcatgggcgtgtttgatgatgatgatgttcggcagatcctcctcctgattgatccctctgtgtttggggagcatagtgcggggacagaggagggagcagaaaaggaggaagtgacccaggtggaggagaaggctgtggaggctggggagaaggccggcaaggaggctcctgtcaaaggcttgttgcagactcgattacccgaatccgtcaagctgcagatgtgtgagctcctcagctatctctgcgactgtgagctgcagcaccgagtggaggccattgtggcatttggtgacatttatgtctccaagctgcaggcaaatcagaagttccgctacaatgagctcatgcaggccctgaacatgtctgcggccctgactgcccggaagaccaaggagttccgctcacccccacaggagcagatcaacatgctgcttaactttcaactgggagagaactgcccctgcccagaggagattcgggaggagctgtatgatttccatgaggaccttctccttcactgtggggttcctttggaagaagaggaagaggaggaggaggacacctcctggacaggaaaactctgtgccttggtttacaaaatcaaaggcccacccaagccagagaaggagcagccgacggaggaggaggagagatgccccacaacattgaaggaactcatctcacagacgatgatctgctgggcccaggaggaccagatccaggattcagagctggtccgaatgatgttcaacctcctccggaggcagtatgacagcattggggagctgctgcaggcgctgcggaagacctacaccatcagccacacctctgtaagcgacaccatcaacctgctggctgccctgggccaaatccgctccctcctcagtgtcaggatgggcaaggaagaggagttgctcatgatcaatgggctgggagacataatgaacaacaaggtgttttaccagcatcccaacctcatgagagtcctgggcatgcacgagacggtgatggaggtgatggtgaacgtgttgggtacagagaaatctcagattgcatttccaaagatggttgctagctgctgccgtttcctttgctatttctgtcgaattagccggcaaaatcagaaggccatgtttgagcatctgagttatcttctggagaatagcagtgttggcctagcctccccgtcgatgaggggatccaccccgctggatgtggcagcttcctctgtgatggacaacaatgagttagcgctgagcttagaggaaccagacctcgagaaggtggtgacctacttggcaggctgtggcctacagagctgccccatgcttctggccaaaggataccctgatgtcggctggaaccccattgaaggggaacgctacctgtccttcctgaggtttgctgtcttcgtgaacagtgagagtgtggaagaaaacgccagcgttgtggtcaagctgctcatcagacgcccagagtgcttcggcccggccctgcggggtgaggggggaaacggactcttggcagccatgcagggtgccattaagatctctgagaacccagcgctcgacctcccctctcaaggatacaaaagagaagtcagcacggaggacgatgaagaggaagaagaaatcgtgcatatgggcaatgcaattatgtcattttattcggcccttatagatctactgggccgctgtgctcctgaaatgcacctcatccagacaggaaagggggaagccatccgcatcaggtccatcctgcgctccctggtccccacagaagacctggttgggatcatcagcatccccttgaaactgccctccctcaacaaagatgggtcggtcagtgagccagatatggcgggcaatttctgccctgaccacaaggcacctatggtgctgttcttggaccgcgtttatggcattaaggatcaaacttttctgctccacttgctggaggttggatttttacctgacctaagagcttctgcctctctagatacagtttccctaagcaccacagaggctgcgcttgcactaaataggtatatatgttctgctgtgctcccgctcctcacaagatgtgcccctctctttggcggaacagaacactgcacctctctgattgattccacactgcagacaatatacaggctatccaagggacgttccctcaccaaagcacaaagggacactatagaagaatgtttgcttgccatttgcaatcacttgaggccttccatgttacagcaactcctgcgacgcctcgtttttgatgtgccgcaactcaatgaatactgcaaaatgcctctcaagcttctgacgaatcactatgaacagtgttggaagtattactgcctgccttcaggatgggggagctacgggctagctgtggaagaagagctgcacctaacggagaagcttttctgggggattattgactcgctctcccataagaaatatgacccagatcttttccgaatggccctgccttgtctcagtgctatagctggggccttgccaccagattatttagattccagaatcacagccacgttggagaaacagatctcagtggatgcggatggcaactttgacccaaaacctattaacaccatgaatttttccttgcctgaaaaattggaatacatcgtcaccaagtatgctgagcattcacatgataaatgggcctgtgacaagagtcagagtggatggaaatatgggatttccctggatgaaaatgtgaagacccacccactgataaggcctttcaagacattaacggagaaggagaaggaaatttatcgctggcctgcgcgagagtccctgaaaaccatgctggctgtgggctggactgtggagaggaccaaagagggagaagctttggttcaacagcgggaaaatgagaagcttcgaagtgtgtcccaggccaaccagggcaacagctacagtcctgctcccctcgacctctcaaacgttgtgctctccagagagctccagggaatggtggaggtcgtggctgagaactatcacaatatctgggccaagaagaagaagctggagctggagagcaaaggtggtggcagccaccctcttctggtaccatatgacaccttgactgccaaggaaaagttcaaggaccgggagaaggcacaggacctgtttaagttcctccaagtgaatggcatcatagtttccaggggtatgaaggatatggagctggatgcctcctccatggagaagaggtttggctataagttcttgaagaagatcctgaaatacgttgattctgctcaagaatttattgcccatttagaagccattgtcagcagtgggaaaactgaaaagtctccccgtgaccaggagatcaaattctttgccaaagttctcctcccgctggttgaccagtacttcaccagtcattgcctctacttcttgtcatcccctctgaagccccttagcagcagcggatatgcctcccataaggagaaagaaatggtggccggcctgttctgcaaacttgccgctctcgttagacacagaatttccctctttggtagtgattctactacaatggtgagctgtcttcacatcttagctcagacacttgacacaaggactgtcatgaagtcaggctcagagctggtgaaggctgggttacgagcattctttgaaaatgctgcagaagatttggagaagacttcagaaaacctgaaacttgggaagttcacccattcccgaacgcagattaaaggcgtttctcagaatattaactacactacagtggctctgctccccatcctgacgtccatctttgagcacgtcactcagcatcagtttggaatggatctactcttgggtgatgtgcagatttcatgctaccacatactgtgcagcctctactcccttgggacgggaaagaacatttatgttgaaaggcaacgccctgcccttggagaatgtctggcctcgctggcagctgccataccagtggcattcctggagcccacccttaatcgctacaatccactctcggtcttcaacaccaaaacccccagggagaggtctattctggggatgccagacacggtagaagacatgtgtcctgacatcccccagctggaaggcctgatgaaggaaatcaacgacctggccgagtcaggggcccggtacacagagatgccccatgtcatcgaggtgatcttacccatgctctgcaactacttgtcctactggtgggagcggggtcctgagaacctgccccccagcacagggccatgctgcaccaaggtcacctctgaacacctcagtctcatcctgggcaacattctgaaaatcatcaacaacaacctgggcatcgatgaggcctcctggatgaagcgcattgcagtgtatgcacagcccatcatcagcaaagccaggcccgacctgctgagaagccacttcatcccaactctggagaagctgaagaaaaaggctgtcaagacggtgcaggaggaggagcagttgaaagccgatggcaaaggggacacccaggaggcagaactcctcatcctggacgagttcgcggtcctctgcagagatctctatgccttctaccccatgctgatccgctacgtggacaacaacagatctaactggctgaaaagtcctgatgctgattctgaccagctcttccgcatggtggcagaagtcttcattctgtggtgtaaatctcataacttcaagagagaagagcaaaattttgtgattcagaatgaaattaataatttggcatttttaactggagacagcaaaagcaagatgtcaaaagccatgcaagtaaagtctggaggacaagaccaggagcggaagaagacaaagcggcggggagacttgtattccatccagacctccctcatcgtggctgcactcaagaaaatgctgcccattggtttgaatatgtgtactccaggcgaccaggagctgatctccctcgcaaaatcgcgatacagccatagggacacagatgaagaggtcagagaacatctgcggaacaacttgcacttgcaggaaaagtctgatgacccagctgtaaaatggcaactgaacctctacaaggatgttctgaagagtgaagaacctttcaatccggaaaagacagtggagcgtgtgcagagaatttcagcagctgtcttccacctggaacaggtggaacagcctttgaggtccaagaaggccgtctggcacaaactgttatcaaagcaacggaaacgggcagtggtggcctgtttcaggatggcccctctctacaacctgcccaggcaccgctctattaacctcttcctccatggctatcagagattttggatagaaacagaggagtattcctttgaagagaaactagtacaggatttggctaaatctccaaaggtggaagaggaggaggaggaagagacagaaaaacaacctgacccactacatcagatcattctctattttagccgcaacgctctcacggagaggagcaaattggaagacgaccctttgtacacctcctattccagcatgatggccaagagttgtcaaagtggtgaggatgaagaagaagatgaagacaaggaaaaaacattcgaagagaaagagatggagaagcaaaaaaccctctatcagcaagctcggctgcatgagcgtggtgctgcggagatggtccttcagatgataagcgctagcaaaggtgagatgagccccatggtggttgagacgctgaagctggggatcgccattctgaacggaggcaatgctggtgtgcaacagaaaatgctagattacctaaaggagaaaaaggatgctggattctttcaaagcctttctggtcttatgcagtcttgcagtgtccttgatttgaatgcatttgagaggcagaataaagctgaaggcctggggatggtgactgaagaaggaacactcattgttcgggaacgtggtgaaaaagtactccagaatgacgagttcacgcgtgatctctttagattcctacagttactttgtgagggacataacagtgactttcagaacttcctgcggactcagatgggcaacaccaccaccgtgaatgtcatcatcagcactgtggactaccttctgcgtctgcaggaatcaatcagtgatttctactggtattattcagggaaggacatcattgatgaatctggacagcacaatttttccaaagctctggcagtcaccaagcagattttcaattctcttacagaatacatccagggcccttgcattggtaatcaacagagcctggctcacagcaggctgtgggacgcagtggttggcttcctccatgtctttgctaatatgcagatgaaactctctcaggattccagtcagatcgagctgctgaaggaactcttggatctccttcaggacatggtggtgatgcttctgtccctcctggaagggaatgtggtaaatggcaccattggcaagcagatggttgacacactggtagaatcatctaccaatgtagaaatgatcttgaaattctttgacatgttcttgaaacttaaagacttaaccagctcagacaccttcaaagaatatgacccagatggtaaaggaattatctccaaaaaagaattccagaaggccatggaagggcaaaaacagtacacgcagtcagagattgactttctcctgtcgtgtgcagaagctgatgagaatgacatgtttaattacgttgattttgtagaccggttccatgagccagccaaggacatagggtttaatgtggctgtgttattgacaaatctttctgaacacatgccaaacgattcccgcctgaagtgtctgttggacccagcagaaagtgtgctaaattacttcgaaccctacctaggacgcatcgagatcatgggtggggccaagaagattgagcgtgtttattttgagatcagtgaatccagtcgcactcagtgggagaagccccaggtgaaggaatctaagcgacagttcatttttgatgttgtcaatgaaggtggggagcaggaaaagatggagctgtttgtgaacttctgtgaggacaccatctttgaaatgcagttagcatctcagatctctgaatccgattcagctgacaggccagaagaggaggaagaagatgaagattcttcttacgtgttagaaattgcgggtgaagaggaagaagacgggtctcttgagccggcctctgcatttgctatggcctgtgcctctgtgaagaggaatgtcaccgacttcctgaagagagcaaccctgaagaacctcaggaagcagtacaggaacgtgaaaaagatgactgcgaaggagctggtgaaggtgctcttctcctttttctggatgctgttcgtggggctattccagttgctcttcaccatcctgggaggaatctttcagatcctctggagcacagtgtttggagggggcctggtagaaggggcaaagaacatcagagtgaccaagatcctgggtgacatgcctgacccaacccaatttggtatccatgatgacactatggaggctgagagggcagaggtgatggagccaggtatcaccactgaactagtacacttcataaagggggagaagggagatacagatatcatgtcagacctctttggactccacccaaagaaagagggcagcttaaagcatgggcctgaagtgggtttgggtgacctctcagaaattattggcaaggatgaaccccctacattagagagtactgtacagaagaagaggaaagctcaggcagcagaaatgaaagcagcaaatgaagcagaaggaaaagtagaatccgagaaggcagacatggaagatggagagaaggaagacaaagacaaagaagaggagcaagctgagtacctgtggacagaagtgacaaaaaagaagaagcggcggtgtggtcagaaggttgagaagccggaagctttcacagccaatttctttaaagggctggaaatctatcagaccaagttactgcattacctggccaggaatttctacaacctgaggttccttgctctgtttgtagccttcgctatcaacttcatcctgcttttttataaggtcactgaagaacctttagaagaagagacagaggatgttgcaaacctatggaattcctttaatgacgaggaagaggaagaagcgatggtattctttgtccttcaggagagcaccgggtatatggcaccaaccctgcgtgccctggccatcatccataccatcatctctctagtctgtgtggtgggctactactgcctgaaggtgcctttggtggttttcaaaagggaaaaagaaatcgccaggaagctggagtttgatggcctatatatcaccgaacagccatctgaagatgacatcaaggggcagtgggaccgcttggtgatcaacacaccatcttttcctaataactactgggacaagtttgtaaagagaaaggtgatcaacaagtatggagatctctacggagcagaacgcattgctgaacttctgggtttggacaaaaatgctcttgactttagcccagtagaagagaccaaagcagaagcggcttctctggtgtcatggctaagttccatagacatgaagtaccatatctggaagcttggagttgtttttactgacaactcctttctctaccttgcctggtatacaaccatgtcagtcctgggccactacaataacttcttctttgctgctcacctattggacatcgcaatgggcttcaagacactgaggaccattctgtcatctgtaactcacaatggcaaacagttggttctgactgtcggtctcctggccgtggtggtttatctctatactgtggtggctttcaacttcttccgcaagttctacaacaaaagcgaagacgatgacgagcccgatatgaagtgcgacgacatgatgacgtgttaccttttccacatgtacgtgggagtgagagcaggaggtggcattggtgatgaaattgaagaccctgctggtgatccttatgaaatgtatcgcattgtctttgacattacctttttcttcttcgtcattgtcatcttgctggccatcattcaaggtcttattattgatgctttcggagagctaagagaccagcaggaacaagtacgagaagatatggagactaaatgtttcatctgtgggattggcaatgactactttgacacaacccctcatggttttgaaacacatacattacaagagcacaacttagccaactacttgttctttctgatgtatttgattaataaagatgaaacagagcacacgggtcaggaatcttatgtctggaagatgtaccaagaaaggtgttgggatttcttcccagccggtgactgctttcgtaaacaatatgaagatcagcttggataaatctgaatcaaagaagcgcgacaattctggacagtcaacttcccatgaaataaagtcccctttttacagttctgcaacatatctgaaatgtgacattttctaaatgcctcccttaaaaaaaaaactgctgaaaatctgtgctattttgaaattgatttggctttttgtgcctaatggacatacactgtgggagagaacctgtcaaaatgtcgaagaaggaaggcgaagaatcaagtaatctctaggcaaatgccttcaagttttccagttctgaggtaactagttcagtttgttgggatggaagcatgaaggaaagggctagagaagtatgaaatctcgaatgtgtaatacctgaaaatttaaacacttgaatgtcatcatggtatccaacttgtgactcatagggtctgaactcactccaaaagataataactgcagtctaatttttcccatggtacttgctagtgactgtatccagaaaagctttaagcagttaaagaaacagaaaaaaaccgacactttgtcgacactgaaatatcgattaagtgccttaaaacctctttagacatagctatgcaagttttttatgtttgtgttccagaaggacagttccattcattagttgtgatcttccgtcttactttatgaaactgcacttgaaggttattcatacaagtttttttagtaacagctgtcagtcaactgctgttattagaagaaaagtactgtactgaaaattcagaaaaaaaaatctcaaccttatgccaaaatggagtaatgctttatggtcccttgtaagtagtggagctgctctgtttaggtgaatctcctcaaatacaatgaagtgcccactgcaataaagtaatacgtaccaataaaaa

SEQ ID NO: 126434 - DNA, 639 bp, Homo sapiens
atgaggagacaggaagaaggcagtactgtgggtgtcgaagggcatttaatgtccaaatttgatgtttgtggcattcatgtaggtatcttggaagttttgcactgcatcttaactgaaagcccagaagccttaaatctgatagcggagggccacatcaagtcgatcatctccctgttggataagcacgggcggaatcacaagaatggtagcactattgctgatgaactagatggtaccagtgctgcacttctggggatcacacttgaaataaggagatctttgggctttggaatcccttgttggatatctgtatccagtggaaggaagatcagtgacctacaagggagggagaagtacaagaaggcttctggaggacgtggccatcaccctggacatctggtgttacagattttagccaaactctctgtgtatgtctgtgttgtgtatgtttatgtggaaaatggcatgccaatagatcatgaaaagcagaaacagcctgaaaatggagaaagaaaagttctgctgaaaagacacagcattattgccaccatgcaggcggagaccagtgcaaacattactctctgccctcgtgtcacagtgggcagacagttacaacaatctcagcgcagtcagaactga

SEQ ID NO: 126435 - DNA, 4149 bp, Homo sapiens
tcaagctcgccccgcgcagcccgagccgggctgggcgctgtcctcgggggcctggggaaccgcgcggtttggagatcggaggcacctggaacccgtggcaagcgccgagccgggagacagcccgaggaaccacgggttctggagctaggagccggaagctgggagtccggaggagagcggagcccggagcccggagcccggggcggcgcgtctgggtctggcgcttcccgactggacggcgcgcccgctggtcttcgccacgcgccctcccctgggctcgcgttcatcggtccccgcctgagacgcgcccactcctgcccggacttccagccccggaggcgccggacagagccgcggactccagcgcccaccatgcgcctcaacagctccgcgccgggaaccccgggcacgccggccgccgaccccttccagcgggcgcaggccggactggaggaggcgctgctggccccgggcttcggcaacgcttcgggcaacgcgtcggagcgcgtcctggcggcacccagcagcgagctggacgtgaacaccgacatctactccaaagtgctggtgaccgccgtgtacctggcgctcttcgtggtgggcacggtgggcaacacggtgacggcgttcacgctggcgcggaagaagtcgctgcagagcctgcagagcacggtgcattaccacctgggcagcctggcgctgtccgacctgctcaccctgctgctggccatgcccgtggagctgtacaacttcatctgggtgcaccacccctgggccttcggcgacgccggctgccgcggctactacttcctgcgcgacgcctgcacctacgccacggccctcaacgtggccagcctgagtgtggagcgctacctggccatctgccaccccttcaaggccaagaccctcatgtcccgaagccgcaccaagaagttcatcagcgccatctggctcgcctcggccctgctgacggtgcctatgctgttcaccatgggcgagcagaaccgcagcgccgacggccagcacgccggcggcctggtgtgcacccccaccatccacactgccaccgtcaaggtcgtcatacaggtcaacaccttcatgtccttcatattccccatggtggtcatctcggtcctgaacaccatcatcgccaacaagctgaccgtcatggtacgccaggcggccgagcagggccaagtgtgcacggtcgggggcgagcacagcacattcagcatggccatcgagcctggcagggtccaggccctgcggcacggcgtgcgcgtcctacgtgcagtggtcatcgcctttgtggtctgctggctgccctaccacgtgcggcgcctcatgttctgctacatctcggatgagcagtggactccgttcctctatgacttctaccactacttctacatggtgaccaacgcactcttctacgtcagctccaccatcaaccccatcctgtacaacctcgtctctgccaacttccgccacatcttcctggccacactggcctgcctctgcccggtgtggcggcgcaggaggaagaggccagccttctcgaggaaggccgacagcgtgtccagcaaccacaccctctccagcaatgccacccgcgagacgctgtactaggctgtgcgccccggaacgtgtccaggaggagcctggccatgggtccttgcccccgacagacagagcagcccccacccgggagccttgatgggggtcaggcagaggccagcctgcactggagtctgaggcctgggacccccccctcccaccccctaacccatgtttctcattagtgtctcccgggcctgtccccaactcctccccacccctcccccatctcctctttgaaagccagaacaagagagcgctcctctcccagataggaaaagggcctctaacaaggagaaattagtgtgcggcaaaaggcagttttctttgttctcagactaatggatggttccagagaaggaaatgaaatgtgctgggtggggccgggcctccggcggcccggctgctgttcccatgtccacatctctgaggcctgcaccccctctgtctagctcggggagtccagccccagtcccgcaggctccgtggctttgggcctcacgtgcagaccctgccatgcagacccatgcccccctcccccaggcagctccaagaaagctccctgactcgccccttcaggcctggcaagctgggggcccatcgccgtggggagtccctcccaccaccctcgccgcaggcagctgcagcccccagaggggaccacaagcccaaaaaggacaaaaatgggctggcctggaatggcccagaccccagcctcccctcctccctcccatcctcacccaggccaaggcccaggggctctgccaggacaccacatgggagggggctcaggcctcagcctcaagatcttcagctgtggcctctcgggctcggcagaagggacgccggatcaggggcctggtctccagcacctgcccgagtggccgtggccaggatggggtgcgcattccgtgtgctttgcttgtagctgtgcaggctgaggtctggagccaggcccagagctggcttcagggtggggccttgagaaggggaatgtgggacaggggcgatggtgcctggtctctgagtaagatgccaggtcccaggaactcaggcttcaggtgagaaggagcggtgtgtccaggcaccgctggccggcagccctgggctgaggcacagactcatttgtcaccttctggcggcggcagccctggccccggcctccaagcagttgaaaaagctggcgcctccttggtctctaggatccaggctccacagagcacatgactagccaggcccctggcttaagaaggtcgcctaagcctaagagaagacagtcccaggagaagctggccgggaccagccaggagctgggagccacaggaagcaaaagtcagccttttcttcaagggatttccctgtctcagagcagcctttgccccagggaaatgggctctgggctggctgcctgcaccggccatgtcgacccaggacccggacacctggtcttgggctgtgttcagccactttgccttctctggactcagtttccccgtcttgagaaatgagagtcgaatgttacagtatcttgcagttcgtttggatcttggctgtttgagtttgacgggttccttgaaccccacaaaatccctctccaaccacaggacccttcggctcaccaagaacggggcccaggggagtcaggcctattcgctgcacttcctgccaaactttgcccccacaagcctggtcatcagccaggcagccctcccagtgcccaagggccaccaaccccagggaaacagggccagcacagaggggccttcctcccccacagagctcccatgacatagtctgctctgggcggaagagctttgctgccagccagggatgtccagaggtcggtgcagcccctatccctgctcaggagtgggctcagagtctagcaaatgctaaggcccctcaggctgggctctgaacgaggacctggactcagagccagacagggcagcctcagacccttctctggggctcctggaccttgggccataatttctgagcctcggtttccccatctaaggaacagatgtggtcgttccgccctctcagctggatgagactgtcctggaggatccaccccggaacagacagaacggtgtctctcaaggatggtgctctgagagagggcagagtggatgccccactgccctagaccctcggtagacgtggggtctctggggcggggtctgtggctgtgactgaagtcggcttttcccgttgatgtcttgatgctcctatctgtgcactttaccgtaggtagggacacgtgtccatgcaccacacgacacacccacgacacctgatctcgtatcacctagcttgcggcccaggtcatgatgtggccccggaagactggccctgcgtgccatgagtgcgtcggtcatggagtccggagcccctgaagccgggccccttggtgacggcaacaagccctcacagctcaaacgcccacccccactcccaccatctgcaggtggtgaaaacaaaccccgtgtatctctcaataaaggtggccgaagggcctcgatgtgg

SEQ ID NO: 126436 - DNA, 3249 bp, Homo sapiens
tttccccactttgaaactgtagaagtcccatgtgtctatgcacaacagctctcgtgttttatagggactggatgcacagacgtgatctcaacgggtccttctgtccaggaaggggcctgtccttcccctcgctcagtcctcccctcacctcccctcacccccaggcagcagtcgcaggctttcctccgagtccccgcgctgccgatggacgtgctccctttgcttgttgtggaggatcctccaacgggggcagccagggggccggggccagaccctacaacccaccagcccccagaggtagctatttttgcagccagccgtgttgaaggtggacttcggccagagcaggagaacaggagggacgcgggacggcctcagatccggacgcccaagcaggggagggcagaacagacccgccacccagccagggtcagcagcggtggtggtggctctcaggagcccacacaggtcaacaccttcatgtccttcatattccccatggtggtcatctcggtcctgaacaccatcatcgccaacaagctgaccgtcatggtacgccaggcggccgagcagggccaagtgtgcacggtcgggggcgagcacagcacattcagcatggccatcgagcctggcagggtccaggccctgcggcacggcgtgcgcgtcctacgtgcagtggtcatcgcctttgtggtctgctggctgccctaccacgtgcggcgcctcatgttctgctacatctcggatgagcagtggactccgttcctctatgacttctaccactacttctacatggtgaccaacgcactcttctacgtcagctccaccatcaaccccatcctgtacaacctcgtctctgccaacttccgccacatcttcctggccacactggcctgcctctgcccggccaaggcccaggggctctgccaggacaccacatgggagggggctcaggcctcagcctcaagatcttcagctgtggcctctcgggctcggcagaagggacgccggatcaggggcctggtctccagcacctgcccgagtggccgtggccaggatggggatccaggctccacagagcacatgactagccaggcccctggcttaagaaggtcgcctaagcctaagagaagacagtcccaggagaagctggccgggaccagccaggagctgggagccacaggaagcaaaagtagggacacgtgtccacgcaccacagacacacccacgacacctgatctcgtatcactagcttgcggccaggtcatgatgtggccccggaagctggccctgcgtgccatgagtgcgtcggtcatggagtccggagcccctgagccggcccctggtgacggcacagccctcacagctcaaacgcccacccccactcccaccatctgcaggccagtgtccctcctggcccagagcggtacccgggccctcgactgctgccctccacgggctccctgcctgaacctgtccacaccccgattcgtccccagagttggacactccgtgatgtttaagggatccctgggctctgtgccaaggaggaaggagctggagcagcgaggcaacaaggcagatgggcgggctcacgtcagaaccaccagggagcctgttccagaccagtttcccaggccccagctgagccccaggcgatcagaagggcataggagatcactgcaccccaaccggaggaacactgacattgacgacaacatcataggaatggaaatacaaccatggaattccagctcagtcatggagcgggagatctggggacactggccgggcagcctgccccaggcacccctgaactccagtcccctgaagccagagcccgggccaactaaccaggtgactagcagagccactggggacacccccagccaggcccagaccccagccaattacccagggcctggagcaaggccctgtcagctcaacccccatcatctgacctggttcaaggcccatggccaccgagagccagtctgcagctgggcaaaagggcagacagggccaggtgaggtggacgtctcttgcacctacacatcctcgcgacaggaggatgcacgtcgtacagatggggaaacaggctgggaaagggagtgtgacctgcccgtgatcccagaggtgtggctaccagagctggaactaaaaccggagcccttcaccaaatccagctcccaggacctaagctggccttggatgaacccagtacggtgcctctcctgcctgtatcggggcatccgggcactgccagcgtcccattactggactctggtcaaggagcttggggacagagtggccgccgaggggacggagcctgccgtgtcccgtgtgcagcggcggaccaccaggcagagcgccaaggggagtgtccggagatccagcatgggaagagccccctgccacttccagcaaggagcacacagagagggggagcctcctgttaagcatccaagtcccaagtcaccggccggcatcggctgcagctctctgtgtgtggagacatctcattctggtgtcttctttacacagggtctgcatctgggggtccactggggaggactcagcctctcccgcgtcctccatcccacacacctgtccctgggcagccacggggaacaggagcacaggggacagcaggcagagggcagcgcccgggcgaaggggactttcgcccttgcttcatgcagccctggcacccgcagcaggacctcggctgatcccaagggggtccacagtggatatggtccttcaggggtgcccttgaaggcaggaaggggacaggactttatactgttcctcccaccccttcgagcagtcaccaactgcagcccagatgaggtcaacagcatgtctgatggcgtggtccccagcctgcctgatggcgtggtccccagcctgtctgatggcatggtccccggcctgtctgatggcgtggtccccagtctgtctgatggcgtggtccccggcctgtctgatggcgtggtccccggcctgtctgatggcatggtccccggtctgtctgatggtgtggtccccagcctgtctgatggtgtggtccccggcctgtctgatggcttggtccctggtctatttgatggtgtggtccccagcctgtctgaaggtgtggtccccagcctgtctgatggcgtggtccccggcctgtctgatggcttggtccctggtctatttgatggtgtggtccccagcctatctgaagatggggagaggagctga

SEQ ID NO: 126437 - DNA, 265 bp, Homo sapiens
cgcttaggatgacgcatagggcatctccacagagttttggccacttgcatcctagagcttgatgcttttcctgagatacgcgcccttggtgggtggtagtttctgcatctggtctcacccactccagttcttcctcacctccatcaaggtgaactttgtagaaacactcttctgcttccagtccttcaaagacattttttagccctctgctcttgtggaactctaacctagataagggagccagcagcagcaagaagacaaatcc

SEQ ID NO: 126438 - DNA, 553 bp, Homo sapiens
cgggtcccagcactggcttactggcctggcagagttccagttaatgtcaccagcactgccttgttaagcgtgctggacatttttccaactgtggtagccctggcccaggccagcttacctcaaggacggcgctttgatgatgtggacgtctccgaggtgctctttggccggtcacagcctgggcacagggtgctgttccaccccaacagcggggcagctggagagtttggagccctgcagactgtccgcctggagcgttacaaggccttctacattaccggtgagtgaggggccacttagccctgcctcccacagtcacagctgcacggggaccccatggactctcacccaggcctctgggaatgagtgtgagtccctcctttgtggggggttctcagcacctcttgacaagcgtctcctccaaacccagggtccctgcacaggctctctggatccctcatatgcaaataagatctttgtgctgttcacctgaatttctagtgagctgggagctctcagcacgtgtatgcggccgctcagaggatcgagcgac

SEQ ID NO: 126439 - DNA, 2040 bp, Homo sapiens
gcgagaactcatcctgtagtcaccagatggagtcccaaacagccaagcagatgtaaggcctgtgctgtggctctgaggccctgaatacagaagggtcactttcttagtggccaaagagcagttgttgacattgatgtctaattattgaacacgaccagtcattttactgagctgcggtgaggaaacactgaccatagaagatcaagccaaatgagggattgcaaatttcctgattcttttgaattaggattccagatgggggcctcatttctacagcccccaacattcctatagccgttatcactgccatcaccactgccaccagcatcttcttgcagattccacccctgctccccagagacttcctgctttgaaagtgagcagaaaggaagctctcagaaaaatctctagtggtggctgccgtcgctccagacaatcggaatcctgccttcaccaccatgggctggctttttctaaaggttttgttggcgggagtgagtttctcaggatttctttatcctcttgtggatttttgcatcagtgggaaaacaagaggacagaagccaaactttgtgattattttggccgatgacatggggtggggtgacctgggagcaaactgggcagaaacaaaggacactgccaaccttgataagatggcttcggagggaatgaggtttgtggatttccatgcagctgcctccacctgctcaccctcccgggcttccttgctcaccggccggcttggccttcgcaatggagtcacacgcaactttgcagtcacttctgtgggaggccttccgctcaacgagaccaccttggcagaggtgctgcagcaggcgggttacgtcactgggataataggcaaatggcatcttggacaccacggctcttatcaccccaacttccgtggttttgattactactttggaatcccatatagccatgatatgggctgtactgatactccaggctacaaccaccctccttgtccagcgtgtccacagggtgatggaccatcaaggaaccttcaaagagactgttacactgacgtggccctccctctttatgaaaacctcaacattgtggagcagccggtgaacttgagcagccttgcccagaagtatgctgagaaagcaacccagttcatccagcgtgcaagcaccagcgggaggcccttcctgctctatgtggctctggcccacatgcacgtgcccttacctgtgactcaactaccagcagcgccacggggcagaaaagcctgtatggtgcagggctctgggagatggacagtctggtgggccagatcaaggacaaagttgaccacacagtgaaggaaaacacattcctctggtttacaggagacaatggcccgtgggctcagaagtgtgagctagcgggcagtgtgggtcccttcactggattttggcaaactcgtcaagggggaagtccagccaagcagacgacctgggaaggagggcaccgggtcccagcactggcttactggcctggcagagttccagttaatgtcaccagcactgccttgttaagcgtgctgggacatttttccaactgtggtagccctggcccaggccagctttacctcaaggacggcgctttgatggtgtggacgtctccgaggtgctctttggccggtcacagcctggggcacagggtgctgtttccaccccaacagcggggcagctgggagattttggagccctgcagactgtccgcctggagcgttacaaggccttctacattaccggtggagccagggcgtgtgatgggagcacggggcctgagctgcagcataagtttcctctgattttcaacctggaagacgataccgcagaagctgtgcccctagaaagaggtggtgcggagtaccaggctgtgctgcccgaggtcagaaaggttcttgcagacgtcctccaagacattgccaacgacaacatctccagcccagattacactcaggacccttcagtaactccctgctgtaatccctaccaaattgcctgccgctgtcaagccgca

SEQ ID NO: 126440 - DNA, 1179 bp, Homo sapiens
atgttgttttcacatagacgctgcacagccaagttctttgccatggagatggcctcctggatctgccttaaggcggcaataagaataatggctaaggaagaagaggaggaggaagaggagaggttggtcttgctgtctcaggggtggcagtggcagaagaaaattcatgtattacgtggacccatgcagttcaaatccgtgtcgctcaaaggggcacaatttagagaaaactcgagcaaacagctccaaaccaccgcggccttttcagactgctttgtggtcctctttgctttccggagcagaaatccaggtggaactgaaaggaaaaacaagcaggccagcttacctcaaggacggcgctttgatggtgtggacgtctccgaggtgctctttggccggtcacagcctgggcacagggaagtgatcattttgtccagctgttcttacacctcgttctatgaaacgctgggctctgataacacctacagctgggcggctccggcaatgaaaacaccgccacgtgggcctgctgcctttgcgtcacgcgcctttgtccaatggagagccgcgttacgaagccagggggtggtcgcagccgggcgggtccgcatcagctgccacggattggccaaggggggcggtgccgcatgccgtggcttgggctcgtggccaatggtggccggacgaggggccccgccttatcagggatttgtcttcttgctgctgctggctcccttatctaggttagagttccacaagagcagagtaagctctgccaccctttctcaggtgctgttccaccccaacagcggggcagctggagagtttggagccctgcagactgtccgcctggagcgttacaaggccttctacattaccgtttccaaggttttagggaatgagaagagacttggaaatcaccgtttccagtttctctccatctttccagaaatcaacaatccatataaaatagataggggccgagtcgcagcttacgtgcagtcctggttgaaagagaagcagttgagcgccgactcaaccccgcccgggggagcgtccgcggcctcggcctccatcgggggctcggcccgggaacatacagctccctccaaagcctttcctattaattactgggagtccccggaaatgcctcgcacgtgcggggacctgcccttttag

SEQ ID NO: 126441 - DNA, 942 bp, Homo sapiens
atggggttttaccatgttggtcaagctggtactgaactcctgacttcaaatgatccactcacctcagcctctcaaagtgctcgcattacagggaaagctttacaaaaacccacagaggtacctgtaccatatgagaagatgctacaagaccagtcagctttgatagtacaggggcttccggaaggtgttgcctttaaacaccctgagaactatgatcttgcaaccctgaaatggattttggagaacacagctgggatttcatttattattaatagaaacaggatcttgctctgtcaccctggatggagttcagtggtgcaatcacagctcattgtagcctcaaccccccaagctagcaatcctaccacggcctttcgagtagctgtgactacaggacgtgagcaattggtagggggcattactttggccaccacagtgaccaaaaggattggtgggggacaggttaaagacacagggaagttggaggaagaactgacaagtgaggttccagagagggcagagtctcctgataaagatggtcttctgaagagtttccttgagactctcttacagaatgatgtgtgtttacccaaggctacacatcaaaaagaatttgataccttaagtggaaaattagaaggtattccaagagctgaggaaaatgagaaaataagaaaggagaaagtagtaaaagaggaaatgaagatcgagaaagacagagagtacagagaggacgggaaggaacaagaggcaggtttatataatggaggatgggacatggatgaaactggaaaccatcattctcagcaaactatcgcaaggacaaaaaaccaaacactgcgcgttctcactcataggtgtgaattgaacaatgagaacacatggacacaagaagcggaacatcacactccagggactgttgtggggttggaggagggatag

SEQ ID NO: 126442 - DNA, 1281 bp, Homo sapiens; identical to SEQ ID NO: 119783

SEQ ID NO: 126443 - DNA, 684 bp, Homo sapiens
atggatgaagctggaaaccatcattctcagcaaagtatcacaaggacagaaaaccaaacactgcatgttctcactcctaggtgggaattgaacaatgagatcacttggacacaagaaatacaaactaccatcagagaataccataaacacctctatgcaaataaactagaaaatctagaagaaatggataaattcctggacacatacaccctcccaagactaaaccaggaagaagtggaatccctgaatagaccaataacaggctctgaaattgaggcaatagttaatagcctactaaccaaaaaaagtccaggaccagatggattcacagccgaattctaccagaggtacaaagaggagctggtaccattccttctgaaactattccagtcaatagaaaaagagggaatcctccctaactcattttatgaggccagcatcatcctgataccaaagcctggcagaggcacaacaaaaaaagagaattttagaccaatatccctgatgaacatcgatgcaaaaatcctcaataaaatactggcaaaccgaatccagcagcacatcaaaaagcttatccaccaagatcaagttggcttcatctctgcgatgcaaggctggttcaacatacacaaatcaataaacgtaatccatcatataacagaaccaaagacagaaaccacgtga

SEQ ID NO: 126444 - DNA, 711 bp, Homo sapiens; identical to SEQ ID NO: 126080

SEQ ID NO: 126445 - DNA, 514 bp, Homo sapiens
ggacatggatgaagctggaaaccatcattctcagcaaactatagcaaagacaaaaaaccaaacaccgcatgttcttactcataggtgggaattgaacaatgagtacacttggacacaggaaggggaacatcacacactggggcctgtcatgagccaagatcatactgaatgggcaaaagttggaagcattccctttgaaaactggcacaagacaaggatgctctctctcaccaatcctattcgacagagtattagaagccctggccagagaaatcaggcaagaaaagagataaaggacattcaaatagtaaaagaggaaatcaaactatccctgtttgcagatgatatgattctgtctctagaaaatctcacagtctctgctaaaaagctccttctgcttataaacaacttcagcaaagattcaagatacaacaccaatgtacaaaaatcaacaggaagactgagagccaaatcaggaatgcagtcccattcacaattgccacaaaaagcataa

SEQ ID NO: 126446 - DNA, 1965 bp, Homo sapiens; identical to SEQ ID NO: 121511

SEQ ID NO: 126447 - DNA, 1833 bp, Homo sapiens
atgattatctcaatagatgcagaaaaggcctttgacaaaattcaacaacccttcatgctaaaaactctcaataaattaggtattgatgggacgtatttcaaaataataagagctatctatgacaaacccacagccaatatcacactgaatgggcaaaaactggaagcattccctttgaaaactggcacaagacagggatgccctctctcaccactcctattcaacaaagtgttggaagttctggccagggcaattaggcaggagaaggaaataaagggtaatcaattaggaaaagaggaagtcaaattgtccctctttgcagatgacatgattgtatatctagaaaaccccattgtctcagcccaaaatctccttaagctggtaagcaacttcagcaaagtctcaggatacaaaatcaatgtacaaaaatcacaagcattcttatacaccaacaacagacaaacagagagccaaatcatgagtgaactcccactcacaatcgcttctaagagaataaaatacctaggaatccaacttacaagggatgtgaaggacctcttcaaggagaactacaaaccactgctcaaggaaataaaagaggatgcaaacaaatggaagaacattccctgctcatgggtaggaagaatcagtatcgtgaaaatggccatactgcccaaggtaatttacagattcaatgccatccccatcaagctaccaatgcctttcttcacagaattggaaaaaactactttaaagttcatatggaaccaaaaaagagcccgcatcaccaagtcaatcctaagccaaaagaacaaagctggaggcatcacactacctgacttcaaactatactacaaggctacagtaaccaaaacagcatggtactggtaccaaaacagagatatagatcaatggaacagaacagagccctcagaaataacgctgcatatctacaactatctgatctttgacaaacctgagaaaaacaagcaatggggaaaggattccctatttaatagatggtggtgggaaaattggctagccatatgtagaaagctgaaactggatcccttccttacaccttatacaaaaatcaattcaagatggattaaagacttacatgttagacctaaaatcataaaaaccctagaagaaaacctaggcattaccattcaggacataggcctgggcaaggacttcatgtctaaaacaccaaaagaaatgggaacaaaagccaaaattgacaaaggggatctaattaaactaaagagcttctgcacagcaaaagaaactaccatcagagtgaacaggcaacctacaaaatgggagaaaattttcacaacctactcatctgacaaagggctaatatccagaatctacaatgaactcaaacaaatgtacaagaaaaaaacaaacaaccccatcaaaaagtgggcaaaggacatgaacagacacttctcaaaagaagacatttatgcagccaaaacacacatgaaaaaatgctcaccatcactggccatcacagaaatgcaaatcaaaaccacaatgagataccatctcacaccagttagaatggcaatcattaaaaagtcaggaaacaacagcactgttgacaatagcaaagacttggaaccaacccaaatgcccatcaatgataggctggataaagaaaatgtggcacatatacaccatggaatactatgcagccataaaaaggatgagttcatgtgctttgcatggacatggatgaagctggaaaccatcattctcagcaaactatcacaagaacataaaaccaaacaccacatgttctcactcacaagtgggagttga

SEQ ID NO: 126448 - DNA, 554 bp, Homo sapiens
ggacatggatgaagctggaaaccatcattctcagcaaactatcacaaggagaaaaaaccaaacaccgcatgttctcacacatagagttaaataatgattacacattgaaaaaagtaatgaagccgctgatcacttcaaacacggtaactgatgaaatcgagcgcgcgaatgttttcaaaatgaacggcaaatggtacttgttcactgattcacgcggttcaaaaatgacgatcgatggtattaactcaaacgatatttacatgcttggttatgtatcaaactctttaaccggcccttacaagccgctgaacaaaacagggcttgtgctgcaaatgggtcttgatccaaacgatgtgacattcacttactctcacttcgcagtgccgcaagccaaaggcaacaatgtggttatcacaagctacatgacaaacagaggcttcttcgaggataaaaaggcaacatttgcgccaagcttcttaatgaacatcaaaggcaataaaacatccgttgtcaaaaacagcatcctggagcaaggacagctgacagtcaactaa

SEQ ID NO: 126449 - DNA, 1431 bp, Homo sapiens; identical to SEQ ID NO: 116402

SEQ ID NO: 126450 - DNA, 937 bp, Homo sapiens; identical to SEQ ID NO: 119784

SEQ ID NO: 126451 - DNA, 759 bp, Homo sapiens
atggaatactatgcagccataaaaaatgatgagttcacggtctttgtagggacatggatgaagctggaaaccatcattctcagcaaactatcacaaggacaaaaatccaaacaccgcatgttctcgctcatagacttgaagcgaattaaaatagacctaggtaaattctcagataaccctgatggctatattgatattttacaagggttaggaaaatcctttgatctgacatggagagatataatgttactactagatcagacactaaccccaaatgagagaagtgccgccataactgcagcccgagagtttgacgatctctggtatctcggtcaggtcaatgataggatgacgacagaggaaagagaacaattccccacaggccagcaggcagttcccagtgtagaccctcactgggacacagaatcagaacatggagattggtgccacagacatttgctaacttgcatgctagaaggacttaggaaaactaggaagaagccttttgcctcttccaccattgaaactgcaaaactacaaatcattcttcaaatggagtcccagatgcagtccatgactaagatctactgtgtacccctgaactggcctgctagtccatgctccaatgttaatgacatcgaagtcacccctcccaaggaaatctcaactgcacaaccctactacgccccaattcagcaggaagcagttaagagtgatcgtcaaccaacctccccaacagcacttgggttttcctgttga

SEQ ID NO: 126452 - DNA, 900 bp, Homo sapiens; identical to SEQ ID NO: 122042

SEQ ID NO: 126453 - DNA, 963 bp, Homo sapiens; identical to SEQ ID NO: 119840

SEQ ID NO: 126454 - DNA, 1230 bp, Homo sapiens
atggggttttaccatgttggtcaagctggtactgaactcctgacttcaaatgatccactcacctcagcctctcaaagtgctcgcattacagggaaagctttacaaaaacccacagaggtacctgtaccatatgagaagatgctacaagaccagtcagctttgatagtacaggggcttccggaaggtgttgcctttaaacaccctgagaactatgatcttgcaaccctgaaatggattttggagaacacagctgggatttcatttattattaatagtgccaccattgagcctcctgctgctcagcccatgtcctttactcacatgggacactctttgtgtgttcttgtggtagagactcacgcaaagccagttgctgtgcagagctcaagcttcaccagaaacccagaggtcatttccctggaagtggcagctgtgacagtaaaggaagaatcagaagatcctgattatgattatatcacattcaaggatgaagctggaaaccatcattctcagcaaattaacacaagaacaggaaaccaaacgctgcatgttctcacacatagaaacaggatcttgctctgtcaccctggatggagttcagtggtgcaatcacagctcattgtagcctcaaccccccaagctagcaatcctaccacggcctttcgagtagctgtgactacaggacgtgagcaattggtagggggcattactttggccaccacagtgaccaaaaggattggtgggggacaggttaaagacacagggaagttggaggaagaactgacaagtgaggttccagaaagggcagagtctcctgataaagatggtcttctgaagagtttccttgagactctcttacagaatgatgtgtgtttacccaaggctacacatcaaaaagaatttgataccttaagtggaaaattagaaggtattccaagagctgaggaaaatgagaaaataagaaaggagaaagtagtaaaagaggaaatgaagatcgagaaagacagagagtacagagaggacgggaaggaacaagaggcaggtttatataatggaggatgggacatggatgaaactggaaaccatcattctcagcaaactatcacaaggacaaaaaaccaaacactgcgcgttctcactcataggtgtgaattgaacaatgagaacacatggacacaggaagcggaacatcacactccagggactgttgtggggttggaggagggatag

SEQ ID NO: 126455 - DNA, 684 bp, Homo sapiens
cccatcaaagtgacagcccagagcacaagatcatctttaataaaaccccaacttcaccgggaaagaggatggaaatcatagatgacgatgtacccagcttccacgccaatggctaccagagaaaggtgtcatctgtgtgggtgcggagtggcatgtgggttggctactagtaccctggctaccgtgggctgcagtacctgctggagaagggagactacaaggacagcagcgactttggggcccgtcaccctcagggacatggatgaagctggaaaccatcattctcagcaaactaacacagaagcagaaaaccaaacaccacatgttctcactcataagtgggagttgaacagtgagaacacatggacacaaggaggggaacatcacacaccgaggcctgtcagggagtgggggacaagagggagagagagcattgggacaaataccaaatgcatgcacggcttaaaacctagatgacaggttgatgggtgcagcaaaccaccatggcacatgtatacctgtgtaacaaacctgcacgttctgcacatgtatcccagaacttataataaaaaagaaaccagtaagtgctcaataaatgttactaacatctatttcttcattcattcttcaaccattacccactgagtgcctatttggatacttggcttagtacctgggtgatga

SEQ ID NO: 126456 - DNA, 2685 bp, Homo sapiens
atgaacatcgatgcaaaaatcctcaataaaatactggcaaaccgaatccagcagcacatcaaaaagcttatccaccatgatcaagtgggcttcatccctgggatgcaaggctggttcaacatacgaaaatcaataaacatagtccagcatataaacagaaccaatgacaaaaaccacatgattatctcaatagatgcagaaaaggcctttgacaaaattcaacaacgcttcatgctaaaaactctcaataaattaggtattgatgggacgtatctcaaaataataagagctatctatgacaaatccacagccaatattgtactgaatgggcaaaaactggaagcattccctttgaaaactggcacaagacagggatgccctctctcaccacttctattcaacatagtgttggaagttctggccagggcaatcaggcaggagaaggaaataaagggtattcaattacgaaaagaggaaatcaaattgtccctgtttgcagatgacatgattgtacatctagaaaaccccattgtctcagcccaaaatctccttaagctgatagacaatttcagcaaagtctcaggatacaaaatcaatgtgcaaaaatcacaagcattcttatacaccaataacagacaaacagagagccaaatcatgagtgaactcccattcacaattgcttcagagagaataaaatacctaggaatacaacttacaagggacgtgaaggacctcttcaaggagaactacaaaccactgctcaatgacataaaagaggatacaaacaaatggaagaacactccacgctcatgggtaggaagaatcaatatcatgaaaatggccatactgcccaaggtaatttatagattcaatgccatccccatcaagctaccaatgactttcttcacagaattggaaaaaactactttaaagttcatatggaaccaaaaaggagcccgcattgccaagtcaatcctaatttatagattcaatgcccaagaattggaaaaaactactttaaagttcatatggaaccaaaaaggagcccgcattgccaagtcaatcctaagccaaaagaacaaagctggaggcatcacgctacctgacttcaaactatactacaaggctacagtaatcaaaacagcatggtactggtaccaaaacagagatatagaccaatggaacagaacagagccctcagaaataatgccacatatctacaaccatctgatctttgacaaacctgacaaaaacaagaaatggggaaatgattccctatttaataaatggtgctgggaaaactggctagccatatgtagaaagctgaaactggatcccttccttataccttatacaaaaattaattcaagatggattaaagacttaaatgttagacctaaaaccataaaaaccctagaagaaaacctaggcaataccattcaggacatagccatgggcaaggactttatgtctaaaacaccaaaagcaatggcaacaaaagccaaaattgacaaatgggatctaattaatctaaagagcttctgcacagcaaaagaaaccaccatcagagtgaacaggcaacctatagaatgggagaaaatttttgcaatctactcatctgacaaagggcgaatatccagaatctacaatgaactcaaacaaatttacaagaaaaaaacaaacaaccccatcaaaaagtgggcaaaggatatgaacagacacttctcaaaagaagacatttatgcagccaaaagacacatgaaaaaatgctcatcatcactggccattagagaaatgcatatcaaaaccacaatgagacaccatctcacatcagttagaatggcgatcattaaaaagttaggaaacgactggtgctggaggggatgtggagaaataggaagacttttacactgttggtgggactgtaaactagttcaaccattgtggaagtcagtgtggcgattcctcagggatctagaactagaaacaccatttgacccagccagcccattactgggtatataccaaaaggaattataaatcatgctactataaggacatatgcaccaagtatgtgtacctgcggcactattcacaatagcaaacacttggaaccaacccaaatgtacatcaatgatagactgggttaagaaaatgtggcatatatacaccatggaatactatgcagccataaaaacagatgagttcatgtcctttggcagggacatggatgaagctggaaaccatcattctgagaaaactatcacaaggacagaaaaccaaacaccgcatgtactcactcataggtgggaatttaacaatgagaacatttggacacagtgcagggagccatcacacaccagggcctatcatgaggtgtggggctgggggagggatagcattaggagaaatacctaatgtaaatgacgagttaatgggcacagcaaaccaacatggcacatgtatacctatgcaacaaaactgcacattgtgcacatgtaccctaaaacttaaagtatagtaataaaaaaaaattcaccaaacaccacaaaaaaaatcaagattgtcaaagaaaatttccacgtcccccgaaatcaaataaatagttagacaagcaggagttaaccagatatggcccattgcaagcgcccagacgcggggataagcgctgtccgtagatctact

SEQ ID NO: 126457 - DNA, 5654 bp, Homo sapiens
  misc_feature (1)...(5654): n = a,t,c or g
ggcaatcaggcaggagaaggaaataaagggcattcaattaggaaaagaggaagtcaagttgtccctgtttgcagatgacatgattgtatatctagaaaacgccatcatctcagcccaaaatctccttaagctgataagcaacttcagcaaagtctcaggatacaaaatcaatgtgcaaaaatcacaagcattcttacacaccaataacagacaaacagagagccaaatcatgagtgaactcccattcacaattgcttcaaagagaataaaatacctaggaatccaacttataagggacgtgaaggacctcttcaaggaaaactacaaaccactgctcaatgaaataaaagaggatacaaacaaatggaagaacattccatgctcatgggtaggaagaatcaatatcgtaaaaatggccatactgcccaaggtaatttatagattcaatgccatccccatcaagctaccaatgactttcttcacagaattggaaaaaacgactttcaagttcatatggaaccaaaaaagagcccgcatcgccaagtcaatcctaagccaaaagaacaaagctggaggcatcacgctacctgacttcaaactatactacaaggctacagtaaccaaaacagcatgggacatggatgaagctggaaaccatcattctcagcaaactatcacaaggacaaaaaaccaaacaccgcatgttctcactcataggtgggaattgaacaatgagaacacatggacacaggaaggggaacatcacacaccagggcctgctgctctaacattctataagtctgtgaatgtgctagaaaacctaaaagtacaagtgttactggaaagggatgccaatctggacgccaagagagggttcttggatctcgccaaagaaagaattcagggtgtcatccctacccatacatccccacccccaataaatgtctcacactccctactgtgtctcagcatctgcttcctggaggacccaactgacacagttgctatagaccatgattcaagaaagcaggatgtctccccgttcaatgttgtggcctggcacgggaattatacaccctacaagtacaacctgaagaatttcatggttatcaactcagtggcctttgaccatgcagacccatccattttcacagtattgactgctaagtctgtccgccctggagtggccattgctgattttgtcatcttcccacctcgatggggggttgctgataagaccttcaggcctccttattaccataggaactgcatgagtgagttcatgggactcatccgaggtcactatgaggcaaagcaaggtgggttcctgccagggggagggagtctacacagcacaatgaccccccatggacctgatgctgactgctttgagaaggccagcaaggtcaagctggcacctgagaggattgccgatggcaccatgagtcctgaaaagacaggctcaaatcccagttctgcgatgacttgtcgccttaagcaagtcgtttcccagctctcagccttaattcctcctctgcaaaatgggaagtatgactttcctcacaaggacatagccacaatcaacaaaattgatagactactagcaagactaataaagaagaaaagagagaagaatcaaatagatgcaataaaaaatgataaaggggatatcaccaccgatcccacagaaatacaaactaccatcagagaatactacaaacacctctacacaaataaactagaaaatctagaagaaatggataaattcctcaacacatacaccctcccaagactaaaccaggaagaagttgaatctctgaatagaccaataacaggctctgaaattgtggcaataatcaatagcttaccgacgaaaaagagtccaggaccagatggattcacagccgaattctaccagaggtacaaggaggaactggtaccattccttctgaaactattccaatcaatagaaaaagaaggaatcctccctaactcattttatgaagccagcatcatcctgataccaaagccaggcagagacacaaccaaaaaagaaaattttagaccaatatccttgaggaacattgatgcaaaaatcctcagtaaaatactggcaaaccgaatccagcagcacatcaaaaagcttatccaccatgatcaagtgggcttcatccctgggatggaaggctggttcaatatacgcaaatcaataaatgtaatccagcatataaacagaaccaaagacaaaaaccacatgattatctcaatagattcagaaaaaacctttgacaaaattcaacaacccttcatgctaaaaactctcaataaattaggtattgatgggacatatctcaaaataataagagctatctatgacaaacccacagccaatatcatactgaatgggcaaaaactggaagcattccctttgaaaactggcacaagacagggatgccctctctcaccactcctattcaacatagtgttggaagttctggccagggcattcaggcaggaggaggaaataaagggtattcaactgggaaaagaggaagtcaaattatccctgtttgcagatgacatgattgtatatctagaaaaccccatcgtctcagcccaaaatctccttaagctgataagcaacttcagcaaagtctcaggatacaaaatcaatgtacaaaaatcacaagcattcttatacaccaataacacagacaaacaagagagccaaatcatgagtgaactcccattcacaactgcttcaaagagaataaaatacctaggaatccaacttacaagggatgtgaaggacctcttcaaggagaactacaaaccactgctcaatgaaataaaagaggatacaaacaaatggaagaacgttccatgttcatgggtaggaagaatcagtatcgtgaaaatggccatactgcccaaggtaatttatagattcaatgccatccccatcaagctaccaatgactttcttcacagaattggaaaaaactactttaaagttcatatggaaccaaaaaagagcccacatcaccaagtcaatcctaagccaaaagaacaaagctggaggcatcacgctacctgacttcaaactatactacaaggctacagtaaccaaaacagcatggtactggtaccaaaacagatatatagaccaatggaacagaatagagccctcagaaataatgccgcatatctacaactatctgatctttgacaaacctgacaaaaacaagaaatggggaaaggattccctatttaataaatggtgctgggaaaactggctagccatatgtagaaagctgaaactggatcccttccttacaccttatacaaaaattaattcaagatggattaaagacttaaatgttagacctaaaaccataaaaaccctagaagaaaacctaggcaataccattcaggacacaggcatgggcaaggacttcatgtctaaaacaccaaaagcaatagcaacaaaagccaaaattgacaaatgggatctaattaaactaaagagcttctgttctttgctggggtatctgaagactgaaaacacagcaaaagaaactaccatcagactgaacaggcaacctacagaatgggagaaaatttttgcaatctactcatctgacaaagggctaatatccagaatctacaaagaactcaaacaaatttacaagaaaaaaacaaacaaccccatcaaaaagtgggcaaaggatatgaacagacacttctccaaagaagacatttatgcagccaaaaaacacatgaaaaaatgctcatcatcactggccatcagagaaatgcaaatcaaaaccacaatgagatactatctcacaccagttagaatggcgatcattaaaaagtcaagaaacaacagatgccggaggggatgtggagaaataggaacacttttacactgttggtgggactgtaaactagttcaaccattgtggaagacagtgtggcgattcctcaaggatctagaactagaaaaaccatttgacccagccatcccaatactgggtatatactgggtgtatacccaaaggattataaatcatgctgctataaagatacatgcacacatatgtttattgcagcactattcacacaatagcaaagacttggagccaacccaaatgtcccatccaatggatagacctggattaagaaaatgtggccccttatacacccatggaatacctatgcaagccataaaaaaatgatgagtttatgtcctctgtcgggacgtggatgaagctggaaaccatcattctcagcaaactatcgcaaggacaaaaaaaccaaacaccgcatgcttctcactcataggtgggaattgaacaatgagaacacttggacacaggacacaaggcggggaacatcacacaccgggacctataggaagnagatcccctactttacttatgcatgtgcactacatcaaagttatatcctggagagaactcttgttgatttggctccgagctgccaatgcatctatcaaccccggagttgagcagtcaccctccggggatccaaagacagtcacgggcttccctttcctgcggctggaggccgcagactgggtggaagaggcatctgtccccaagggcgtgcacattgccctctccagccaagagcagcgtgctggggaccctcgtgatttggaagcaccttctaacttagttatttctgagcgaacccatcgttcttttagagtgagctggacaccaccttctgacagtgtggatcgatataaggtggaatactatccagtttctggagggaaacgtcaagaagtcgtgcgaacacctggggtcccggatctccgcttgcctgccatcatcccccaggctgcttggctgctggctcatctgcccgcaccgtccgccccgccgactgagctccccacaaagcacacagaggcgcagagccagcgctgttggagtcttttattgtgttctgtcaccgaggtcgcagccccgagccaggtagtaaaagaagctccaccttctttccacacgggaacagaaaacggataccaaggcgaagaatctttatttaacaaagcgtactacggcggcggcacgaacttcttccgtaaagaaagccagaagcttcagcagagcgctaaaaaacgcgatgctgagttagcgaacggcgccctcggtatcatagagttaaataatgattacacattgaaaaaagtaatgaagccgctgatcacttcaaacacggtaactgatgaaatcgagcgcgcgaatgttttcaaaatgaacggcaaatggtacttgttcactgattcacgcggttcaaaaatgacgatcgatggtattaactcaaacgatatttacatgcttggttatgtatcaaactctttaaccggcccttacaagccgctgaacaaaacagggcttgtgctgcaaatgggtcttgatccaaacgatgtgacattcacttactctcacttcgcagtgccgcaagccaaaggcaacaatggtggttatcacaagctacatgacaaacagaggcttcttcgaggataaaaaggcaacatttgcgccaagcttcttaatgaacatcaaaggcaataaaacatccgttgtcaaaaacagcatctggagcaaggacagctga

SEQ ID NO: 126458 - DNA, 505 bp, Homo sapiens
atttcaggtgcaattaaaaactagcatttctagtcagtatgtaattcggatgcagccgactaatacgatgcctttctacactggagtgacgacagctgctgctctttccatcttggagacaaataatgtacatacaagagcatatttccagtacagggaaagaagtccattcagtaagagaaaatcagaccaaaacaaagagaagcataccgccaagaaacagaactgccatgagaaccagatccagcaaagcctgaagcctctcctactcactctgaacctcaccggccacaccagctcatgtgtccatcagcctgtattccataaggcaacaccagctcatgcgtccatcagcgtgtattacctcacggcaaaccagcgtcatggatccatcagcttgtattccctcaggcacaacagcttcatggtcgatcagctagtattcctcaggcacaacacgctcatggtccatcagcttgttatcctacggcacaccagctcatag

SEQ ID NO: 126459 - DNA, 693 bp, Homo sapiens
  misc_feature (1)...(693): n = a,t,c or g
atgtcctttgcagcaacatggatgcagctggacgccattatcctatgtgaattaatgcaggaacagaaaaccaaaccacatgttctcatatcaatgatcgatatcgatcgacggataccacgaggacaatctaaatgtaaattcttcccatataacgaaagaatagctcttgggatattaaataagtgtaccggaaatgtggtcaatcagccggtgcaattaaaaactagcatttctagtcagtatgtaattcggatgcagccgactaatagatgcctttctacactggagtgtgcagctgttgctctttccatcttggagaaaaataattacatacaagaggttttcacacgcaattatggtgtacagaagcctagtgcacacttcaaaagagctagaagaggaggactgaagggttccagcaaaaagaaaagacagatattgaaagtgacagatatcccaagttcacaganaagaccgacggccacaaatatagaaggacacacagagacggccaaaaaacacggccgcaaggtgcacaaatcttgggggaaagaccccgtgaaaactcgccggacaccccgggctaagagggctcggcgtgcattccaccttctgaaaagcggtgaacagacgggagaaggaaaaccggcgcgtcttaaaggggtcccacagagtcaggggaagaaatga

SEQ ID NO: 126460 - DNA, 480 bp, Homo sapiens
atgacaaaaattggatcaggaaagctgatgggacccaaaggagtttctgtggaccgcaatgggcacattattgttgtggacaacaaggcgtgctgcgtgtttatcttccagccaaacgggaaaatagtcaccaggtttggtagccgaggaaatggggacaggcagtttgcaggtccccattttgcagctgtaaatagcaataatgagattattattacagatttccataatcattctgtcaagttgtctgagggaagtcaaaagcatgcaagcctacagaaaagcattgagaaagctaaaattggccgatgtgaaacgatatcagaagagtttagtggttcagaaacgttcctaagaaagatgaagtcttgtgctcatcctgatcttaccagccaggacttttcagagctacctagcccctatctgctaattattcttgatgatggtggtgatcctgctgctggtaaagaagaaaaatag

SEQ ID NO: 126461 - DNA, 660 bp, Homo sapiens
atgcatgttgttgctcctgaagaccttcctgtgggacagattgtggaggtggaaacagtgatattggtgatcctgaacctgtgtaggcctacgctaattgctaggaatccaggtgtgagctattgcacctggctgaaagacaatattattaaggaaatactccccaaattgatctacagattcaatgctaaacctatcaaaatttcagctgcttttttgcagaaattgttgtctgagggaagtcaaaagcatgcaagcctacagaaaagcattgagaaagctaaaattggccgatgtgaaacggaagagcgaaccaggctagcaaaagagctttcttcacttcgagaccaaagggaacagctaaaggcagaagtagaaaaatacaaagactgtgatccgcaagttgtggaagaaataccaaggctggtcactctgaaaaaacaagctgagattcaagtgaatgcatccatccttgacaatggcatgttgtctgtggcaaatgagatgaagaagcaaaatgtcaaggattctgcttctcatgtatcctaagtttcattccgttaagggaaaaagtctttctgtgaaagcaaatctcataacctagttaagagacttataaaattttgctaattctacagggtaagtgaaaaaaatcattat

SEQ ID NO: 126462 - DNA, 432 bp, Homo sapiens
gtactgccccgttccggttggggttaccgggccgacgatttcgtccagccatggagcgctctgggcccatcgaagttacaggctcagacgcatcgggaccggacccgcagcttgcggtcaccatgggcttcacggggttcggggttcggtaaaaaagctcacacatttgacttggaagcaatgtttgaacaaactcaaagaacagctgtggaaagaagtcacaaaacactgggatggtgattgctcacaccaaagccttggacccctcccagcctgtgacctttgtgaccaacgtcacctatgcagcagacaagggggctctgtatgtggatgtgatccgtgtgaacagctactactcttggtatcgcaactacgggcacctggagttgattcagctgcagctggccacccagtttgagaattggtgtaaga

SEQ ID NO: 126463 - DNA, 2018 bp, Homo sapiens
gcaaagccagctgggctcctgagtccggtgggtacttggagaacttactacgtctagctggaggattgtaaatgcaccaatcagcatgctgtgtctagctcaagattttctccatccccttattttgggccagtggctgtcattacatatgagatgagtctcttgaagactacagatgaactcaagctccatgaggagatgtttcattgtcgagagcagtcatgatggcctgcactccacacaatgcaacagagtgaaagagcaggttctgcttctttggtgtagtcctgaagcttcctaagaaacttcacatcaggtgatggataggagcaaccctgtaaaaccagccttagactatttttcaaacaggctggtgaattaccagatctccgtcaagtgcagtaaccagttcaagttggaagtgtgtcttttgaatgcagagaacaaagtcgtggacaaccaggctgggacccagggccagctgaaggtgctgggtgccaacctctggtggccgtacctgatgcacgaacaccccgcctacctgtactcctgggaggatggtgattgcttcacaccaaaagccttggaccccctcccagcctgtgacctttgtgaccaactcccacctacgcagcagacaagggggctctgtatgtggatgtgatccgtgtgaacagctactactcttgggtatcgcaactacaggcacctgcaattgattcagctgcagctggccgcccagtttgagaattggtgtaagacatcacaatcccattattcagagcgcgtatggagtggaaacgcttgtagggcttcaccaaggctggtgaattaccatatctccgtcaagtgcagtaaccatgttcaagttggaaggtgtgtcttttgaatgcagaaaacaaagtccgtggacaaccaggctgggacccagggccagctgaaggtgctgggtgccaacctctggtggccgtacctgatgcacgaacaccccgcctacctgtactcgtgggaggatggtgattgctcacaccaaaagccttggacccctcccagcctgtgacctttgtgaccaagtcccacctaccaggcagacaaggggcctctgtatggggaattgaaccgtgtgaacagctaccacccttggtatcgcaactacgggcacctgggagttgattcggctgcaggccctgcagctggccgcccagtttgtgaattggtgtaagacatcacaatcccattattcagagcgcgtatggagtggaaacgctttgtagggttttcaccaggtaagcggtgttgaactttctgcttgtgtattctctctgggcagagatgccacttgcctcccccaccatgccatctctgaagaatattacagaccattttggagcatggtgaataagaaattttcaccttaggagttcagttgaatagtcatttttatatttgtgactgcaagtcactcttaggggctgtacttccttagtactggtagcattattatccaatggacttttatagctttcattaggttttcttttgtttttgttctttaaagaacgttttacttatcttagtatttcatttttcatctatattatgaggcagtaagagtcttctgtttttccaaagttgagactgctttatatttatttcgtattgtctacagctgtagtgttcaatacattagccactagccacatgtggttatttaaataagataaaataaaaattggccgggcgtggtgggtcacgccggtaatcccagcactttgggaggccgaggcgggcagatcattaggtcaggagatcgagaccatccttactaagacggtgaacccccatctctattaaaaatacaaaaaattagccgggcgtggtggcgggcgcctgcagtcccagctactcaggaggctgaggcaggagaatggcgtgaacctgggaggcagagtttgcagtgagccgagatggcgccactgcactccagcctggggacagagcgagactccatctcaaaa

SEQ ID NO: 126464 - DNA, 776 bp, Homo sapiens
ggtcgacggaagcgcgacctggagctgcggggttaccatgggaaccgaaccgccgcgcctcgcccaggacagttacacttagaggccttcaaaagagggagaatgccctcccgataagaacccatgcaaagagctgtgccagggcgatgaattgtgtccggctgaacagaagtgctgcaccacaggctgtggtcggatctgccgagacattcctaaggagtttggtggtgaatgtcccgctgacccccttccgtgtgaggagctgtgtgatggggatgcatcctgtccccaggggcataaatgctgcagaaccggctgtggccgcacctgcctcggagacattgagggagggcggggcggtgattgtccaaaagttctggtgggcctgtgcattgttggctgtgtgatggatgagaattgtcaagctggagaaaaatgttgcaagtcaggctgtggccgcttctgtgtcccaccagtcctgcccccaaaactgaccatgaaccccaactggactgtgaggtctgattccgaattagagatcccggtgccctagctgtgctgatttgtctggagcttctttggtaattctggaagcttttcctggcagtcaagagagggtgacatcctggggcttgtgacatttccaggggcactcatggccctctctgctctgcttctcctcctgccgctgaccagagcatgggaaatagccctggattgggtagtgggtgtgtggtgcttctctttcccaataaaggctggtgctgacctctaaa

SEQ ID NO: 126465 - DNA, 462 bp, Homo sapiens
atgacggtaacagcctctgacacatgcagctcctggacacgttctcagcttgtctgtaagcgcatgcctgtaccatacaagcccgtcagggcgcgtcagcgtgtgttgccgggtgtcggggctggcttacctatgcggcatcacagcagattgttcttagagtgccccatatgcggtgtgatataccgcacaaatgcgtacaggctgcgcaactgttgggaagggcgactcggtgcagggccttttagctattacgccagctgtcgaaaggggcaccctcccccacttgcgattcagtcgggttttcaagaacggaaagaaacctttgccgaaaaagaaatcaaggagacttgcagggtttgcgtctataaaattccgacagagggcgctgttgcccgttcaatgacagggaacggtccgtgggaacggtttaccttgcaatgtctaggacttttcgaataa

SEQ ID NO: 126466 - DNA, 957 bp, Homo sapiens
  misc_feature (1)...(957): n = a,t,c or g
atggtgggcgccctttccccagcctcgntgntgccttgcagtttgagctcagactgctgtgctagcaatcagcgagattccgtgggcataggaccctccgagccacgtgtgggatataatatcctggtgatccgttttttaagcccgtcggaaaagcgcagcccccgccgtgggagtgacccgattttccagtgcttgggaaccctcacaactggcagggattttgccgatttcggaaccaccatcaaacaggattttcgcctgctggggcaaaccagcgtggaccgcttgctgcaactctctcagggccaggcggtgaagggcaatcagctgttgcccgtctcactggtgaaaagaaaaaccaccctggcgcccaatacgcaaaccgcctctccccgcgcgttggccgattcattaatgcagctggcacgacaggtttcccgactggaaagcgggcatgattatcgtgtcctggtgggcgagctggatgatgagcagatggctgcattatccagattgggtaccgattatcgcccaacaagtgcttatgaacgtggtcagcgttatgcaagccgattgcagaatgaatntgctggaaatatttctgcgctggctgatgcggaaaatatttcacgtaagattattacccgctgtatcaacaccgccaaattgcctaaatcagttgttgctcttttttctcaccccggtgaactatctgcccggtcaggtgatgcacttcaaaaagcctttacagataaagaggaattacttaagcagcaggcatctaaccttcatgagcagaaaaaagctggggtgatatttgaagctgaagaagttatcactcttttaacttctgtgcttaaaacgtcatctgcatcaagaactagtttaagctcacgacatcagtttgctcctggagcgacagtattgtataagggcgataaccatggtgcttaa

SEQ ID NO: 126467 - DNA, 1188 bp, Homo sapiens
atggataaattcctggacacaaacactctcccaagactaaaccaggaagaagttgaatttctgaatagaccaataacaggatttgaaattgtggcaataatcaatagcttaccaaccaaaaagagtccaggaccagatggattcacagccaaattctaccagacttacaaggaggaactgggattttgccgatttcggaaccaccatcaaacaggattttcgcctgctggggcaaaccagcgtggaccgcttgctgcaactctctcagggccaggcggtgaagggcaatcagctgttgcccgtctcactggtgaaaagaaaaaccaccctggcgcccaatacgcaaaccgcctctccccgcgcgttggccgattcattaatgcagctggcacgacaggtggtatttttgaatatgtcttatctggcccaatgggagctgaggaacttgcattcagatttgctgtgaacacaattaacagaaacagaacattgctacccaatactacccttacctatgatacccagaagataaacctttatgatagttttgaagcatccaagaaagggattttgccgatttcggataccaccatcaaacaggattttcgcctgctggggcaaaccagcgtggaccgcttgctgcaactctctcagggccagacggtgaagggcaatcagctgttgcccgtctcactgtattatccggataataatcagaccgacgattcgagggggaccgtggttccagacttaaaaacggacggcgaatacgagggggacggtggtccccagactaataatcagaccgccgatacgagtgggaccatggtgttaggttacaaaacatctcagttaagagagctgataaccaaaggttcaaccactgtgggtagtcagtacgtgcatttcttcaagagaattacaaattggaaaaaaccaattcgagcccagccatacccattcaagggactaataatcagacgcacgatacgagtgggaccatggtcccagctatataatcagaccgctgatacgagtgggacggtggtcccagtctcattatcagaccgaccatacgagtgggaccgtggtcccagactaataatcagaccgactatacgagtgggaccgtggtcccagactaataatcagaccgtcgatacgagtgggaccgtggtcccagtctga

SEQ ID NO: 126468 - DNA, 1233 bp, Homo sapiens
atgtgtatggtacgcgactgcgacgtgctgaagacgtatatccaccggggctacgtgttcttgctcgaggaaggcaacgacccccagggaacagcctcaatgtatcacggatgggtaccagatcatcatattcatgcagaagacactctcctgcctttctatcatggggaaaaggacgatgtcacttatgcaataaagcccacttgctggccggggctggacattattccttcctgtctggctctgcaccgtattgaaactgagttaatgggcaaatttgatgaaggtaaactgcccaccgatccacacctgatgctccgactggccattgaaactgttgctcatgactatgatgtcatagttatcgacagcgcgcctaacctgggtatcggcacgattaatgtcgtatgtgctgctgatgtgctgattgttcccacgcctgctgagttgtatgactacacctccgcactgcagttttcgatatgcttcgtgatctgctcaagaacgagggattttgccgatttcggaaccaccatcaaacaggattttcgcctgctggggcaaaccagcgtggaccgcttgctgcaactctctcagggccaggcggtgaagggcaatcagctgttgcccgtctcactggtgaaaagaaaaaccaccctggcgcccaatacgcaaaccgcctctccccgcgcgttggccgattcattaatgcagctggcacgacaggtttcccgactggaaagcgggcaggattttgccgatttcggaaccaccatcaaacaggattttcgcctgctggggcaaaccagcgtggaccgcttgctgcaactctctcagggccaggcggtgaagggcaatcagctgttgcccgtctcactggtgaaaagaaaaaccaccctggcgcccaatacgcaaaccgcctctccccgcgcgttggccgattcattaatgcagctggcacgacaggtttcccgactggaaagcgggcaggattttgccgatttcggaaccaccatcaaacaggattttcgcctgctggggcaaaccagcgtggaccgcttgctgcaactctctcagggccaggcggtgaagggcaatcagctgttgcccgtctcactggtgaaaagaaaaaccaccctggcgcccaatacgcaaaccgcctctccccgcgcgttggccgattcattaatgcagctggcacgacaggtttcccgactggaaagcgggcagtga

SEQ ID NO: 126469 - DNA, 1308 bp, Homo sapiens
atgtcttggtgtcttgtgaggacaccaagagggcagcgtcttcaggctaagcagaggcgtccaaggaaaccagcccagccggtgcctttatctccaactgccagcctccagaatgtgatcttatttcattatggtgaaagttggaacctcttacgtgccgatcaacgtctcattttcgccaaaagttggcccagggcttcccggtatcaacagggacaccaggatttatttattctgcgaagtgatcttccgtcacaggtatttattcgcgataagctcatggagcggcgtaaccgtcgcacaggaaggacagagaaagcgcggatctgggaagtgacggacagaacggtcaggacctggattggggaggcggttgccgccgctgctgctgacggtgtgacgttctctgttccggtcacaccacatacgttccgccattcctatgcgatgcacatgctgtatgccggtataccgctgaaagttctgcaaagcctgatgggacataagtccatcagttcaacggaagtctacacgaaggtttttgcgctggatgtggctgcccggcaccggggattttgccgatttcggaaccaccatcaaacaggattttcgcctgctggggcaaaccagcgtggaccgcttgctgcaactctctcagggccaggcggtgaagggcaatcagctgttgcccgtctcactggtgaaaagaaaaaccaccctggcgcccaatacgcaaaccgcctctccccgcgcgttggccgattcattaatgcagctggcacgacaggcccttattcacattttggcccgcttgatgaaggttctccgaagttccgtatggcaatgaaagacgaggatgccggcgatgaaaaaggctatgaatcttttccttggtttatcaaacgtgcgcacagtccatccagagggctttacagtgtacatatcaacccatatctcattcctttctttatcgggttacagaaccggtttacgcagtttcggcttagtgaaacaaaagaaatcaccaatccgtatgccatgcgtttatacgaatccctgtgtcagtatcgtaagccggatggctcaggcatcgtctctctgaaaatcgactggatcatagagcgttaccagctgcctcaaagttaccagcgtatgcctgacttccgccgccgcttcctgcaggtctgtgttaatgagatcaacagcagaactccaatgcgcctctcatacattgagaaaaagaaaggccgccagacgactcatatcgtattttccttccgcgatatcacttccatgacgacaggatag

SEQ ID NO: 126470 - DNA, 1215 bp, Homo sapiens
  misc_feature (1)...(1215): n = a,t,c or g
atgggtgtggtaccagaggagctgttcctggaggaactgaatctcagtggcttgaagtgggattttgccgatttcggaaccaccatcaaacaggattttcgcctgctggggcaaaccagcgtggaccgcttgctgcaactctctcagggccaggcggtgaagggcaatcagctgttgcccgtctcactggtgaaaagaaaaaccaccctggcgcccaatacgcaaaccgcctctccccggcgcgttggccgattcattaatgcagctggcacgacaggtttcccgactggaaagcgggcagcatcccgaatttgctcctccatcccacggggactgagagccattactattgctgtatttggtaagcaaaatacgtacatcaggctcgaaccctttaagatcaacgttcttgagcagatcacgaagcatatcgaaaaactgcagtgcggaggtgtagtcaaacaactcagcaggcgtgggaacaatcagcacatcagcagcacatacgacattaatcgtgccgatacccagatccctaaacagcagcaaancgaaaaataccaagtgcctcaattcgatcaatcaacgattaaaaatattgagtctgcaaaaggacttgatgtgtgggacagctggccgctgcaaaacgctgacggaacagtagctgaatacaacggctatcacgttgtgtttgctcttgcgggaagcccgaaagacgctgatgacacatcaatctacatgttttatcaaaaggtcggcgacaactcaatcgacagctggaaaaacgcgggccgtgtctttaaagacagcgataagttcgacgccaacgatccgatcctgaaagatcagacgcaagaatggtccggttctgcaacctttacatctgacggaaaaatccgtttattctacactgactattccgcgcaggtaaatgtgtcaaaatctgatgacacactcaaaatcaacggagtggaagatcacaaaacgatttttgacggagacggaaaaacatatcagaacgttcagcagtttatcgatgaaggcaattatacatccggcgacaaccatacgctgagagaccctcactacgttgaagacaaaggccataaataccttgtattcgaagccaacacgggaacagaaaacggataccaaggcgaagaatctttatgggggtcctttagagtcgcacaaagcagggctgtcaagtcctag

SEQ ID NO: 126471 - DNA, 1263 bp, Homo sapiens
atgacgaaggctatcgccattgcacagtttaatgatgacagcccggaagcgaggaaaataacccggcgctggagaataggtgaagcagcggatttagttggggtttcttctcaggctatcagagatgccgagaaagcagggcgactaccgcacccggatatggaaattcgaggacgggttgagcaacgtgttggttatacaattgaacaaattaatcatatgcgtgatgtgtttggtacgcgattgcgacgtgctgaagacgtatttccaccggtgatcggggttgctgcccataaaggtggcgtttacaaaacctcagtttctgttcatcttgctcaggatctggctctgaaggggctacgtgttttgctcgtggaaggtaacgacccccagggaacagcctcaatgtatcacggatgggtaccagatcttcatattcatgcagaagacactctcctgcctttctatcttggggaaaaggacgatgtcacttatgcaataaagcccacttgctggccggggcttgacattattccttcctgtctggctctgcaccgtattgaaactgagttaatgggcaaatttgatgaaggtaaactgcccaccgatccacacctgatgctccgactggccattgaaactgttgctcatgactatgatgtcatagttattgacagcgcgcctaacctgggtatcggcacgattaatgtcgtagggggattttgccgatttcggaaccaccatcaaacaggattttcgcctgctggggcaaaccagcgtggaccgcttgctgcaactctctcagggccaggcggtgaagggcaatcagctgttgcccgtctcactggtgaaaagaaaaaccaccctggcgcccaatacgcaaaccgcctctccccgcgcgttggccgattcattaatgcagctggcacgacaggtttcccgactggaaagcgggcagtgagcgcaacgcaattaatacccagctgtgagaacctggaagcacagagaagaggaaatgaagccgaagcaggcggctctcacaagagatctggccagggccagaaccagagggtgccctgtcactgccagagtcctgatcagatgctgctctcctctcctcagggcttggaagtttctagaaagcagaggttagctcagggcccccacaattcaagtggagactcagggtcccgtattatagcaaagattcctaaagcatgtgttaactaccctaaagagagcccaaatcgttcccaaacctga

SEQ ID NO: 126472 - DNA, 1221 bp, Homo sapiens
atggagaaaaaaatcactggatataccaccgttgatatatcccaatggcatcgtaaagaacaatttgaggcatttcagtcagttgctcaatgtacctataaccagaccgttcagctggatattacggcctttttaaagaccgtaaagaaaaataagcacaagttttatccggcctttattcacattcttgcccgcctgatgaatgctcatccggagttccgtatggcaatgaaagacgaatgtacaacaccaagagtgaacctgaatgtaaactatggaccttggatgataatggacgtggataaagctggaaaccatcattctcagcaaactaacacaggaacagaaaaccaaacaccctatgttctcacacataaatgggagttgactaatgagaacacatggacacagggaggggatcatcacgcacaggggcctgtcaggggctgtggggcaagggattttgccgatttcggaaccaccatcaaacaggattttcgcctgctggggcaaaccagcgtggaccgcttgctgcaactctctcagggccaggcggtgaagggcaatcagctgttgcccgtctcactggtgaaaagaaaaaccaccctggcgcccaatacgcaaaccgcctctccccgcgcgttggccgattcattaatgcagctggcacgacaggtttcccgactggaaagcgggcaacccgtaaagaaaaataagcacaagttttatccggcctttattcacattcttgcccgcctgatgaatgctcatccggagttccgtatggcaatgaaagacggtgagctggtgatatgggatagtgttcacccttgttacaccgttttccatgagcaaactgaaacgttttcatcgctctggagtgaataccacgacgatttccggcagtttctacacatatattcgcaagatgtggcgtgttacggtgaaaacctggcctatttccctaaagggtttattgagaatatgtttttcgtctcagccaatccctgggtgagtttcaccagttttgatttaaacgtggccaatatggacaacttcttcgcccccgttttcaccatgggcaaatattatacgcaaggcgacaaggtgctgatgccgctggcgattcaggttcatcatgccgtttgtgatggcttccatgtcggcagaatgcttaatgaattacaacagtactgcgatgagtggcagggcggggcgtaa

SEQ ID NO: 126473 - DNA, 1107 bp, Homo sapiens
aaggggccatctgctgcaatggaagccgaaccattgtccgacacccaggcattaaagagtttcgcggggaaggaagtggttttttatcgccctgaagaggatgccggcgatgaaaaaggctatgaatcttttccttggtttatcaaacgtgcgcacagtccatccagagggctttacagtgtacatatcaacccatatctcattcccttctttatcgggttacagaaccggtttacgcagtttcggcttagtgaaacaaaagaaatcaccaatccgtatgccatgcgtttatacgaatccctgtgtcagtatcgtaagccggatggctcaggcatcgtctctctgaaaatcgactggatcatagagcgttaccagctgcctcaaagttacccccccacgcctgacttccgccgccgttacaaaaagaaggggccatctgctgcactggaagccgaaccattgtccgacacccagtctctagagctttttttaagtctggcatggagtctaaagattcgcatttctaacaagttccctgacgctcttgctgttgctgctggttggaaccacactttgaaaaccactgacctcgggggattcatcagtattgagtctgcaaaaggacttgatgtgtgggacagctggccgctgcaaaacgctgacggaacagtagctgaatacaacggctatcacgttgtgtttgctcttgcgggaagcccgaaagacgctgatgacacatcaatctacatgttttatcaaaaggtcggcgacaactcaatcgacagctggaaaaactcgggccgtgtctttaaagacagcgataagttcgacgccaacgatccgatcctgaaagatcagaggggggattttgccgatttcggaaccaccatcaaacaggattttcgcctgctggggcaaaccagcgtggaccgcttgctgcaactctctcagggccaggcggtgaagggcaatcagctgttgcccgtctcactggtgaaaagaaaaaccaccctggcgcccaatacgcaaaccgcctctccccgcgcgttggccgattcattaatgcagctggcacgacaggtttcccgactggaaagcgggcagtga

SEQ ID NO: 126474 - DNA, 1275 bp, Homo sapiens
atgtatacacatatagggggtcctttagagtcgactgacagggatgcaagtccagaagttggaaagaaaaagaggttaattgaccttacagttccacatggctgcaaggcttcagaatcatggcaggagggcctcttcaaaatttatcccctcccagaagacccagccatccccatgcccccaagacagttccaccagctggccgcccagggaccccaggagtgcttggtccgtatctacattgtccgagcatttggcctgcagcccaaggaccccaatggaaagtggctccaagtagcgaagcgagcaggactgggcggcggccaaagcggtcggacagtgctccgagaacggcacgccatagtgactggcgatgctgtcggaatggacgatatcccgcaagaggcccggcagtaccggcataaccaagcctatgcctacagcatccagggtgacggtgccgaggatgacgatgagcgcattgttagatttcatacacgggtcaccgtcgacagcgacacacttgcatcggatgcagcccggttaacgtgccggcacggcctgggtaaccagggattttgccgatttcggaaccaccatcaaacaggattttcgcctgctggggcaaaccagcgtggaccgcttgctgcaactctctcagggccaggcggtgaagggcaatcagctgttgcccgtctcactggtgaaaagaaaaaccaccctggcgcccaatacgcaaaccgcctctccccgcgcgttggccgattcattaatgcagctggcacgacaggtttcccgactggaaagcgggcacgcacgaactttaccgtcatcgcccagcgccagaccgacaaaaaacgccaccagcaggaagatttcaccccataccacagggatttccatacggtgtacaaactgcgcttccgtggaatgcgggttactgcgttggcgtatcgccatggcgatcagcgccaccgccgcaccggacgagatgccggagaagaggaacagcaccggcaggatcgggttattgaggaacggatacgatttcagcgccgacagcagaaagccggtataagcccccaacaacaccgccagcaccagcatcaatgtttccagtccgcgatgaacgggcgtcagcaggctcagaaccttttgcacgatccccagcttcggcaaccagcgttgttgcagggcaagcaaatcatgttcaaagatttcgccagccacagcaccgggggtcctctagagtcgacagcaagcgatgcaagctag

SEQ ID NO: 126475 - DNA, 582 bp, Homo sapiens
atggggggagtgacactggccttttgggctgtgtgggagtgggttgaggcctgtaactgccggctttcccttgcttccctagcaactggcatgacacagcagagggattttgccgatttcggaaccaccatcaaacaggattttcgcctgctggggcaaaccagcgtggaccgcttgctgcaactctctcagggccaggcggtgaagggcaatcagctgttgcccgtctcactggtgaaaagaaaaaccaccctggcgcccaatacgcaaaccgcctctccccgcgcgttggccgattcattaatgcagctggcacgacaggtttcccgactggaaagcgggcaggtacagcccccatggctgctttcatgggctggtgttgagtgcctgcagctttttcaggcacatggtgcaaactcacctccagccgtggctgaaaggggccaacatagagctcaggcaatggcttcagagggtgcaagccccaagtcttggcagcttccacgtagtgttgaacctgtgggtgaacagaagtcaagaatgggtttgggaacctcctcctggatttcagaagatgtatag

SEQ ID NO: 126476 - DNA, 684 bp, Homo sapiens
atggaagccatcacaaacggcatgatgaacctgaatcgccagcggcatcagcaccttgtcgccttgcgtataatatttgcccatgctcgggatttcctgcagggctggccttctcagcaaatgaagatcctccagcggaaggcactactcctgaccaaggttcttgatcctgctgggagggattttgccgatttcggaaccaccatcaaacaggattttcgcctgctggggcaaaccagcgtggaccgcttgctgcaactctctcagggccaggcggtgaagggcaatcagctgttgcccgtctcactggtgaaaagaaaaaccaccctggcgcccaatacgcaaaccgcctctccccgcgcgttggccgattcattaatgcagctggcacgacaggtttcccgactggaaagcgggcagcataggcttggttatgccggtactgccgggctcttgcgggatatcgtccattccgacagcatcgccagtcactatggcgtgctgctagcgctatatgcgttgatgcaatttctatgcgcacccgttctcggagcactgtccgaccgctttggccgccgcccagtcctgctcgcttcgctacttggagccactatcgactacgcgatcatggcgaccacacccgtcctgtggatctacccactagtcaattcaccatcttgttga

SEQ ID NO: 126477 - DNA, 1434 bp, Homo sapiens
atggtagaagatgaaaagttgaagacgcagttatctggaaaagacaactgtcgatccctggatgccacatacaataaagggggcaggcaactccaggtggtgatgtgggtgccacttctctgtgagcctgcagctggcccaggcacaccacaagcagcttccatggctggcactggggaacacagtggtgcttggaagcttggagacctcaggaatctcagggccccatgtggtgagcaaggggaatgtttcagccctgtttgtgttacagcagctcttttagccttgccattcagcagatcccaagttcttgtcctgcaaccaggaagaatgaggtgcacagacaagggggtgatgggaccatctagttgcaggaaaacaagggactcttctcagggctatcagagttctgtccataaacccctggttggggatgctgaaattcccacacggaggtcccacctggtgtggaggagtatatcggtgtcctgcttaaatatgcagtctggtcacgaagtgatccagccactgtgctgtgctgtggggaactgctcttggtccagactgccccatctcactggcactgacggcagggcaaaactggccaaccggagccgcaatgatgtcaaaaatagtgagtctgcaaaaggactttatgtttgggacagctggccgctgcaaaacgctgacgtaacagtagctgaatacaacggctatcccgttgtgtttgctcttgcgggaagtccgaaagacgctgatgacacatcaatctacatgttttatcggaaggtcggcgccaactcaatcgacagctgcaaaaacgcggtccgtgtctttagcgacagcgataagttcgacgccatcgatccgatcctgaaagatcacacgcaagaatggtccggttctgcaacctttacatctgacgcaaaaatccgtttattctacgctgactatttcggtaaacattacggcaaacaaagcctgacaacagcgcagacaaaggccataaataccttgtattcgaagaccaacacgggatcagaaaacggataccaaggcgaagaatctttatttaacaaagcgtactacggcggcggcacgaacttcttccgtaaagaaagccagaagcttcagcagagcgctaaaaaacgcgatgctgagttagcgaacggcgccctcgtctttataagggattttgccgatttcggaaccaccatcaaacaggattttcgcctgctggggcaaaccagcgtggaccgcttgctgcaactctctcagggccaggcggtgaagggcaatcagctgttgcccgtctcactggtgaaaagaaaaaccaccctggcgcccaatacgcaaaccgcctctccccgcgcgttggccgattcattaatgcagctggcacgacaggtttcccgactggaaagcgggcagtga

SEQ ID NO: 126478 - DNA, 1224 bp, Homo sapiens
atgaatatggcagaatgtggacaattagaacagtatcaatcagagactaaagaaagagcaagacagtacccaagatcccctaatcctagcctaatccacaactgctctgccaccctagaggaaatactcctgcagaaaggatttgcagaatgtcttcttcctggtttggaagacatatggtttgtagatgacagtagctgcatgggaagaggccatagaagggcaggatatgtggttatcttcctacaagaagccattaaggccaagagcttctccttaggggcttcagcccaaaaggctgagataatagccttaatagctcttaatagttgcagattatgtatgatctcaggagagtgtgtggttcaggtgtatgggttcaagttgagaaggcgtggacttgtgatggttaataatgagtgtccacttgatgggattgaaagatacagagtattgatcctggaaatcaccaatccgtatgccatgcgtttatacgaatccctgtgtcagtatcgtaagccggatggctcaggcatcgtctctctgaaaatcgactggatcatagagcgttaccagctgcctcaaagttaccagcgtatgcctgacttccgccgccgcttcctgcagggattttgccgatttcggaaccaccatcaaacaggattttcgcctgctggggcaaaccagcgtggaccgcttgctgcaactctctcagggccaggcggtgaagggcaatcagctgttgcccgtctcactggtgaaaagaaaaaccaccctggcgcccaatacgcaaaccgcctctccccgcgcgttggccgattcattaatgcagctggcacgacaggtttcccgactggaaagcgggcagtgagcgcaacgcaattaatctccaaattgaccctttttacttccttactgaaaataagtatcagtcctctaaacatttttcctttaccagcaggcactgaagctttaacagatagggcactggcggcacgaacaggggctggagctgccctgcggcccccctctctctcgcacgttaccccaccctcgcaaccccccccacccagaggggggggcggccacctagagatagacaagcaggcccgcaacagcagaataggggggccagaggctgtcccaacgccacaaggccgctccacatgccacgaaagtgggagcccaagcaggggaagtgccgagagcaagcgagggctctga

SEQ ID NO: 126479 - DNA, 980 bp, Homo sapiens
  misc_feature (1)...(980): n = a,t,c or g
atgtgtcaaatatctaatgccacactcaaaatcaccggagtggaagatcacaaaacgatttttgacggagacggaaaaacatatcagaacgttcagcagtttatcgatgaaggcaattatacatccggcgacaaccatacgntgagagaccctcactacgttgaagacaaaggccataaataccttgtattcgaagccaacacgggaacagaaaacggataccaaggcgaagaatctttatttaacaaagcgtactacggcggcggcacgaacttcttccgtaaagaaagccagaagcttcagcagagcgctaaaaaacgcgatgctgagttagcgaacggcgccctcggtatcatagagttaaataatgattacacattgaaaaaagtaatgaagccgctgatcacttcaaacacggtaactgatgaaatcgagcgcgcgaatgttttcaaaatgaacggcaaatggtacttgttcactgattcacgcggttcaaaaatgacgatcgatggtattaactcaaacgatatttacatgcttggttatgtatcaaactctttaaccggcccttacaagccgctgaacaaaacagggcttgtgctgcaaatgggtcttgatccaaacgatgtgacattcacttactctcacttcgcagtgccgcaagccaaaggcaacaatgtggttatcacaagctacatgacaaacagaggcttcttcgaggataaaaaggcaacattgggggattttgccgatttcggaaccaccatcaaacaggattttcgcctgctggggcaaaccagcgtggaccgcttgctgcaactctctcagggccaggcggtgaagggcaatcagctgttgcccgtctcactggtgaaaagaaaaaccaccctggcgcccaatacgcaaaccgcctctccccgcgcgttggccgattcattaatgcagctggcacgacaggtttcccgactggaaagcgggca

SEQ ID NO: 126480 - DNA, 702 bp, Homo sapiens
gggctacgtgttcttgctcgaggaaggcaacgacccccagggaacagcctcaatgtatcacggatgggtaccagatcatcatattcatgcagaagacactctcctgcctttctatcatggggaaaaggacgatgtcacttatgcaataaagcccacttgctggccggggctggacattattccttcctgtctggctctgcaccgtattgaaactgagttaatgggcaaatttgatgaaggtaaactgcccaccgatccacacctgatgctccgactggccattgaaactgttgctcatgactatgatgtcatagttatcgacagcgcgcctaacctgggtatcggcacgattaatgtcgtatgtgctgctgatgtgctgattgttcccacgcctgctgagttgtatgactacacctccgcactgcagttttcgatatgcttcgtgatctgctcaagaacgagggattttgccgatttcggaaccaccatcaaacaggattttcgcctgctggggcaaaccagcgtggaccgcttgctgcaactctctcagggccaggcggtgaagggcaatcagctgttgcccgtctcactggtgaaaagaaaaaccaccctggcgcccaatacgcaaaccgcctctccccgcgcgttggccgattcattaatgcagctggcacgacaggtttcccgactggaaagcgggca

SEQ ID NO: 126481 - DNA, 1236 bp, Homo sapiens
atgctgcagatccctaaacagcagcaaaacgaaaaataccaagtgcctcaattcgatcaatcaacgattaaaaatattgagtctgcaaaaggacttgatgtgtgggacagctggccgctgcaaaacgctgacggaacagtagctgaatacaacggctatcacgttgtgtttgctcttgcgggaagcccgaaagacgctgatgacacatcaatctacatgttttatcaaaaggtcggcgacaactcaatcgacagctggaaaaacgcgggccgtgtctttaaagacagcgataagttcgacgccaacgatccgatcctgaaagatcagacgcaagaatggtccggttctgcaacctttacatctgacggaaaaatccgtttattctacactgactattccggtaaacattacggcaaacaaagcctgacaacagcgcagatccactttccactcatttccatcctgtcttacgccacttggggcttgtcccttctagaatgcatccctggctcccctgtgtgcacacttctagttaggtttagcaatgtgggcacccgatggagcctggaagtgagaggaagggattttgccgatttcggaaccaccatcaaacaggattttcgcctgctggggcaaaccagcgtggaccgcttgctgcaactctctcagggccaggcggtgaagggcaatcagctgttgcccgtctcactggtgaaaagaaaaaccaccctggcgcccaatacgcaaaccgcctctccccgcgcgttggccgattcattaatgcagctggcacgacaggtttcccgactggaaagcgggcattgtcttgaacagcctgactcctgccagccctacggaagttccttttatgcattggaggaaaaacatgttggcttttctcttgacgtgggagggaaaaccttcctcaacatcacgccagctgaggttggtgtcctggttggcaaagactggtcaagctttgtcatgaatgggctgacactggggggccagaaatatactgtggtcctggactcactgctgcaggatggggaattgaccacggatctttgtatgaagagcatcggtggagcccccaccttcaacgtcattgtcaccatgactgccaagacgctaggcctgctgatgggcaaagaaggtatttgttttcagtccatcttcacctcccaccacagtgaatttactgtccgtgaaagggactgggtagctctcccctga

SEQ ID NO: 126482 - DNA, 586 bp, Homo sapiens
caaaaataatctgagcatttgttctctgctgcaaaggcattattttctgaagagctggaagaccattttcttttttctacatcctcttacctgtagtactttcccttttataactattcagaaaagataactccctaacaaagaaactttgacaatggcttatttcacccttagatgtgtcttctaacaaatgacacatgacagcaagggacagattcaggaagccttggtacagtacacgctgctgggaatgactattttctatgcattgtactcacagcatgggggcagtgaggaattggtgaaggtcccacctaataaaacaaatccagaagagtatagcacctaccccaaactggaaatactaagtaaatcaaatttcatctttaagtcttatgattataagggatttggccatttcgcaaccaccatcttccaggattttcgcatgctggggcaaaccagcgtggtcagcttggtgcaactctctcaggagcagacggtgaagggcaatcagctgttgcccgtgtcactggtgaaaagaaaaaccaccctggcgcccaatacgcaaaccgcctctatctga

SEQ ID NO: 126483 - DNA, 1197 bp, Homo sapiens
acaaaggccataaataccttgtattcgaagaccaacacgggatcagaaaacggataccaaggcgaagaatctttatttaacaaagcgtactacggcggcggcacgaacttcttccgtaaagaaagccagaagcttcagcagagcgctaaaaaacgcgatgctgagttagcgaacggcgccctcgtctttataagggattttgccgatttcggaaccaccatcaaacaggattttcgcctgctggggcaaaccagcgtggaccgcttgctgcaactctctcagggccaggcggtgaagggcaatcagctgttgcccgtctcactggtggaaggagccctgtggacagctgtgaggtctccccagcccctgagaggtggggttggctacggggaagtggtgctgcctgtcccgtgcttgggcacacgtgggctgcagccagatcatttagagaaggaaggtggaggctgcttggaggagggcacatgggcaggcaggggctggagagccccaggagggagctggggcagtgcccaggtaagaggcctgagcagatatgctgtggctgtgacctggacccataacaggaacccaaaatgcagggattttgccgatttcggaaccaccatcaaacaggattttcgcctgctggggcaaaccagcgtggaccgcttgctgcaactctctcagggccaggcggtgaagggcaatcagctgttgcccgtctcactggtgaaaagaaaaaccaccctggcgcccaatacgcaaaccgcctctccccgcgcgttggccgattcattaatgcagctggcacgacaggtttcccgactggaaacgcgggcagtgagcgcaacgcaattaattcaggcaccgtgtatgaaatctaacaatgcgctcatcgtcatcctcggcaccgtcaccctggatgctgtaggcataggcttggttatgccggtactgccgggcctcttgcgggatatcgtccattccgacagcatcgccagtcactatggcgtgctgctagcgctatatgcgttgatgcaatttctatgcgcacccgttctcggagcactgtccgaccgctttggccgccgcccagtcctgctcgcttcgctacttggagccactatcgactacgcgatcatggcgaccacacccgtcctgtggatctacccactagtcaattcaccatcttgttga

SEQ ID NO: 126484 - DNA, 1855 bp, Homo sapiens
atggctgggtactcctctgagacaaaacttccacaggaacggtcaggcagcaacatttacagttcaccaatatccgctgttctgcagcctctgctgctgatacccaggcaaacagggtctggagtggacctccagcaaactccagcagacctgcagctgagggtcctgactgttagaaggaaaactaacaaacagaaaggacatcccacaccaaaaccccatctgtacatcaccatcatcaaagaccaaagggattttgccgatttcggaaccaccatcaaacaggattttcgcctgctggggcaaaccagcgtggaccgcttgctgcaactctctcagggccaggcggtgaagggcaatcagctgttgcccgtctcactggtgaaaagaaaaaccaccctggcgcccaatacgcaaaccgcctctccccgcgcgttggccgattcattaatgcagctggcacgacaggtttcccgactggaaagcgggcaaataaaccatactcccaacagttttcacattggggcaggggggtcttggtgcttatcagagtctccatgtgtggtgcttaattataaataccccctagtatgtggttatactgatggaaatgccgaagtttccaagtttggaaatttcttcttagatttgtctaggacaagatgcctggctgaaggcaattatacatccggcgacaaccatacgctgagagaccctcactacgttgaagacaaaggccataaataccttgtattcgaagccaacacgggaacagaaaacggataccaaggcgaagaatctttatttaacaaagcgtactacggcggcggcacgaacttcttccgtaaagaaagccagaagcttcagcagagcgctaaaaaacgcgatgctgagttagcgaacggcgccctcggtatcatagagttaaataatgattacacattgaaaaaagtaatgaagccgctgatcacttcaaacacggtaactgatgaaatcgagcgcgcgaatgttttcaaaatgaacggcaaatggtacttgttcactgattcacgcggttcaaaaatgacgatcgatggtattaactcaaacgatatttacatgcttggttatgtatcaaactctttaaccggcccttacaagccgctgaacaaaacagggcttgtgctgcaaatgggtcttgatccaaacgatgtgacattcacttactctcacttcgcagtgccgcaagccaaaggcaacaatgtggttatcacaagctacatgacaaacagaggcttcttcgaggataaaaaggcaacatttgcgccaagcttcttaatgaacatcaaaggcaataaaacatccgttgtcaaaaacagcatccggagggagggattttgccgatttcggaaccaccatcaaacaggattttcgcctgctggggcaaaccagcgtggaccgcttgctgcaactctctcagggccaggcggtgaagggcaatcagctgttgcccgtctcactggtgaaaagaaaaaccaccctggcgcccaatacgcaaaccgcctctccccgcgcgttggccgattcattaatgcagctggcacgacaggtttcccgactggaaagcgggcaggattttgccgatttcggaaccaccatcaaacaggattttcgcctgctggggcaaaccagcgtggaccgcttgctgcaactctctcagggccaggcggtgaagggcaatcagctgttgcccgtctcactggtgaaaagaaaaaccaccctggcgcccaatacgcaaaccgcctctccccgcgcgttggccgattcattaatgcagctggcacgacaggtttcccgactggaaagcgggcagtga

SEQ ID NO: 126485 - DNA, 2239 bp, Homo sapiens
atgggcaaggacttcatgtctaaaacaccaaaagcaatggcaacaaaagccaaaattgacaaatggaatctaatcaaactaaagagcttctgcaaagcaaaagaaactaccatcagggtgaacaggcgacctgcaaaatgggagaaaattttcgcaacctactcatctgacaaagggctaatatccagaatctacaatgaactcaaacaaattcacaagaaaaaaacaaacaaccccatcaaaaagtgggtgaaggatatgaacagacacttctcaaaagaagacatttatgcagccaaaaaacatatgaaaaaatgctcatcatcactgggggggtcctctagagtcgaccacaggggtaaggtggccccacaacaacgccccaccacaggaggggaacttggccttagtggtccagaaggtaaagattgttaccggaaggaacgtccctttggtaaaaaaccaacaagtttattattcccaggcccacaccaatgttttaccgaatggaaagcccacagacccaatctcagcagcggggaggggcaagtacccctcaaccccttctccttcacccttagcagcaagtcccgcttttctaggggggcaagaaccctctatcccttatctccacaccccgacctcttatctctgtgccccaatcccttatttccacacgggggtcctttagagtcgaccacagggatttcaagtcctgaggttcccagagacatccccaatttgtcggttttgaaggaggttccagaacccaagtgggcctcacagaaggccaaagcacccccagttagtgattcagaaaattatagaagtaagaccatgttgcttttaaataatagtctcaaattcaaagaaccagaggggttggggggaaaagcccatccccatccagagagaaccagcatgtccaaaggccccagggaagaaaaaatattttccggaatttcaagtaacaaggaggaagaggagtataagcaaggagaaagcagacacaggaaaagagaagagcctggcaagggattttgccgatttcggaaccaccatcaaacaggattttcgcctgctggggcaaaccagcgtggaccgcttgctgcaactctctcagggccaggcggtgaagggcaatcagctgttgcccgtctcactggtgaaaagaaaaaccaccctggcgcccaatacgcaaaccgcctctccccgcgcgttggccgattcattaatgcagctggcacgacaggtttcccgactggaaagcgggcatcaaacgacttcactgaggcggcatatagtctctcccggggatcaaaaacgtatgctgtatctgttcgttgaccagatcagaaaatctgatggcaccctacaggaacatgacggtatctgcgagatccatgttgctaaatatgctgaaatattcggattgacctctgcggaagccagtaaggatatacggcaggcattgaagagtttcgcggggaaggaagtggttttttatcgccctgaagaggatgccggcgatgaaaaaggctatgaatcttttccttggtttatcaaacgttgggcggcgttgcttggtcgggtttcaacccccctgggttacaggaagaacctctctatccagggcctccgctggtggctacagtggctgggcatcaacttcgccctcttcctggggctatttttcctgaccacaccctccatcatcctgtccaccatggacaagtttaatgtcaccccccccatccatgcgctgaatcagcctgtccttcatccgtgtgtagtaagagatggcgtcttcctgccacaagacacatcccattgggatgacgtggccccatgctggtatctggggcaccccgatgccaatgcctctgctcccagccggggggaaggcttccagatcgtggagcacattgttgaggaaaagccacttggggagaagggggaggtgcagagtgtggttaatggtgggaaggaactccgggattttgccgatttcggaaccaccatcaaacaggattttcgcctgctggggcaaaccagcgtggaccgcttgctgcaactctctcagggccaggcggtgaagggcaatcagctgttgcccgtctcactggtgaaaagaaaaaccaccctggcgcccaatacgcaaaccgcctctccccgcgcgttggccgattcattaatgcagctggcacgacaggtttcccgactggaaagcgggcagtga

SEQ ID NO: 126486 - DNA, 4247 bp, Homo sapiens
gcggggcttcctttggaggaagaagaagcggaaatgtcatgctctggacccacctggtaaagagaggttgaccgtggcagtgagtactcggggcacctggggccagctgacccttgtgcttcagacacaggtgttgggctcggtgggaagggattttgccgatttcggaaccaccatcaaacaggattttcgcctgctggggcaaaccagcgtggaccgcttgctgcaactctctcagggccaggcggtgaagggcaatcagctgttgcccgtctcactggtgaaaagaaaaaccaccctggcgcccaatacgcaaaccgcctctccccgcgcgttggccgattcattaatgcagctggcacgacaggtttcccgactggaaagcgggcaactctttggtgggaagcctaccaagcaagtgcccatcgccacagctgaaaacatgaaaaattcggtggtcatctccaatcctcatgccaccatgactcagcaaggtaacctagactccccgtcaggcagtggcgtcctgagcagtgggagcagcagtcctctctacagcaagaatgtggacctcaaccagtctccgctagcctccagccccagctcagcccactcggccccttccaacagcctcacctggggcaccaacgccagcagctcctccgcagttagcaaggatggcctgggctttcagtctgtcagcagcctccacaccagctgtgagtccatcgacatctccctcagcagtggaggggtccccagccacaattcttccactggcctcatcgcctcctccaaggacgactccttgactccctttgtcagaactaacagtgtgaagaccacactgtcagaaaggcaaaccatcggcgggactctgtacgccgggcaccacgcggtggacggtgtccacagtgagtggaaacacactgtgtctgagtcgttcccgcggtgtacatcgtgcggcacacgcacacatggttgggcgaccaacacatccagactggctccgcttgtatataagcgcgtggacttataccgcacagagcgcggcaagatgtttgttcccactactccactgagaccactttctcttttccctgagaacatcaatggcttcctccttgccaaagccaatggtcaactctctgtccttaccctacttgagttttcagcagcagctgccccgatggtggattcgttaattgcgcgcgtaggagtaatggctcgcggtaatgccattactttgcctgtatgtggtcgggatgtgaagtttactcttgaagtgctccggggtgatagtgttgagaagacctctcgggtatggtcaggtaatgaacgtgaccaggagctgcttactgaggacgcactggatgatctcatcccttcttttctactgactggtcaacagacaccggcgttcggtcgaagagtatctggtgtcatagaaattgccgatgggagtcgccgtcgtaaagctgctgcacttaccgaaagtgattatcgtgttctggttggcgagctggatgatgagcagatggctgcattatccagattgggtaacgattatcgcccaacaagtgcttatgaacgtggtcagcgttatgcaagccgattgcagaatgaatttgctggaaatatttctgcgctggctgatgcggaaaatatttcacgtaagattattacccgctgtatcaacaccgccaaattgcctaaatcagttgttgctcttttttctcaccccggtgaactatctgcccggtcaggtgatgcacttcaaaaagcctttacagataaagaggaattacttaagcagcaggcatctaaccttcatgagcagaaaaaagctggggtgatatttgaagctggggattttctagagtcgcaccgcagggattttgccgatttcggaaccaccatcaaacaggattttcgcctgctggggcaaaccagcgtggaccgcttgctgcaactctctcagggccaggcggtgaagggcaatcagctgttgcccgtctcactggtgaaaagaaaaaccaccctggcgcccaatacgcaaaccgcctctccccgcgcgttggccgattcattaatgcagctggcacgacaggtttcccgactggaaagcgggcaattcctctccgaagttacaccatcaagctgtccctctgaagtcaagccgctgctttctgatgtccagctgtggtctccaacattcagctgcttctcctctctgccaggcgggatttggggtctttataggcacagggtggggcagggattttcgcctgctggggcaaaccagtcgtggaccgcttgctgcaactctctcagggccaggcggtgaagggcaatcagctgttgcccgtctcactggtgaaaagaaaaaccaccctggcgcccaatacgcaaaccgcctctccccgcgcgttggccgattcattaatgcagctggcacgacaggtttcccgactggaaagcgggcacaatggttgctttgacggtgccctaagtcaaggacttaaaattggcataggcttggttatgccggtactgccgggccttcttgcgggatatcgtccattccgacagcatcgccagtcactatggcgtgctgctagcgctatatgcgttgatgcaatttctatgcgcacccgttctcggagcactgtccgaccgctttggccgccgcccagtcctgctcgcttcgctacttggagccacgcctggccctgagagagttgcagcaagcggtccacgctggtttgccccagcaggcgaaaatcctgtttgatggtggttccgaaatcggcaaaatcctgcccgctttccagtcgggaaacctgtcgtgccagctgcattaatgaatcggccaacgcgcggggagaggcggtttgcgtattgggcgccagggtggtttttcttttcaccagtgagacgggcaacagctgattgcccttcaccgcctggccctgagagagttgcagcaagcggtccacgctggtttgccccagcaggcgaaaatcctgtttgatggtggttccgaaatcggcaaaatccctggctttccatttgccttggggacagtgaggaggtggagcccaagaatgggagggcccttgctgccttgccgggggggaaaagctgtgtccactgggaagaggcagacctacagaaaggtcggccgtgtctaccttttcaaagaccctcatctctactgtcccatatccatccctgctgaccaaagcaaaactaggtttttcttgcttttcctgggctgagcctcttattgttcctagacacagccagccgggaggaaaaggtgctcccagattggggttgtggagctgtttatcaggttgggtcagatgaaaaacagagactggatgtaacattaattgcgttgcgctcactgcccgctttccagtcgggaaacctgtcgtgccagctgcattaatgaatcggccaacgcgcggggagaggcggtttgcgtattgggcgccagggtggtttttcttttcaccagtgagacgggcaacagctgattgcccttcaccgcctggccctgagagagttgcagcaagcggtccacgctggtttgccccagcaggcgaaaatcctgtttgatgggggttccgaaatcggcaaaatccctgcgctgttgtcaggctttgtttgccgtagtgtttaccgggatagtcagtgtagaataaacggatttttccgtcagatgtaaaggttgcagaaccggaccattcttgcgtctgatctttcaggatcggatcgttggcgtcgaacttatcgctgtctttaaagacacggcccgcgtttttccagctgtcgattgagttgtcgccgaccttttgataaaacatgtagattgatgtgtcatcagcgtctttcgggcttcccgcaagagcaaacacaacgtgatagccgttgtattcagctactgttccgtcagcgttttgcagcggccagctgtcccacacatcaagtccttttgcagactcaatatttttaatcgttgattgatcgaattgaggcacttggtatttttcgttttgctgctgtttagggatctgcagcatatcatggcgtgtaatatgagagacgccgtacgtttctttgtatgctttttggttattttctttcgcgaaggcttgagtcgctcctcctgccagaagtgcagtcgtaaaagtcagaactgtggcttgttttacaatttttttgatgttcatgttcat

SEQ ID NO: 126487 - DNA, 880 bp, Homo sapiens
atgtctctgaccagacacccatccaacagtattattttctcccatgaagacggtacgcgactgggcgtggagcatctggtcgcattgggtcacccagcaaatcggcgctgttagcgggcccattaagttctgtctcggcgcgtctgcgtctggctggcttggcataaatatctcactcgcaatcaaattcagccgatagcgggaacggggaaggcgactggagtgccatgtccggttttcaacaaacccctgcaaatgctgaatgagggcatcgttccccactggcgattgctggttgcccaacgatccagaatggcgctgggccgcaatgcgccgccattacccgagtccgggctgcgcgttggtgccggatatcctccgggtagtgggataccgacgataccgaagacagcttcatgttatatccccgccgttaaccaccatcaaacaggattttcgcctgctggggcaaacccagcgtggaccgcttgcttgcaactctctcagggccaggcggtgaagggcaatcagcttgttgcccgtctcacttggtgaaaagaaaaaccacccttggcgcccaatacgcaaaccgcctctccccgcgcgttggccgattcattaatgcagctggcacgacaggtttcccgactggaaagcgggcagtgagcgcaacgcaattaatgtgagttagctcactcattaggcaccccaggctttacactttatgcttccggctcagtatgttgtgtggaattgtgagcggataacaatttcacacaggaaacagctatgaccatgattacgccaagctcttaatacgactcactatagggaaagcgtggtacgcctgcaggtaccggtccggaattcccgggtcgac

SEQ ID NO: 126488 - DNA, 4267 bp, Homo sapiens
tcactgcccgctttccagtcgggaaacctgtcgtgccagctgcattaatgaatcggccaacgcgcggggagaggcggtttgcgtattgggcgccagggtggtttttcttttcaccagtgagacgggcaacagctgattgcccttcaccgcctggccctgagagagttgcagcaagcggtccacgctggtttgccccagcaggcgaaaatcctgtttgatggtggttccgaaatcggcaaaatcctgcccgctttccagtcgggaaacctgtcgtgccagctgcattaatgaatcggccaacgcgcggggagaggcggtttgcgtattgggcgccagggtggtttttcttttcaccagtgagacgggcaacagctgattgcccttcaccgcctggccctgagagaattgcagcaagcggtccacgctggtttgccccagcaggcgaaaatcctgtttgatggtggttcccaaatcggccaaattcattaattgcgttgcgctcactgcccgctttccagtcgggaaacctgtcgtgccagctgcattaatgaatcggccaacgcgcggggagaggcggtttgcgtattgggcgccagggtggtttttcttttcaccagtgagacgggcaacagctgattgcccttcaccgcctggccctgagagaattgcagcaagcggtccacgctgggttgccccaacaggcgaaaatccttgttggatggtggttccgaaatcggcaaaatcctgcccgctttccagtcgggaaacctgtcgtgccagctgcattaatgaatcggccaacgcgcggggagaggcggtttgcgtattgggcgccagggtggtttttcttttctgcaggtccggtcggtagtacctgattgcccttcaccgcctggccctgcgcacatggccagcaagcggtccacgctggtttgccccagcaggcgaaaatcctgtttgatggtggttccgaaatcggcaaaatcctgcccgctttccagtcgggaaacctgtcgtgccagctgcattaatgaatcggccaacgcgcggggagaggcggtttgcgtattgggcgccagggtggtttttcttttcaccagtgagacgggcaacagctgattgcccttcaccgcctggccctgagagagttgcagcaagcggtccacgctggtttgccccagcaggcgaaaatcctgtttgatggtggttccgaaatcggcaaaatccctgtccaggttaagcaccattttatcgcccttatacaatactgtcgctccaggagcaaactgatggggtgagcttaaactagttcttgatgcagatgacgttttaagcacagaagttaaaagagtgataacttcttcagcttcaaatatcaccccagcttttttctgctcatgaaggttagatgcctgctgcttaagtaattcctctttatctgtaaaggctttttgaagtgcatcacctgaccgggcagatagttcaccggggtgagaaaaaagagcaacaactgatttaggcaatttggcggtgttgatacagcgggtaataatcttacgtgaaatattttccgcatcagccagcgcagaaatatttccagcaaattcattctgcaatcggcttgcataacgctgaccacgttcataagcacttgttgggcgataatcgttacccaatctggataatgcagccatctgctcatcatccagctcgccaaccagaacacgataatcactttcggtaagtgcagcagctttacgacggcgactcccatcggcaatttctatgacaccagatactcttcgaccgaacgccggtgtctttccagtgggtgattcatcatctggttccttcaggggaagagagggagtgactagagaggattgatgtccagcctggggcctgctttgctcaacagggacctcatgaaggcaggcttcttcctcctgacatttccagcactcctcacgggcactctggagagggatctctgaatcatcgctgtgttgcccgctttccagtcgggaaacctgtcgtgccagctgcattaatgaaatcggccaacgcgcggggagaggcggtttgcgtattgggcgccagggtggtttttcttttcaccagtgagacgggcaacagctgattgcccttcaccgcctggccctgagagagttgcagcaagcggtccacgctggtttgccccagcaggcgaaaatcctgtttgatggtggttccgaaatcggcaaaatcccagcatgtaaatatcgtttgagttaataccatcgatcgtcatttttgaaccgcgtgaatcagtgaacaagtaccatttgccgttcattttgaaaacattcgcgcgctcgatttcatcagttaccgtgtttgaagtgatcagcggcttgatgtgacttttttcaatgtgtaatcattatttaactctatgataccgagggcgccgctcgctaactcatcatcgcgttttttagcgctctgctgaagcttctggctttctttacggaagaagttcgtgccgccgccgtagtacgctttgttaaataaagattcttcgccttggtatccgttttctgttcccgtgttggcttcgaatacaaggtatttatggcctttgtcttcaacgtattgagggtctctcatcgtatgggtgtcgccggatgtataattgccttcatcgataaactgctgaacgttctgatatgtttttccgtctccggcaaaaatcggtttgtgatcttccactccgccgattttgagtgtgtcatcagattttgacacatttacccccaactgctcctgcaacctcagctctttgctggcttttctcacactctgtgcctcacccacactgaacttcttgataatccttgaagccatacctcctgtcatgttctcccacagtagctggaatacttttcctactgtttcccactgtcttgacttttcctgagactgtatctccggaagggcattgttattataaatccagcttttaacatgaattcccagcatataacaaatttgcccgctttccagtcgggaaacctgtcgtgccagctgcattaatgaatcggccaacgcgcggggagaggcggtttgcgtattgggcgccagggtggtttttcttttcaccagtgagaacggcaacagctgattgcccttcaccgcctggccctgagagagttggagcaagcggtccacgctgggtttgccccagcaggcgaaaatcctgtttgatggtggtttccgaaatcggcaaaatcctgcccgctttccagtcgggaaacctgtcgtgccagctgcattaatgaatcggccaacgcgcggggagaggcggtttgcgtattgggcgccagggtggtttttcttttcaccagtgagacgggcaacagctgattgcccttcaccgcctggccctgagagagttgcagcaagcggtccacgctggtttgccccagcaggcgaaaatcctgtttgatggtggttccgaaatcggcaaaatcccagtgcataaacgctggtcatgaaatgacgaaggctatcgccattgcacagtttaatgatgacagcccggaagcgaggaaaataacccggcgcctcttgaacataaccaagcatgtaaatatcgtttgagttaataccatcgatcgtcatttttgaaccgcgtgaatcagtgaacaagtaccatttgccgttcattttgaaaacattcgcgcgctcgatttcatcagttaccgtgtttgaagtgatcagcggcttcattacttttttcaatgtgtaatcattatttaactctatgataccgagggcgccgttcgctaactcagcatcgcgttttttagcgctctgctgaagcttctggctttctttacggaagaagttcgtgccgccgccgtagtacgctttgttaaataaagattcttcgccttggtatccgttttctgttcccgtgttggcttcgaatacaaggtatttatggcctttgtcttcaacgtagtgagggtctctcagcgtatggttgtcgccggatgtataattgccttcatcgataaactgctgaacgttctgatatgtttttccgtctccgtcaaaaatcgttttgtgatcttccactccgttgattttgagtgtgtcatcagattttgacacatttacctgcgctgttgtcaggctttgtttgccgtaatgtttaccggaatagtcagtgtagaataaacggatttttccgtcagatgtaaaggttgcagaaccggaccat

SEQ ID NO: 126489 - DNA, 963 bp, Homo sapiens
cctttcttatagagtggttaataggatttaattatacattgtgtgggacagtgtattaaaaatatagaaagtgaaatgaaatatgaaataagtaagacccagattctgttcacaacaagatcctgtgtagtgttagtaacaagttctgtgttgaatatcctgtggggtagggagaggggtttcttttggaggagaggtggcatgggatagaggatggaaggcaccaggtagttttgatggtttctttctggccgttttagaaggtctcagctcagggagcgacaagaccctggtcatgtttctattgtgggtgaatatcagggtcaagctacttgctgtggacagtgcaggcagctctggggcaatatagccttgaggccttggatgagtgcactggggagtcccatgcctcattatcacgttgtggtggtggtgactgctacgagacgttcttgcacactatcgaaagctgctttgcgtcgcagttggagcagcaccccccaccgcaggtggcattgaagggagcgtgaagctgcacgaggggtctcaggtcctgctcacgagctccaatgagatgggtactgttaggtatgtgggccccactgactttgcttcaggtatctggcttggacttgagctccgaagcgccaagggaaaaaatgatgggtcagtgggtgacaagcgctatttcacctgtaagccgaaccatggagtcttagttcgaccgagcagagtgacctatcggggaattaatgggtcaaaacttgtggatgagaattgttaagcttctaaaatattaaataagctcaaatatatatatttggtgtaaataaagagtccatggtacatggtgtagtatagttacccatattaaggttttgcgaagattgttttattcttaataacctggagcacaatgcacagagagttcgtcccagagccgtgaatatgtattatggtctc

SEQ ID NO: 126490 - DNA, 696 bp, Homo sapiens
atgtcgctagtgatccctgaaaagttccagcatattttgcgagtactcaacaccaacatcgatgggcagcggaaaatagcctttgccatcactgccattaagggtgtgggccgaagatatgctcatgtggtgttgaggaaagcagacactgacctcaccaagagggcgggagaactcactgatgatgaggtggaacgtgtgatcaccgttatgcagaatccacgccagtacaagatcccagactggttcttgaacagacagaaggatgtaaaggatggaaaatatagccaggtcctagccaatggtctggacaacaagctccgtgaagacctggagcgactgaagaagattcgggcccatagagggctgcgtcacttctggggccttcgtgtccgaggccagcacaccaagaccactggccgccgtggccgcaccgtggggcctccgctggggccaggaggtgacgaacagtggccggctctccccaggcaaggaggcgatgtaggcccggagcccagagggccgcatcgggcgtgcccgaggcaggtctgggcccaacacctggccggccacgccaaggacgtcacgaccccgcccaacaaccatcgagtttttggggccagccggcgtggtggcagcctagagcggtcccgaggaatgaaaagaggccgccttcggaagcggaagtggatgtga

SEQ ID NO: 126491 - DNA, 675 bp, Homo sapiens
agtattatcttttcatttcattttccagttgagtatattattggctacatttgcataccgcacaattgttcattttttaaaaaccaatattttgttttgttctgttgtctacaataaggagaattcagatgataaacttacaaccaatcatggccaagtccacttgaggaattgtctctgtagatttatctgtagactctctaataaggagttttatggccgtatgtttcgtgtttcccctgatgtgccctgttactgttcctcttgccatggtgtttcttcctgtggcaaacatttcctttaccatttttcttggcagcttgcactttcatccactgcttaacagtatggttgtgcgggctgaacacagattccttcctgcgcttgaacatgaaggatgacagcagcccaagtcacaatccccatcagctctctggatgcgacacatattcactctttcccaggagccttctggaaatatgatgtgaaacctccgtgcaacagctggaggcaatgggaagtatggctgggcgacgtccagccgcccttcccgcctctgcgcgtacgcaacctgcttggcgccactgacctggtgaggaggcttctttaaggccgtggacggttcctacccgcgcgcggagaggaccgacgtgaagacgaaatggtcgatccgga

SEQ ID NO: 126492 - DNA, 1026 bp, Homo sapiens
gtgactgatgagaatgggtggggccagggtatagactggcctgagcagtgggaattttctgtggtgggcagtggagatacatggggagcctttaagcagggcaagttagatctgaaaagcaaatcagccatctgtgcccagaaacagataggcggggggctgggcactgccgtccttgggcttgccctcctggacctctcgctgtccttggaggaggggaagtgcagggctgctcttggaggcatcggtacctgtgcagcaatgacccaagctgctggaccgtctgtccagacgctggccaggagaagggcatccccggccagctcgtgtgcgatcctgcatggccctaggcccaagacgcctcggagttctgtgccaggaaccgagctgaggaactcagctgaggaaaccacgggaatctcatttgaagaggaatttggcccctggagccccctccccactcactggtgggagggtgccaagacttcagtcgccgccgccacaccagcaaaccccaaaccacaggaatgcaatggggtcacctggggacagagggagatggatggacagcgagtaggcagaggagctcacagtctagtggagaaggcagacctgcagtttaacgatggctatttcatgatgtccttgctctgccgaggaggagacccgcagcagaactgcacagagaggaagaaagagcagttactcttccggaaggttggagaagattttgtgaaggtggggatgtttgatttgaaccttgaagaacaagcagagacccaagaagtacagaagaggggaggtggaaatagcatgaacgaggtggggcatgacttctttcttatgtgttctgatgaagcagctgccatgttggaggctgccccatggaacggccaacgtgctgaggaacagagggcacaggcagtgaagggcatcggggccttgaatccagtggtccacgaggaactgaatcctgccagcaaccactcgagtaagcttggtattgggtccccaattgagccttga

SEQ ID NO: 126493 - DNA, 1710 bp, Homo sapiens
atgaggaggaaggacgcaggcacaggagacccaatccttaaaacgtggtacggcatccctaaggaatttgaactttatcctgaaaacaatggggacccatcaaagatttttatttttcaagtaggtgaattaaaggatgagatttgtgttttggaaggagttctgtggcagcaaagaggcagcaaagcccgtgtcagaacagaggagacactcaggcttggcttcatgcacgtgtggctgcgcactcacctggatgccaggaaaatgctcctgggccagtggctaccagcaccaaagcagggctggaaacgtgtgcacctaccccacgacctcatagctttgccgcctcatcccacatcaggacctgggagtggaggaggacaagaaggaggtgaggacagtgatgccgggcagcaggccaggtgttcaaaggcacaatctggttctgatgttctctttcagcaaacacagtgcctggagcttgggaggaaagttcccaacagcgtctccccctccactgctttctttaataacaaagacttgtccctgccaagcaataactttctcgccttgtctcctacagggaaaccaatgaaaagcgtgctggtggtggctctccttgtcattttccaggtatgcctgtgtcaagatgaggtcacggacgattacatcggagacaacaccacagtggactacactttgttcgagtctttgtgctccaagaaggacgtgcggaactttaaagcctggttcctccctatcatgtactccatcatttgtttcgtgggcctactgggcaatgggctggtcgtgttgacctatatctatttcaagaggctcaagaccatgaccgatacctacctgctcaacctggcggtggcagacatcctcttcctcctgacccttcccttctgggcctacagcgcggccaagtcctgggtcttcggtgtccacttttgcaagctcatctttgccatctacaagatgagcttcttcagtggcatgctcctacttctttgcatcagcattgaccgctacgtggccatcgtccaggctgtctcagctcaccgccaccgtgcccgcgtccttctcatcagcaagctgtcctgtgtgggcatctggatactagccacagtgctctccatcccagagctcctgtacagtgacctccagaggagcagcagtgagcaagcgatgcgatgctctctcatcacagagcatgtggaggcctttatcaccatccaggtggcccagatggtgatcggctttctggtccccctgctggccatgagcttctgttaccttgtcatcatccgcaccctgctccaggcacgcaactttgagcgcaacaaggccatcaaggtgatcatcgctgtggtcgtggtcttcatagtcttccagctgccctacaatggggtggtcctggcccagacggtggccaacttcaacatcaccagtagcacctgtgagctcagtaagcaactcaacatcgcctacgacgtcacctacagcctggcctgcgtccgctgctgcgtcaaccctttcttgtacgccttcatcggcgtcaagttccgcaacgatctcttcaagctcttcaaggacctgggctgcctcagccaggagcagctccggcagtggtcttcctgtcggcacatccggcgctcctccatgagtgtggaggccgagaccaccaccaccttctccccatag

SEQ ID NO: 126494 - DNA, 900 bp, Homo sapiens
atggtgtttgctgcatctatgaacctgtcacgctgccacaccctgtacctgagctcagtgagcgtggagaccctgactggagccctggccgtgcagaaagccatctcccccccctttgagagggacatcctccccacgcccaccgtggtccacttcaaagtcacagagcagggcatcactctgactgatgtccagagggagagctcccaggatctgaaagagtccaagagtgggaacggagtaatttctggaagattaaccaaaggaaaggggacggcaagccagcctgtgtcgcagcggctggtgacctggattcctgcccctcttctggaccgagtggctgtgccagacctgggagtggaggaggacaagaaggagcaaacacagtgcctggagcttgggaggaaagttcccaacagcgtctccccctccactgctttctttaataacaaagacttgtccctgccaagcaataactttctcgccttgtctcctacagggaaaccaatgaaaagcgtgctggtggtggctctccttgtcattttccagacgcctaggaattctgtgccaggaaccaagctgagaaactccgctgaggaaaccacgggaatctcatttgaagaggaatttggcccctggagccccctccccactcactggtgggagggtgccaagacttcagtcgccgccgccacaccagcaaaccccaaaccacaggaatgcaatggggtcacctggggacagagggagatggatggacagcgagtaggcagcccccatgactcccaggagccctgcagatgggctgaacctacgctggaccacaccgtggctgatgcagagggaactccccagctgcaggagaaggccagcttcacatccagccagacttcttcctga

SEQ ID NO: 126495 - DNA, 420 bp, Homo sapiens
gccaaccaattaatccaagcatggagtcgccatagttaacaaggccttttcccactggaacacctgcaccactgcctccaaaaaatgtaccagctaccccaccccgaacaggatcccccttaacaattggaccaggtgcatcatcccctgctcgaccagccactcctttggttccttgcagaagtaccactccacctccacctcctccccggcctccatcccggccaaagctacctccaggaaaacctggagttggagatgtgtccagaccttttagccctcccattcattcttccagccctcctccaatagcacccttagcgcgggctgaaagcacttcttcaatatcgtcaaccaattccttgagcgcagccaccactcccacagttgtgtcagaagacgatgttttttatgacaaaa

SEQ ID NO: 126496 - DNA, 645 bp, Homo sapiens
ttatactgtgataacagcgctttggccccctgtgtttccagccattttaatgctagtttgtttttcaggtgcatcatcccctgctcgaccagccactcctttggttccttgcagaagtaccactccacctccacctcctccccggcctccatcccggccaaagctacctccaggaaaaccgaggtttgcttccttttccagcagggcactagcatgaacgtgtttagcatgttgcactgcttctgtcttctgttcatcaaaagctgattctagtggtgggccaaagagaggagcaagggccgtagtgtcatctggaggctttttgtttgaatgattgaattcactcttttcataatctgtgatgtcacttaacagctgggttggaatcatccgtagattagcagtctctgcagataccatctttgaatggcattagctatgtagtttagcagagaaccaccaactggtcacctggggcagggtatttgcatcaaataataattgactaattggattggcacaggcctagggatatttcagagagtgttgtcttcagttccatttcctctcttaagggactgaccaggtaaatggggatcatttcaaacctaacaaagacccttctttttgttgctttaaattcat

SEQ ID NO: 126497 - DNA, 906 bp, Homo sapiens
atgactatgagaaatgagtttgtgaagggtatcctggcatccttggagagctctgtgattgctcttccctgtgggccagactttacagtggcacctgcagtcactgaattgggaaacttaaatgcaatgggagtaattgggtcccagggtggcaggaaccaagtgaagatactcaactaccaaaggcaagaacttgaggcccttctgtccttttccatccctgctgcctatgatctaagtttagtagtaaggataatcaagagagcacttatctctagatttgtggctcttggcttttttcctagctctagccttcgatggcccaaggtggctagaaaagttattacaccacagacagtagaatatccagcattcttatccccagacctgaatgttactgttgggactccagctgtgcaatcctccaaccagccatctgtagtgcgacttgaaaaacttcagcaacaaccccgggaaagccctccagcacccagcctccggctccgacgtccgcgcgtgacctccgggtaccggaggaccttgggacgaggaggtccctccgctttccggggaagttgtcaagggcaagttcgggttctgcgcggacagcttactcactggagtggttcggcatcctctgtcgtccgcccgcgcttcctcaggaagcccctaatgcagcggcagcctgaaagcagcagccgaagctgctgccgctgctcccactgccagcaaccgcccgggcgtggcagggacaggcgggcgacttcacaacatcatcactcggcgacctcggttctgcggcgacaccgggtcaatggcagcccccacacaattggggaagccaaaggagagccactctcccagcggcctccacggccccagcgcaagacctgctgggaattgtag

SEQ ID NO: 126498 - DNA, 1626 bp, Homo sapiens
atgcaggattccccgctaggccctgttctgacaggctggggaggaagggtggggctcccaagagttgacagagctgcagtcccagatctccgacacatctgtgggtgctgtccatggaacaacagtccgctcccctggaccctggacgggaatcatcggttgaggtccaagccgcagtatgaaggaggatggccaaatggccgcccgggctggaggctgaagcccggttaccagaacaaggtggagatccatgttctccaatcccacatctcagacacctctgtggttgtcaagctggacaacagccaggacctgaacatggactgcatcattgccgagatcaaggcacagtatgacgacattgtcacctgcagctgggccaaggctgagtcttggtaccatggctgcctgccagattgtgaggagatgaaggccacggtgatctggcacggggagaccctgcgccgcaccaaggaggagatcaacgagctgaaccgcatgatccagaggctgacagccgaggtggagaacgccaagtgccaggaacagctgggacttaaagaactggataactgtcctgacaaggcggccaaagtcagtgtgggctttcagaaggtagcctgcatgtgtgctccagggccgaaaggaggagctccaggccaggactctgagtgggcaggtgactccgagagggacagacagacaaactccaagctggaggccgcggtggcccagtctgagcagcagggtgaggcggccctcagtgatgcccgctgcaagctggccgagctggagggtgccctgcagaaggccaagcaggacatggcctgcctgatcagggagtaccaggagatgaggaaactgaggcccagccaggactccagcacaggccaggacaggcatgacgccaatgaagctgggacttttggtctggccctccagtcacccacctacagggcaggccctttcactctgtcctcctggctgcagtgcctgaaactggaggagaacatcaagacagctgaggagcagggtgagctggccttccaggatgccaagaccaagctggcccagctggaggccgccctgcagcaggccaagcaggacatggcgcggcagctgcgcaagtaccaggagctgatgaacgtcaagctggccctggacatcgagatcgccacctacaggaagctggtggagggcgaggagggcaggtggagattgggattcacgggaatggaggaattcagggtgggggctcagctgcttggcacgggcatgaaaaaggtcttcctcacttgtccggtagtgcgccaagaatgcagttggcacttactaaatgctggctacatgaacagaggcctaagtggccgggggctgcagctgcagagggatgagagagttggagatgggactggaggatgcaagaaaaagcagaggcgggtaacaagtgctgggagcggcactgagctgcccctcactgagacctccatgtacctccagctggaggagcaggccgcccgctcggccgagtatgggagcagcctccagagcagccgcagcgagatcgcggatctcaatgtgcgcatccagaagctgcggtcccagatcctctctgtcaagagccat

SEQ ID NO: 126499 - DNA, 987 bp, Homo sapiens
  misc_feature (1)...(987): n = a,t,c or g
ttttttggtttcggtggtggagccggcattggctttggtctgggtggtggagccggccttgctggtggctttgggggccctggcttccctgtgtgcccccctggaggcatccaagaggtcaccgtcaaccagagcctgctggccccgctgcggctggacgccgacccctccctccaggcgggtgcgccaggaggagagtcgagcagatcaagaccctcaaacaacaaatttgcctcctttcatcgaacaaggtgcggtttctggagcagcagaacaagctgctggaagacccaagtggaacgctgcctgccaggagccagaagtcggcccaagaagcagccgccctccccagacatctttgaaggcccagattgctggnccttcggggtcagctttgaggcactgccaggtggatggggggccgcctggatgcggagactggcggagcatgccaggatgttggttggaggactttcaagaataagtaccgaagattgaaatttaaccgccgcacagctgcctgaagaatgagtttgtggtgctgaaagaaaggatgtggatgctgacctacatgaagcaaggtggaagctggaggccaaggtggatgcccctgaatgatgagaacaactttcctcaggaccctcaatgagacggagttgaccagagctgcagtcccagatctccgacatcatctgtggtgcctgtccatggacaacaagtccgctcccatggaccatggacggcatcatcgcatgaggtcaaggcgcagtactgaggagattggccaaatgcaagccgggctgaggctgaagcctgggtaccagaccaagttttgagacccctccagggcccaggctggggaagatgggggacgacctccggaatacccggaaattgagattttcagagattgaaccgggccatccagaggctgcaggctgagattcgacaacatcaaggaaccagcgtgccaagttggaggccgcc

SEQ ID NO: 126500 - DNA, 1657 bp, Homo sapiens
atgggtacagtccccaggtctgcaggacaggaaacgtgggtcctgtgtgaacacataatcgggggagagcgctcattcactgagtactcgctatgccatcggattgaatcctccactagctcgataaagctggagttagggggtaacaacgtggagcctctggagagctcaagggtttttgattcaacagtccaaaatgaggaggcagatgcagttagcactggagaggagggagttacccatgagggaacccagggaggaaaagttattcctcaaatgcacatgggctccgggctgcagcccaagagcttcagccaaaacaggagccaagttaataacgacatgatagtcactgacaacaacggtgcagtcaagtttccacaactgtgtaaattttgtgatgtgagattttccacctgtgacaaccagaaatcctgcatgagcaactgcagcatcacctccatctgtgagaagccacaggaagtctgtgtggctgtatgctggatgagtgaggagatttgtaccaacgtcatgtattctcctcttccctgcaaattcctccacctgagtcctattgaggtgctccccattataaggagtcctgtgaatcaaagtggtagatgtaaaatcagacatataggttcaaacaatcgattgcaaaggagcacttgtcaaaacactggctgggaatctgctcatgtgatgaagaccccagggtttagagaatataacaccagcaatcctgacttgttgctagtcatatttcaagtgacaggcatcagcctcctgccaccactgggagttgccatatctgtcatcatcatcttctactgctaccgcgttaaccggcagcagaagctgagttcaacctgggaaaccggcaagacgcggaagctcatggagttcagcgagcactgtgccatcatcctggaagatgaccgctctgacatcagctccacgtgtgccaacaacatcaaccacaacacagagctgctgcccattgagctggacaccctggtggggaaaggtcgctttgctgaggtctataaggccaagctgaagcagaacacttcagagcagttttgagacagtgggcagttcaagattcttttccctattgagggagtatgcctcttggaagacagagaaggacatcttctcagacatcaatctgaagcatgagaacatactccagttcctgacggctgaggagcggaagacggagttggggaaacaatactggctgatcaccgccttccacgccaagggcaacctacaggagtacctgacgcggcatgtcatcagctgggaggacctgcgcaagctgggcagctccctcgcccgggggattgctcacctccacagtgatcacactccatgtgggaggcccaagatgcccatcgtgcacagggacctcaagagctccaatatcctcgtgaagaacgacctaacctgctgcctgtgtgactttgggctttccctgcgtctggaccctactctgtctgtggatgacctggctaacagtgggcagtgctatgaagtatgctccagtggacgttttcttgtaacgatatttaaggggaacaggttaagagaaaggacagagaaaaacactcgcataactcctcgagactgggtttatgagtggttatggtga

SEQ ID NO: 126501 - DNA, 5760 bp, Homo sapiens
ataccctgtggtgctagtgtaaaatcaaatataatctacctctttagcttttctgttatgtaattggaatgaaaaaatagtgcttttttttttttttcatttttgagattgagttaccatggagggaaagaacatgtgttttaccagtggaacgcattctttgtgttatctcttcgatttttaacattttatgtttccagtttataaactttgcctccagtttgatgaagaaaatttagctattagaaagtatttaaaatctcaaaagtatgacattttaaaatgttagcaggtttaaagataacttagtttttcaactcttaacccaaaattatacttgtatactataatttgtgttgaattacttggtattatttatcatcctagtaagatctattttatataatttgattcactttttatattgaattatgttaattgtttttgtaatacacctttcatatttcttcaaagaaaactagtgttgggttattgctaattttgcttcgtggtttggttatttacatataaaaattatattgttttaaaaattgcaaagtgatcatttattgacacatcagcaagaattaatgttgaaatgcaagttttttcccctatccttaactaagtgtgtagatatctttgttttgtttctttaatagatagcaaacaataaagatgcattgaggaagacatggaaccctaagtttacattgagaagtcactttgatggcatccgagcccttgctttccatcccattgagcctgttttgataacagcatcagaggatcacacattaaaaatgtggaatttacagaaaacagccccagccaaaaagtgagaatattctactttaacattatttgaatattttaagtaacattttcagcagaaaactacatattttatgatttctgttaaatttcccaaacatttcttctagttctttcttccatgtcatgtaatttattgtgtttttccatttatacaacctaatgctaggttagaaaactgatgcttaggaagatatggtattatcttttggtttcaccagggtttgtgaatactgattacagtctttatacataacagtatttttaaatggctgctatatttggggagccccttgtctatactgaaggtttggactgttcttgtaaacaggtatatgcatctttaaaataatcaaatgtccacctccaccttgccccattgtttactagatttagacttatgagatggagcagagaaaagcctcactgggatgggtggagggtcttggtcttgtcttttggccttgagactttaggtactttccatacccaccaatatgtctagactcagaggctaacatgactgctagtgctcaccttggccctttagttcctgtctaagcatggatagacatgagttagtataaaccctttaaaagtcacaaagctaaatctggttctacttgcttgggtccttatcggagctccactcctttgggtcacatgtcaaaaaaaaaaaaaaaaaggcgccgtccgctgcgctgggggctcggtctatgacgagcagcggggtctgccatgggtcgggggctgctcaggggcctgtggccgctgcacatcgtcctgtggacgcgtatcgccagcacgatcccaccgcacgttcagaagtcggttaataacgacatgatagtcactgacaacaacggtgcagtcaagtttccacaactgtgtaaattttgtgatgtgagattttccacctgtgacaaccagaaatcctgcatgagcaactgcagcatcacctccatctgtgagaagccacaggaagtctgtgtggctgtatggagaaagaatgacgagaacataacactagagacagtttgccatgaccccaagctcccctaccatgactttattctggaagatgctgcttctccaaagtgcattatgaaggaaaaaaaaaagcctggtgagactttcttcatgtgttcctgtagctctgatgagtgcaatgacaacatcatcttctcagaagaatataacaccagcaatcctgacttgttgctagtcatatttcaagtgacaggcatcagcctcctgccaccactgggagttgccatatctgtcatcatcatcttctactgctaccgcgttaaccggcagcagaagctgagttcaacctgggaaaccggcaagacgcggaagctcatggagttcagcgagcactgtgccatcatcctggaagatgaccgctctgacatcagctccacgtgtgccaacaacatcaaccacaacacagagctgctgcccattgagctggacaccctggtggggaaaggtcgctttgctgaggtctataaggccaagctgaagcagaacacttcagagcagtttgagacagtggcagtcaagatctttccctatgaggagtatgcctcttggaagacagagaaggacatcttctcagacatcaatctgaagcatgagaacatactccagttcctgacggctgaggagcggaagacggagttggggaaacaatactggctgatcaccgccttccacgccaagggcaacctacaggagtacctgacgcggcatgtcatcagctgggaggacctgcgcaagctgggcagctccctcgcccgggggattgctcacctccacagtgatcacactccatgtgggaggcccaagatgcccatcgtgcacagggacctcaacagctccaatatcctcgtgaagaacgacctaacctgctgcctgtgtgactttgggctttccctgcgtctggaccctactctgtctgtggatgacctggctaacagtgggcaggtgggaactgcaagatacatggctccagaagtcctagaatccaggatgaatttggagaatgctgagtcctttcaagcacaccgatgtctactccatggctttggtgctatgggaaatgacatctcgctgtaatgcactgggagaagtaaaagattatgagcctccatttggttccaaggtgcgggagcacccctgtgtcgaaagcatgaaggacaacgtgttgagagatcgagggcgaccagaaattcccagcttctggctcaaccaccagggcatccagatggtgtgtgagacgttgactgagtgctgcgaccacgacccatatgcccgtctcacagcccagtgtgtggcagaacgcttcagtgagctggagcatctggacaggctctcggggaggagctgctcggaggagaagattcctgaagacggctccctaaacactaccaaatagctcttctggggcaggctgggccatgtccaaagaggctgcccctctcaccaaagaacagaggcagcaggaagctgcccctgaactgatgcttcctggaaaaccaagggggtcactcccctccctgtaagctgtggggataagcagaaacaacagcagcagggagtgggtgacatagagcattctatgccttttacattgtcataggataagctgtgttagcacttcctcaggaaatgagattgattttacaatagccaataacatttgcactttattaatgcctgtatataaatatgaatagctatgttttatatatatatatatatatctatatatgtctatagctctatatatatagccataccttgaaaagagacaaggaaaaacatcaaatattcccaggaaattggttttattggagaactccagaaccaagcagagaaggaagggacccatgacagcattagcatttgacaatcacacatgcagtggttctctgactgtaaaacagtgaactttgcatgaggaaagaggctccatgtctcacagccagctatgaccacattgcacttgcttttgcaaaataatcattccctgcctagcacttctcttctggccatggaactaagtacagtggcactgtttgaggaccagtgttcccggggttcctgtgtgcccttatttctcctggacttttcatttaagctccaagccccaaatctggggggctagtttagaaactctccctcaacctagtttagaaactctaccccatctttaataccttgaatgttttgaaccccactttttaccttcatgggttgcagaaaaatcagaacagatgtccccatccatgcgattgccccaccatctactaatgaaaaattgttctttttttcatctttcccctgcacttatgttactattctctgctcccagccttcatccttttctaaaaaggagcaaattctcactctaggctttatcgtgtttactttttcattacacttgacttgattttctagttttctatacaaacaccaatgggttccatctttctgggctcctgattgctcaagcacagtttggcctgatgaagaggatttcaactacacaatactatcattgtcaggactatgacctcaggcactctaaacatatgttttgtttggtcagcacagcgtttcaaaaagtgaagccactttataaatatttggagattttgcaggaaaatctggatccccaggtaaggatagcagatggttttcagttatctccagtccacgttcacaaaatgtgaaggtgtggagacacttacaaagctgcctcacttctcactgtaaacattagctctttccactgcctacctggaccccagtctaggaattaaatctgcacctaaccaaggtcccttgtaagaaatgtccattcaagcagtcattctctgggtatataatatgattttgactaccttatctggtgttaagatttgaagttggccttttattggactaaaggggaactcctttaagggtctcagttagcccaagtttcttttgcttatatgttaatagttttaccctctgcattggagagaggagtgctttactccaagaagctttcctcatggttaccgttctctccatcatgccagccttctcaacctttgcagaaattactagagaggatttgaatgtgggacacaaaggtcccatttgcagttagaaaatttgtgtccacaaggacaagaacaaagtatgagctttaaaactccataggaaacttgttaatcaacaaagaagtgttaatgctgcaagtaatctcttttttaaaactttttgaagctacttattttcagccaaataggaatattagagagggactggtagtgagaatatcagctctgtttggatggtggaaggtctcattttattgagatttttaagatacatgcaaaggtttggaaatagaacctctaggcaccctcctcagtgtgggtgggctgagagttaaagacagtgtggctgcagtagcatagaggcgcctagaaattccacttgcaccgtagggcatgctgataccatcccaatagctgttgcccattgacctctagtggtgagtttctagaatactggtccattcatgagatattcaagattcaagagtattctcacttctgggttatcagcataaactggaatgtagtgtcagaggatactgtggcttgttttgtttatgtttttttttcttattcaagaaaaaagaccaaggaataacattctgtagttcctaaaaatactgacttttttcactactatacataaagggaaagttttattcttttatggaacacttcagctgtactcatgtattaaaataggaatgtgaatgctatatactctttttatatcaaaagtctcaagcacttatttttattctatgcattgtttgtcttttacataaataaaatgtttattagattg

SEQ ID NO: 126502 - DNA, 1355 bp, Homo sapiens
aatataacaccagcaatcctgacttgttgctagtcatatttcaagtgacaggcatcagcctcctgccaccactgggagttgccatatctgtcatcatcatcttctactgctaccgcgttaaccggcagcagaagctgagttcaacctgggaaaccggcaagacgcggaagctcatggagttcagcgagcactgtgccatcatcctggaagatgaccgctctgacatcagctccacgtgtgccaacaacatcaaccacaacacagagctgctgcccattgagctggacaccctggtggggaaaggtcgctttgctgaggtctataaggccaagctgaagcagaacacttcagagcagtttgagacagtggcagtcaagatctttccctatgaggagtatgcctcttggaagacagagaaggacatcttctcagacatcaatctgaagcatgagaacatactccagttcctgacggctgaggagcggaagacggagttggggaaacaatactggctgatcaccgccttccacgccaagggcaacctacaggagtacctgacgcggcatgtcatcagctgggaggacctgcgcaagctgggcagctccctcgcccgggggattgctcacctccacagtgatcacactccatgtgggaggcccaagatgcccatcgtgcacagggacctcaagagctccaatatcctcgtgaagaacgacctaacctgctgcctgtgtgactttgggctttccctgcgtctggaccctactctgtctgtggatgacctggctaacagtgggcaggtgggaactgcaagatacatggctccagaagtcctagaatccaggatgaatttggagaatgttgagtccttcaagcagaccgatgtctactccatggctctggtgctctgggaaatgacatctcgctgtaatgcagtgggaggatcatttttccctgaacacactgtcatagcctcccaggtgccctctgctatgtcttctctgcagttgtatgctgagtccttttcactgttagaggctgttactactattgaccatgagactgtagatagaatgggcaacaaacatctggggagaaagaatgacgagaacataacactagagacagtttgccatgaccccaagctcccctaccatgactttattctggaagatgctgcttctccaaagtgcattatgaaggaaaaaaaaaagcctggtgagactttcttcatgtgttcctgtagctctgatgagtgcaatgacaacatcatcttctcagaagaggcagaggaacacggtaacatcttgacatcagacactggtgtcatagatgccctttcctcagaggactga

SEQ ID NO: 126503 - DNA, 420 bp, Homo sapiens
  misc_feature (1)...(420): n = a,t,c or g
cccacgcgtccggctacccagagcaatatctgtgatgaagacagtgctacagagacctgctacacttatgacagaaacaagtgctacacagctgtggtcccactcgtatatggtggtgagaccaaaatggtggaaacagccttaaccccagatgcctgctatcctgactaatttaagtcattgctgactgcatagctctttttcttgagaggctctccattttgattcagaaagttagcatatttattaccaatgaatttgaaaccagggcnnnnnnnnnnnnnggggggaggaaaacccacctccttgcccnnnnnnnnnnnnnnnnnnnnccatggttttttttatagggaaaccccttttaaataatgggcccaacctcaaggaaaaaaaatttcccatttatagggctcccgggag

SEQ ID NO: 126504 - DNA, 473 bp, Homo sapiens
ctcccccgcattccctccattttggtcgtcctcatcgtccatatctagggctagcacctcctcctcctcctcctcgccatcctcctggtctccactctgtacttcattccagccattagataaggcggcccgggatcgtgcctcatgaaagtcatctacctgatcttggtagtagctggtgtcccctggtgagggtggcaatcctaaatcatctccattttcgtcggtgagcgtgggacctgccttggctcgcacagctgcccacttagctgctccgcgccgccgggatctccccaccatggctcacaatctcaggttttacagcgactccggactttcggccaccactgacttcggcgcaggaatcaggcgctccggtaactcgtggctctaaacagcagcgcgctcccctaccaccggagtttgcagactcctgatcggctactggaatttcctcttccttccggacgaaa

SEQ ID NO: 126505 - DNA, 829 bp, Homo sapiens
  misc_feature (1)...(829): n = a,t,c or g
tgctccagtttttcagaagaagtgaagtcaagatgaagaaccatttgcttttctggggagtcctggcggtttttattaaggctgttcatgtgaaagcccaagaagatgaaaggattgttcttgttgacaacaaatgtaagtgtgcccggattacttccaggatcatccgttcttccgaagatcctaatgaggacattgtggagagaaacatccgaatttattgttcctctgaacaacagggagaatatctctgatcccacctcaccatttgagaaccagatttgtgtacccatttgtctgacctctgtaaaaaaatgtgatcctacagaagtggagctgggataatcagatagttactgctaccccagagcaatatctgtggatggatgacagtgccacagagcacctgctacactttatngacaggaaacaagtgctacacagctgtggtcccacttcgtatatggtggtgagaccaaaatggtggaaacagccttaaccccagatgcctgctatcctgactaatttaagtcattgctgactgcatagctcttttttcttgagaggctctccattttgattcagaaagttagcatatttattaccaatgaattttgaaaccagggctttttttttttttttgggtgatgtaaaaccaactccctgccaccaaaataattaaaatagtcacattgttatctttattaggtaatcacttcttaattatatgttcatactctaagtatcaaaatcttccaattatcatgctcacctgaaagagggtatgctcttcttaggaatacagtttctagcattaaacaaataaaca

SEQ ID NO: 126506 - DNA, 2045 bp, Homo sapiens
  misc_feature (1)...(2045): n = a,t,c or g
atgaagacagtgctacagagacctgctacacttatgacagaaacaagtgctacacagctgtggtcccactcgtatatggtgcactttggccccggcgatggaggcgccggcttcggagtgtgccggccgccgcagcagcagggctcttggaggaccccgcggtccccgggctcacggctgcccttcctgctgttgagctacccgagcggcggcggcggcagcagcggcagcggcaagcaccgggacaccagctactaccaagatcaggtagatgactttcatgaggcacgatcccgggccgccttagctaagggctggaatgaagtacagagtggagacgaggaggatggcgaggaggaggaggaggaggtgctagccctagatatggacgatgaggacgacgaagatggagggaatgcgggggaggaggaggaggaggagaatgccgatgatgatgganaaaaactttactatgacacggactatggttccaagtcccgaggccggcagagtcaacaggaggcagaggaggaggaaagagaggaggaggaggaggcacagatcattcagcggcgcctagccccaagcgctgcaagaggatgattttggtgtcgcctgggttgaggcctttgcaaaaccagtgcctcaggtagatgaggctgagacaccgggtcgtgaaggatttggctaaagttttccagtgaaagagaagctgaaaatgttgccgaaagggaatcacccagaactcattggagctgattagaagacctttaaagtcaagttagacagacgttaaggatgtacctggagcccattttaagagtttggtggaacaagggatcattccacccggaaaaaggaagccaaatacattgaggaccaagtacaaacctcatacattgaattattgctcagaacatcaagtttttatttttgatcctgaaagctaggagagtcccaagcacattggacatcctgtcatagaaaggcttgttacctacccgaaatttgatcaacaagctgtccgttgtggatcagaagctgtcctcagaaaattcgtcatctgttgacacttaaggatgatgctgtaaagaaagaactgattccaaaagcaaaatccaccaagcccaaaccaaagtctgtttcaaagacttctgctgctgcctgtgctgttacagatctttctgatgattgtgcctcctgatgaaaaaagcaaaactgaagtactataaagaaatagaatacaggcaaaagctaaagagaaagaaagaagaaaatagcactgaagaacaggctcttgaagatcaaaatgcaaagagagctattacctatcaaattgctaaaaataggggaccttactcctaggaagaaagaagattgatcgcaatcccagagtgaaacacagagagaagttcagaagagccaaaattagaaagaagaggccaggttcgtgaagtatcgtaaagaagagcaacgttataagtggtgacttatctggcattcggtgcaggagttaaaaagagcattaagccttaaatgaagtttttgcttagccataaggtttttggcagttttggatcaataaatttttacttttaactaaagtcattgtattaatatataatactttaaattttaaaaattcttgtccacaaggaaatttgtctgggttattggacaatttataagaactatggggagcaatatgaaggtgcttgagaaaagagatgatgttgaagttttccaatattctgttgaagttttccaatattaagtatttaggcctaggggaaattttcacagttcattgtggagtgttaaacttagaacatgtgtaacttttcacataaagagaatgcatctttggacagttatcttatttgtaaggcagcctataaaatagttctgaagtattttatttacctaactataattattgggccagatacttgttaataaatgggcttaatgttaacatggatttcatatgttctgtgtggtttaaaagcataggaatgaaactttggttaaaagcagaaaaagga

SEQ ID NO: 126507 - DNA, 525 bp, Homo sapiens
  misc_feature (1)...(525): n = a,t,c or g
ggcacgagcaatggcgggcgccctcccccagcctcgctgccgccttgcagtttgatctcagactgctgtgctagtaatcaacgagattccgtgggtgtaggaccctccgagccagtgagatgaacccggtacctcagatggaaatgcagaaatcacccgtcttctgcgtcgctcacgctgggagctgtagaccggagtgtntcctatttggccaactttggctcctcctttctgccctgaattttctacagtcaaaaattcatagacgtgactttctcctccttgccttccaccgtgattgtgaggcttccccagccatgtgaaactcttgcaccatgtgtctggaaaagctgcagacactcaacgccagcccaatgaaagcagccaggagggagactgtaccctgcaaagccacaggggcagagctggccaagaccacaggaacccacctcttgcatcagcgtgacccagacatgagacatggagtaaaggagnttattttggagctttagatttgactgccna

SEQ ID NO: 126508 - DNA, 461 bp, Homo sapiens
  misc_feature (1)...(461): n = a,t,c or g
cccgttgttaaagttgtcnaatgtgnccccgtggcttggggggttgccctccccaaattaagnctgactcggggggtccaagggtcnagggaaccccaattgnaaggaagcaatctgncccgttcctcaagatctccaagctgccgtgctgggaagaaccactgctctcttcaaaagctgtcaagacagggacacttnaagtctgcaagaggttactgctgtctttttgtttgtctgtgcctgcccccagaggcaggcaggcctccttgagctgtggtgggctccacccagttcgagcttcctggctgctttgtttacctaagcaagcctgggcaatggcgggcgcccctcccccagcatggttgccgccttgcagtttgatctcagactgctgtgctagcaatcagcgagattccgtgggcgtacgaccctctgagccaggtgtgggatatagtctcgtg

SEQ ID NO: 126509 - DNA, 370 bp, Homo sapiens
tttgatctcagactcctgtgctagcaatcagcgagattccgtgggcgtaggaccctccgagccaggtgcgggatataatctcgtggtgcgcagttttttaagccggtccgaaaagcgcaatattcgggtgggagtgacccgattttccagacaaacagagagccaaatcatgagtgaactcccattcacaattgcttcaaagagaataaaatacttaggaatccaacttagaagggatgtgaaggacctcttcaaggagaactataagccactgctcaatgaaataaaagaggatacaaacaaatggaagaacattccatgctcatgggtaggaagaatcaatatcgtgaaaatggccatactgcccaag

SEQ ID NO: 126510 - DNA, 3138 bp, Homo sapiens; identical to SEQ ID NO: 121688

SEQ ID NO: 126511 - DNA, 945 bp, Homo sapiens; identical to SEQ ID NO: 125969

SEQ ID NO: 126512 - DNA, 465 bp, Homo sapiens; identical to SEQ ID NO: 125970

SEQ ID NO: 126513 - DNA, 300 bp, Homo sapiens
atggcgggcgcccctcccccagcctcgttgccgccttgcagtttgatctcagactgctgtgctagcaatcagcgagattccgtgggcgtaggaccctctgagccaggtgtgggatatagtctcgtggtgcgccgtttcttaagccggtctgaaaagcgcaatattcgggtgggagtgacccgattttccaggtaccactcagttggaaatgcagaaatcacctgcattctgcgttggtctcaatgggagctgcagaccaaagctgttcctatttggtcatcttgccagcagctcccttga

SEQ ID NO: 126514 - DNA, 1898 bp, Homo sapiens
ttagctatgccacactaagaaataagatatgaagcttagtttggctggatatgaaattctgggttgaaatttcttgtctttaagaatgttgaatattggcccccactctcttctggcttgtagggtttctgctgagagatccgctgttagtctgatgggcttccctttgagggtaacccgacctttctctctggctgcccttaacattttttccttcatttcaactttggtgaatctgaccattatgtgtcttggagttgctcttctcgagaagtatctttgtggcattctctgtgtttcctgaatctgaacgttggcctgccttgctagattggggaagttctcctggataatatcctgcagagtgttttccaacttggttccattctccccatcactttcaggtacaccaatcagacgtagatttggtcttttcacatagtcccatatttcttggaggctttgctcatttctttttattcttttttctctaaacttcccttctcgcttcatttcattcatttcatcttccatcgctgataccctctcttccagttgatcgcatcggctcctgaggcttctgcattcttcacgtagttctcgagccttggttttcagctccatcagctcctttaagcacttctctgtattggttattctagttatacattcttctaaatttttttcaaagttttcaacttctttgcctttggtttgaatgtcctcctgtagctgagagtaatttgatcgtctgaagccttcttctctcagctcgtcaaagtcattctccatccagctttgttccgttgttggtgaggaactgcgttcctttggaggaggagaggcgctctgcgttttagagtttccagtttttctgttctgttttttccccatctttgtggttttatgtacttttggtctttgatgatggtgatgtacagatgggtttttggtgtggatgtcctttctgtttgttagttttcctttgccgccttgcagtttgatctcagactgcagtgctagcaatgagcgagactccgtgggtgtaggaccctccgagccaggtgcgggatataatcttgtggtgcgccgttttttaagcccgtcggaaaagcgcagtattcgggtatgagtgacccgattttccaggtgccgtccgtcacccctttctttgactcggaaagggaactccctgaccccttgcgcttcccaagtgaggcaatgcctcgccctgtttcggctggcgcacggtgtgcgcacccactctcctgcacccactgtctggcactccctgcccaaggtaggaccatttcttgaaaattctgtccccggtttgtaaccccggtttgcggttacccaaccattctccggggtgcaaattttttcgataccgtcggggtctctgaaccctttcaatttggatactggccctggggcatcggtctggcaggttgggccccgctttttggcgttatttaggcttctggaaaatcgggtcactgccacccgaatattgcgcttttcagaccggcttaaaaagcggcgcaccacaagattatatcccacacctggctcagagggtcctacgcccacggaatctcgctgactgctagcacagcagtctgagatcaaactgcacacagaacactgccgctgaggctgaagagcagtgaacataacaatcatggaatagtttcgaggtggtgcctttataaattttcggaatttatcaccattcattcggaagattgagcgtctggaactccattccatcagctgctctactttttcagctaaaagattatgaacatccgttctgtcagcaatccactttgctagttgctcagctgcaaatccaattctttggaggtcaaaagtatcagctctcttaggtctgc

SEQ ID NO: 126515 - DNA, 268 bp, Homo sapiens
atggtgggcgcccctcccccagccttgctgccgccttgcagtttgatctcagactgctgtgctagcaatcagcgagactccctgggcgtaggaccctccgagccaggtgcgggatataatctcgtggtgcgccgttttttaagccggtcggaaaagcgcagtattcgggtgggagtgacccgattttccagcctgaaggttggaacagctatgttgcacaaacagcaaagatggcagcccacccctccctctgggagctccatcccag

SEQ ID NO: 126516 - DNA, 479 bp, Homo sapiens; identical to SEQ ID NO: 121698

SEQ ID NO: 126517 - DNA, 262 bp, Homo sapiens
atggcggatgcccctcccccagcctcgctgccaccttgcagtttgatctcagactgctgtgctagcagactggctttgttggaagaaaagctcagatatagcaatgagaaataccaaaagtttaaggcagtggaagaaagcctgcgtaaagagctggtggatatgctaggtgatgatggtgtgttcttatatccctcacatcccacagtggcacctaagcatcatgtccctctaacacggcctttcaactttgcttacacag

SEQ ID NO: 126518 - DNA, 834 bp, Homo sapiens; identical to SEQ ID NO: 121693

SEQ ID NO: 126519 - DNA, 512 bp, Homo sapiens
aatcttttagctgaaaaagtagagcagctgatggaatggagttccagacgctcaatcttccgaatgaatggtgataaattccgaaaatttataaaggcaccacctcgaaactattccatgattgttatgttcactgctcttcagcctcagcggcagtgttctgtgtgcagtttgatctcagactgctgtgctagcagtcagcgagattccgtgggcgtaggaccctctgagccaggtgtgggatataatcttgtggtgcgccgctttttaagccggtctgaaaagcgcaatattcgggtggcagtgacccgattttccagaagcctaaataacgccaaaaagcggggcccaacctgccagaccgatgccccagggccagtatccaaattgaaagggttcagagaccccgacggtatcgaaaaaatttgcaccccggagaatggttgggtaaccgcaaaccggggttacaaaccggggacagaattttcaagaaatggtcctaccttgggcag

SEQ ID NO: 126520 - DNA, 1257 bp, Homo sapiens
atgtcacacctgccgatgaaactcctgcgtaagaagatcgagaagcggaacctcaaattgcggcagcggaacctaaagtttcagggggcctcaaatctgaccctatcggaaactcaaaatggagatgtatctgaagaaacaatgggaagtagaaaggttaaaaaatcaaaacaaaagcccatgaatgtgggcttatcagaaactcaaaatggaggcatgtctcaagaagcagtgggaaatataaaagttacaaagtctccccagaaatccactgtattaaccaatggagaagcagcaatgcagtcttccaattcagaatcaaaaaagaaaaagaagaaaaagagaaaaatggtgaatgatgctgagcctgtgtctccactccagactgtaagctctgtgatagtagggcacccatctatcgtgtttactattgcatctcttgcctccgaaagtgcctggcccacagtcagctcggagttgtttgatcatttgaagtcttcttctctcaactcatcaaagtcattctccatccagctttgttctgttgctggtgaggaactgcgttcctttggaggaggagagacaagaccctcagctgcaggtctgttggagtttgctagaggtccactctacaccctgtttgcctgggtatcagcagcagtgtctgcagaacagcggtttttcgtgaaccacgaattctctggaagttttgtctcagaggagtacccggccattttgatctcagactgctgtgctagcaatcagcgagactccgtgggcgtacgaccctctgagccaggtgcgggatataatctcgtgttgcgccgctttttaagcccgtcggaaaagcgcagtatttgggtgggagtgacccgattttccagtgagatgaacctggtacctcagatggaaatgcagaaatcacccgtcttctgcgctctcacgctgggagctgtagacaggagctgttcatattcggccatcttggctcctcctcccaaacgcaaatacttaataaatgaatatattctggtacacttgatctcaacatgcccttctctcctggggagactgtgtcaatttgatcagcaggccaaagaagaggctgatagtttctatcacttggtgtgccagcagctgccaacagcagagtccccagagtaccttctctgccatgctttgaggcagcacaaaagcccttaccaaaacctgagcagacaccagtccatacttcttgtacagactgctgaaccatga

SEQ ID NO: 126521 - DNA, 708 bp, Homo sapiens; identical to SEQ ID NO: 125973

SEQ ID NO: 126522 - DNA, 3042 bp, Homo sapiens
atgggggtaggaccctctgatccaggtgtgggatatagtctcgtggtgcgccgttttttaagccggtctgaaaagcgcaatattcgcgtgggagtgacccgattttccagggattttgccgatttcggaaccaccatcaaacaggattttcgcctgctggggcaaaccagcgtggaccgcttgctgcaactctctcagggccaggcggtgaagggcaatcagctgttgcccgtctcactggtgaaaagaaaaaccaccctggcgcccaatacgcaaaccgcctctccccgcgcgttggccgattcattaatgcagctggcacgacaggtttcccgactggaaagcgggcaccggtctgaaaagcgcaatattcgcgtgggagtgacccgattttccagctgggtgaggcagcctttgagagagatggtagtgctcttggagagggtgtctacaatcaccttgggggcaacgacagatgagaacatgacatccaaaagggacaagaagggattttgccgatttcggacccaccatcaaacaggattttcgcctgctggggcaaaccagcgtggaccgcttgctgcaactctctcagggccaggcggtgaagggcaatcagctgttgcccgtctcactggtgaaaagaaaaaccaccttggcgcccaatacgcaaaccgcctctccccgcgcgttggccgattcattaatgcagctggcacgacaggtttcccgactggaaagcgggcagaagaattgcatgatgcatcctgtgaaggagatggttctgtcttccacaaccaagttctccagcagtttgggtgtaactgtggtggaataacagaaatcaacaaaggacaagtggctgaggaaaaagtacatgcgggtgtggagtttggggttgatcctgatgatcatgatcatgcccaggtttcccaatacagtgattgtgtagatgggccaggcggtgaagggcaatcagctgttgcccgtctcactggtgaaaagaaaaaccaccctggcgcccaatacgcaaaccgcctctccccgcgcgttggccgattcattaatgcagctggcacgacaggtttcccgactggaaagcgggcagtgagcgcaacgcaattaatggattttgccgatttcggaaccaccatcaaacaggattttcgcctgctggggcaaaccagcgtggaccgcttgctgcaactctctcagggccaggcggtgaagggcaatcagctgttgcccgtctcactggtgaaaagaaaaaccaccctggcgcccaatacgcaaaccgcctctccccgcgcgttggccgattcattaatgcagctggcacgacaggtttcccgactggaaagcgggcaccacttgtcctctgtagatttctgctactcctcaataattgtgccaaaaatgttggctaatatctttaacaaggacaaagccatctccttcctagggtgcatggtgcaattctacttgttttgcacttgtgtggtcactgaggtcttcctgctggccgtgatggcctatgaccgctttgtggccatctgtaaccctttgctatacacagtcaccatgtcttggaaggtgcgtgtggagctggcttcttgctgctacttctgtgggacggtgtgttctctgattcatttgtgcttagctcttaggatccccttctatagatctaatgtgattaaccactttttctgtgatctacctcctgtcttaagtcttgcttgctctgatatcactgtgaatgagacactgctgttcctggtggccactttgaatgagagtgttaccatcatgatcatcctcacctcctacctgctaattctcaccaccatcctgaagatgggctctgcagagggcaggcacaaagccttctccacctgtgcttcccacctcacagctatcacaccaaaagtagataaaaccacaaagatggggaaaaaacagaacagaaaaactggaaactctaaaaagcagagcgcctctccacctccaaaggaacgcagttcctcaccagcaacagaaaaaaggtggatggagaatgattttgacgagctgagagaagaaggcttcagacgatcaaattactctgagctacgggaggacattcaaaccaaaggcaaagaagttgaaaactttgaaaaaaatttagaagaatgtataactagaataacaaatacagagaagtgcttaaaggagctgatggagctgaaaaccaaggctcgagaactatgtgaagaatgcagaagcctcaggagccgatgcgatcaactggaagaaaggggattttgccgatttcggaaccaccatcaaacaggattttcgcctgctggggcaaaccagcgtggaccgcttgctgcaactctctcagggccaggcggtgaagggcaatcagctgttgcccgtctcactggtgaaaagaaaaaccaccctggcgcccaatacgcaaaccgcctctccccgcgcgttggccgattcattaatgcagctggcacgacaggtttcccgactggaaagcgggcagtgagcgcaacgcaattaatggattttgccgatttcggaaccaccatcaaacaggattttcgcctgctggggcaaaccagcgtggaccgcttgctgcaactctctcagggccaggcggtgaagggcaatcagctgttgcccgtctcactggtgaaaagaaaaaccaccctggcgcccaatacgcaaaccgcctctccccgcgcgttggccgattcattaatgcagctggcacgacaggtttcccgactggaaagcgggcaggattttgccgatttcggaaccaccatcaaacaggattttcgcctgctggggcaaaccagcgtggaccgcttgctgcaactctctcagggccaggcggtgaagggcaatcagctgttgcccgtctcactggtgaaaagaaaaaccaccctggcgcccaatacgcaaaccgcctctccccgcgcgttggccgattcattaatgcagctggcacgacaggtttcccgactggaaagcgggcagtga

SEQ ID NO: 126523 - DNA, 669 bp, Homo sapiens
gctgtggtgggctccccccagttcgagcttccaggctgctttgtttacctaagcaagcctgggcaatggcgggcgcccctcccccagcctcgttgccgccttgcagtttgatctcagactgctgtgctagcaatcagcgagattccgtgggcgtaggaccctctgagccagttgtgggatatagtctcgtggtgcgccgttttttaagcccgtctgaaaagcgcaatattcgggtgggaagtggccccgattttccgggggcggtccgtcaccccttttctttgaactcggaaaagggacttccctggaccccttgcgcctacccagctcccccgatggtggattcgttaattgcgcgcgtaggagtaatggctcgcggtaatgccattactttgcctgtatgtggtcgggatgtgaactttactcttgaactgctccggcgtgatagcgttgataatacccctccggtatggtcaattaatgggcgggaccaagaactagttactgaagacgccctggatgatctactcccttctcttctcctgccctgtcatcataacaccacactcaagtcaaacagtatcctctgtcctaacaaattcgccataggaacccccccgtccgaacacccctgcacctacccccacgcattcaaccggattctacctg

SEQ ID NO: 126524 - DNA, 747 bp, Homo sapiens
cggcacacgaaacggagggaggaagtaaagacgtgacacaggttcgaaagcgccaggataaaaaaagtgggtatctgtgggctgaaacaaagcatatgccatgaggtctccccttgtgttagggcgcctgccggcccaaccgaactggagcagatgccgcagtcaatatgctgggcagtctgtgactgtggtttcccagtaatgctggccacaggaaggcagctcctcacccagcgactgacgggatttccgtcagccgtctcctctcaccaaagctgatcactgtcccacttgaggaaatgtgtagagcaggatgagctgtttctctcaacaagagaaatctggttcctctggtggagatgagagcagcttcactctgttcacttgtaacaaatgcatatgatggccctcacatagaaaaagtagttatcattgggttggaggttaactttcagctggagtcctttgattccagagaaagatctgaggccctctccctcaggagagtgctgtctgcagtactccagagtgtaggtctccgtggcctctggggtggtgggccgccatcggatagtggctgtgttccaacacacagtacagtcctcagcgcggatcacaggggtggagggtgctgtcctaaagatggccctttcactgggcaggctacatccagtgaagttcacagccatcacccacacttgatagcatcggtcaggttccagatcttcaaaaatgcagaaaatatac

SEQ ID NO: 126525 - DNA, 4823 bp, Homo sapiens
  misc_feature (1)...(4823): n = a,t,c or g
cgttatttctgagggctctgttctgttccattgatctatatctctgttttggtaccagtaccatgctgttttggttactgtagccttgtagtatagtttgaagtcaggtagtgtgatgcctccagctttgttcttttggcttaggattgacttggcaatgcgggctcttttttggttccatatgaactttaaagtagttttttccaattctgtgaagaaagtcattggtagcttgatggggatggcattgaatctgtaaattaccttgggcagtatggccattttcacgatattgattcttcctacccatgagcatggantgttcttccatttttttgtatcctcttttatttccttgagcagtggtttgtagttctccttgaagaggtccttcacatcccttgtaagttggattcctaggtattttattctctttgaagcaattgtgaatgggagttcactcatgatttggctctctgtttgtctgttgttggtgtataggaatgcttgtgatttttgtacattgattttgtatcctgagantttgctgaagttgcttatcagcttaaggagattttgggctgagacgatggggttttctagatcaacaatcatgtcatctgcaaacagggacaatttgacttcctcttttcctaattgaataccctttatttccttctcctgcctgattgccctggccagaaattccaacactatgttgaataggagcggtgagagagggcatccctgtcttgtgccggttttcaaagggaatgcttccagtttttgcccattcagtatgatattggctgtggttttgtcatagatagctcttattattttgaaatacatcccatcaatacctattttattgatagtttttagcatgaagggttgttgaattttgtcaaaggctttttctgcatctattgagacaatcatgtggtttttgtctttggctctgtttatatgctggattacatttattgatttgcgtatattgaaccagccttgcatcccagggatgaagcccacttgatcatggtggataagctttttgatgtgctgctggatttggtttgccagtattttattgaggatttttgcatcaatgttcatcaaggatattggtctaaaattctcttttttggttgtgtctctgcccggctttggtatcagaatgatgctggcctcataaaatgagttagggaggattccctctttttctattgattggaatagtttcagaaagaatggtaccagttcctccttgtacctctggtagaattcggctgtgaatccatctggtcctggactctttttggttgataaactattgattattgccacaatttcagctcctgttattggtctattcagagattcaacttcttcctggtttagtcttgggagagtgtatgtgtcaaggaatgtatccatttcttctagattttctagtttatttgcgtagaggtgtttgtagtattctctgatggtagtttgtatttctgtgggatcggtggtgatatcccctttatcattttttattgtgtctatttgattcttctctctttttttctttattagtcttgctagcggtctatcaattttgttgatcctttcaaaaaaccagctcctggattcattgattttttgaagggttttttgtgtctctatttccttcagttctgctctgattttagttatttcttgccttctgctagcttttgaatgtgtttgctcttgcttttctagttcttttaattgtgatgttagggtgtcaattttggatctttcctgctttctcttgtgggcatttagtgctataaatttccctctacacactgctttgaatgcgtcctagagattctggtatgttgtgtctttgttctcgttggtttcaaagaacatctttatttctgccttcatttcgttatgtacccagtagtcattcaggagcaggttgttcagtttccatgtagttgagcggctttgagtgagattcttaatcctgagttctagtttgattgcactgtggtctgagagatagtttgttataatttctgttcttttacatttgctgaggagagcttcacttccaagtatgtggtcaattttggaatagctgtggtgtggtgctgaaaaaaatgtatattctgttgatttggggtggagagttctgtagatgtctattaggtctgcttggtgcagagctgagttcaattcctgggtatccttgttgactttctgtctcgttgatctgtctaatgttgacagtggggtgttaaagtctcccattattaatgtgtgggagtctaagtctctttgtaggtcactcaggacttgctttatgaatctgggtgctcctgtattgggtgcatacatatttaggatagttagctcctcttgttgaattgatccctttaccatcatgtaatggccttctttgtctcttttgatctttgttggtttaaagtctgttttatcagagactaggattgcaacccctgcctttttttgttttccatttgcttggtagatcttcctccatccttttattttgagcctatgtgtgtctctgcacatgagatgggtttcctgaatacagcacactgatgggtcttgactctttatccaacttgccagtctgtgtcttttaattggagaatttagtccatttacatttaaagttaatattgttatgtgtgaatttgatcctgtcattatgatgttagctggtgattttgctcgttagttgatgcagtttcttcctagtctcgatggtctttacattttggcatgattttgcagtggctggtaccggttgttcctttccatgtttagcgcttccttcaggagctcttttagggcaggcctgctggtgacaaaatcggtcagcatttgcttgtctgtaaagtattttatttctccttcacttatgaagcttagtttggctggatatgaaattctgggttgaaaattcttttctttaagaatgttcaatattggcccccactctcttctggcttgtagggtttctgccgagagatccgctgttagtctgatgggcttccctttgagggtaactcgacctttctctctggctgcccttaacattttttccttcatttcaactttggtgaatctgacaattatgtgtcttggagttgctcttctcgaggagtatctttgtggcgttctctgtatttcctgaatctgaacgttggcctgccttgctagattggggaaagtctcctggataatatcctgcagagtgttttccaacttggttccattctccgcatcactttcaggtacaccaatcagacgtagatttggtcttttcacatagtcccatatttcttggaggctttgctcgtttctttttattcttttttctctaaacttcccttcttgcttcatttcattcatttcatcttccattgctgataccctttcttccagttgatcgcattggctcctgaggcttctgcattcttcacgtagttctcgagccttggttttcagctccatcagctcctttaagcacttctctgtattggttattctagttatacattcttctaaatttttttcaaagttttcaacttctttgcctttggtttgaatgtcctcccgtagctcagagtaatttgagcgtctgaagccttcttctctcagctcgtcaaaatcattctccatccagctttggtccgttgctggtgaggaactgcgttcctttggaggaggagaggtgctctgcgttttagagtttccagtttttctgttctgttttttccccatctttgtggttttatctacttttggtctttgatgatggtgatgtacagatgcgttttcggtgtggatgtcctttctgtttgttagttttccttctaacagacaggaccctcagctgcaggtctgttggaataccctgccgtgtgaggtgtcagtgtgcccctgctggggggtgcctcccagttaggctgctcgggggtcaaggggtcaagggacccacttgaggaggcagtctgcccgttctcaagatcttccagctgcgtgctgggggaaacactgctctcttcaaagctgtcagacagggacacttaagtctgcagaggttactgctgtctttttgtttgtctgtgccctgcccccagaggtggagcctacagaggcgggcaggcctccttgagctgtggtgggctccacccagtttgagcttccccggctgctttgtttacctaagcaagcctgggcaatggcgggcgcccctcccccagcctcgctgcttgccttgcatttttgatctcagactgctgtgctagcaatcagcgagactccgtgggcgtaggaccctccgaaggccaggtgtgggatatagtctcgtggtgcgccgttttttaagccggtctgaaaagcgcaatattcggggtgggagtgacccgattttccaggtgccgtccgtcacccctttctttgactaggaaagggaactccctgaccccttgcgcttcccagagtgagggcaatgccatcggccctgctttcggcttcgcgcacggtgcgcgcacccactgggccttgcggcccactgtctggcactccctatgtgagatgaacccggtacctcagatggaaatgcagaaatcacccgtcttctgcgtcgctcacgctgggggctgtagaccggagctgtagaccagagctgttcctattcggccatcttggctcctcccaaatctccttttttcttatcttaatggggaaaattgcattttatatattaaacaataacatgtgtcttagataaaaaaaaa

SEQ ID NO: 126526 - DNA, 1467 bp, Homo sapiens
atggcgggagcccctcccccagcctcgctgccgccttgcagtttgatctcagactgctgtgctagcaatcagcgagattccgtgggcgtaggaccctctgagccaggtgtgggatatagtctcgtggtgcgccgtttcttaagccggtctgaaaagcgcaatattcgggtgggagtgacccgattttccagatctttctctggaatcaaaggactccagctgaaagttaacctccaacccaatgataactactttttctatgtgagggccatcaatgcatttgggacaagtgaacagagtgaagctgctctcatctccaccagagtagctcccgcaaaaggaagcatcaaagaaaagaagaggcaaaggcggaggatagggtggaggaaactgccctgcaatttgcctgcaagctctgggggttattttgcagaacaaaatggcaaaatgggagaagtggtgtcagaacttgggtgggaccacctgcaggacacagtgaagaggggcagccaggaagaatgtggccagtctggggcaaggagtcctgaggggagttaccaccagagtccaaaggggtctgggctgagtgtgggccagagatacacatttttctacagtggtattgtgagtgatgttcatgtgactgagcgtccagccagagtgggcatcctgctggactacaacaaccagagacttatcttcatcaacgcagagagcgagcagttgctcttcatcatcaggcacaggtttaatgagggtgtccaccctgcctttgccctggagaaacctggaaaatgtactttgcacctggggatagagcccccggattctgtgaaggcacaagtgatccttggctttcagaatttgcaagaacagcgatttgaattttgggggggtctgctgttcattcctttaggtgctatacattattcaaaaagtctcccgcgcatttgcactaatgatggctgcatgcatagcaatcagcattgtgagcaaaatcgacaagaaagccttggctttacagagccagtgtgtgagtaaaccagaatgaaaacaaccaaccctccactcttttagtttatataaggtttggagttctttcctaaattaaaagatctacacttgaggttgggaaccgaaagagaaaaatggacttccatctgttttactggtaaaggaaatcctctgatggacaggtcagagtgaaggaaggttgtgctggtaagacatctctgaccgaagagccatggatgctttccacaaaatgtcacctcgctgcacctaaaggatgatgaatcctaatcattaaaggaattgtttcagctgatttaaatttataatgaactcttttgtaataatgtatactgtagaacatgagtctctcctccctaaaattttaaatgtagaaaagtgctatatattacaaatttccattttgttaaataaatggttagagtctataaaaaa

SEQ ID NO: 126527 - DNA, 471 bp, Homo sapiens
  misc_feature (1)...(471): n = a,t,c or g
agtgggggaagnnnaattgatanccncttgcggatcgatccgcaattcccgggttcgcgatcttcgccgttaccttcttgctggcgttggtgggagccgtgctctacctctatccgtggacccttttgaaaccatgctgaagtcattattaaggtatcaatctggtggtggcagtgtgagtgaaaaccacatgaggaaaaaattgtatgaaaatggtgtgactgattctctgaagagtaactttgccctcctcctaaaggtttggtctgagattggaaaaggctttctagatgggtcacttgataaaaacatgactcggaaaaaacaatatgaagatgccctcatgcaactggagtctgttttaaggaacatcataaaagaacgaaaaggaaggaacttcagtcaacatattttcattgactccttagtacaagggaaccttaatgaccaacagatcctagaagacagttn

SEQ ID NO: 126528 - DNA, 362 bp, Homo sapiens
ggtaaaatcaagtggctccaggtacttaccagacttaagaaagaaggcctccagattgcactatgtctgttggagggcattctgtaaatattgatgggccatataaaataaaccctgtgaagaattttactttttagcagcacttatatatcttctatatcatgggagaaaaaaagcggatacaaaaatcccaccctaaataagtaggttttttcttattctatacccaagccatgagttaactattttcattgtcattcatataatgtgtgacctagggtgtacctgggcaatctgttttttaaccacctctgaagaagttcaaaaaaaattatatgaagagataaaccaagtttttggac

SEQ ID NO: 126529 - DNA, 977 bp, Homo sapiens
ttctctctaggaataataaatcggtcaatttttccttcaatatcttgaagctgggcagaaactggagtcagtttggcagttcgaacagtttcacaaagcacatgctgacaatatctgagctgctcaattttctctggagtaacaggaccatttccaaaaacttggtttatctcttcatataattttttttgaacttcttcagaggtggttaaaaaacagattgcccaggtacacaattttgcagttattatgcaactggccagagaaaatatcatactgtcttctaggatctgttggtcattaaggttcccttgtactaaggagtcaatgaaaatatgttgactgaagttccttccttttcgttcttttatgatgttccttaaaacagactccagttgcatgagggcatcttcatattgttttttccgagtcatgtttttatcaagtgacccatctagaaagccttttccaatctcagaccaaactgtgccatgattcttctggaagcgaatgacttcctgatcatcttcaaatgtactacccattaccatctgtgtaacagacttcatagcaaaaccaagcatatgctggctgaggggcacgtgctgggtctctgggtaggagagccatttatctaataattcttctgaaagctttaggaggagggcaaagttactcttcagagaatcagtcacaccattttcatacaattttttcctcatgtggttttcactcacactgccaccaccagattgataccttaataatgacttcagcatggtttcaaaagggtccacggatagaggtagagcacggctcccaccaacgccagcaagaaggtaacggcgaagatcgcgaagtccaacatggttctgccgcccagggacccacgtctcggatcggccgctccagcagcagcgcctcagcctggcccaatttaaggcatagcgtgtgggcgggggcaccccgcctcgtcc

SEQ ID NO: 126530 - DNA, 2743 bp, Homo sapiens
atgctaaaagacaataaaataattcccgttttcctaggaaaggtttgtgcaatggcatcagctaagctaaatacccttcttcagaccaaagtgattgaaaatcaggatgaagcatgttacattttagggaagctggaacatgttctaagtcaatcaatcaaggaacagactgaaatctactcatttctgattccccttgttcgtaccctggtttccaaaatttatgagcttctcttcatgaacttgcacctaccttctttaccttttaccaatggtagctcctcattttttgaagattttcaagaatattgtaattcaaatgaatggcaagtttacattgaaaaatatattgtaccttatatgaagcagtatgaagctcatacattttacgatggtcatgagaacatggcactttattggaaggattgttatgaagctttaatggtaaatatgcataaacgagaccgggaaggaggggaaagcaagctcaaatttcaggagctgtttgtggagccatttaatcgaaaagcacgccaagagaacctgaggtataataatatgcttaaacaacttagcagtcaacagttagccactcttagacgctggaaagcaatacagctctatcttacatgtgaaaggggaccttgggctaaaaggaaacagaatccaattcactggaagctagctaatgtagagaattattcccgcatgagacttaagctggtaccgaattataatttcaaaacccatgaggaagctagtgccttgagagataatctggtgtgtacctgggcaatctgttttttaaccacctctgaagaagttcaaaaaaaattatatgaagagataaaccaagtttttggaaatggtcctgttactccagagaaaattgagcagctcagatattgtcagcatgtgctttgtgaaactgttcgaactgccaaactgactccagtttctgcccagcttcaagatattgaaggaaaaattgaccgatttattattcctagagagggtatctttttgagtgattattttgatacagaaatatttaatttgtctgtttcagcggacccttttgaaaccatgctgaagtcattattaaggtatcaatctggtggtggcagtgtgagtgaaaaccacatgaggaaaaaattgtatgaaaatggtgtgactgattctctgaagagtaactttgccctcctcctaaaggttttgcaaattttgcagttccagccagatgcagcacatcaaatatcacagcaagtgggttggcaagacaccttagttaggctttttttaaaagcaaaatttgaaaacggaaatactcttcataagcacagtagagctgttttaatgaaagacaatgataaaaatatgtcaactgaagataccaagaagaactctgatgaaaaaacagatgaggaaaaaatcacctcttttgcctcagctaatgtgtcttcggatcagtggagtttggaggatagacactctttagactcaaacacaccattatttccagaagatagctctgtgggagaattgtctttcaaatcagagaatcaagaggaattctggcatagtaacccttcacatttgagtttagacctcagtggaattgactcatgtgaaatgagtgatagtggaagtcaagtgccagacagtctgcctagcacaccatccccagtagagtctactaaatcgttttctgtgcactctgacagagaaagcagcatcacaaatgatatgggctttagtgatgacttctctttacttgaaagccaagagagatgtgaggaggagcttcttcaattactgacacatattttgaattatgtaatgtgtaagggactagaaaagtctgatgatgatacttggattgaacgaggacaagtgttttcagcactaagtaaaccagggattatccagtgaactacttcgaccatcagatggaataaaactaactttgctacaaaagatgttagaatgggcaatctcagaaaacagagaagcaaaaactaatccagtaactgctgaaaacgccttccgactagtgctgatcatacaggactttcttcagtcagagggactagttaattcaaacatgtggaccgagaagcttttagaggatatgatgctgctctttgactgtctgtcagtctgctattctgaaagtccagtatgggtaaaactctctcaaattcagatccagttgcttctaggattcattggaaggggtaatttgcaggatatcataaactgcataggtgggttaaatgtactctttcctttattggaacaaatcagccactttagtgaaggacagattcctgaagaaaagaatgaaagcacagttcctgaatcagtaacacctgttgaaggagattggctcgtatggacttccacaaaggcctcagagtcaagactagagagaaacctagttgcaacatttatcttaattgtgaaacattttattcagagacatcctatcaaccagggcaatcttattcactcccatggagttgcaactcttggtgctttacttcagaaggtgccaagcaccttgatggatgttaatgtgttgatggcagttcagttactaattgaacaagtatcattagagaaaaatatgcagctcctgcaacaaatgtatcaatatttactctttgactttcgtatttggaaccgtggagattttccctttcgaatcggaatggttgtaaatataatgaactatctctag

SEQ ID NO: 126531 - DNA, 1298 bp, Homo sapiens
gaacacttgcatgtggactaccctcagaatgacgttcccgttcctgcaaggtactgcaaccacatgatcatacaaagagttatcagggaacctgaccacacttgtaaaaaggagcatgtcttcatccatgagaggcctcgaaaaatcaatggtatttgcatttctcccaagaaggttgcttgccaaaacctttcggccattttctgctttcagagtgagacaaagttcaaaatgacagtctgtcagctcattgaaggcacaagataccctgcctgcaggtaccactattcccccacagaggggtttgttcttgtcacttgtgatgacttgaggccagatagtttccttggctatgttaaataactcaagatcagctcccgagtctgagatctcttctctcaatggcattggagctggctgtgcctgaagcagacctgaaccgtggacatgtggcaactgctcttgagcggaaggggaagccactgaagagattacactacatctgagatggagacctttcctctgctgctgttcaccctgggcctggatcttgcagaagcatcagaaagcacaatgaagataattatagaagaatttacagactaagagatgccctatgacatggcataaagtggccaagaaaaacagaccattgagatattaatgaacccgatcctgttagttaaaaataccagcctcagcatgtccaaggatgatatgtcttccacattactgaccttcagaagtttacattataatgaccccacgggaaacagtttgggtaatgacaaagagtgttgcaatgacatgacagtctggagaaaagtttcctaatcaaacggatcgcgcaagtggagcaataacttcattcgcagcttcaccaaagtgatgcgcaggggccacagggcccccagctgcgagttttgacagaaaccctggcataagctgctggggggagccctacaaatggaaaaataccgtggggccctttcaataaaaggcaaacaattccccaggtgccaataccatagtgttacctcattagagaagatattgacagtgctgacaggtcattctctgatgagctggttagtttgtggctctaagttgtaaatcccacagagctttaggactagggtcttactaaagaaggacctcttcttgttcattcttgtttaaacctttccttaatatctactctttagcactatagtgaactcctgattatttattctaactggaggagtgaaaaatccaaaattgtggataattcaattaaaagttatgactgataaaaa

SEQ ID NO: 126532 - DNA, 397 bp, Homo sapiens
acaggttggttccctaggaaagactctaagacaacgtttagcatgccaggatattaaggtgtgtcgttacaatcaacatctgaagaagggaggggaatgaggcaagaatgaacagagagagaaattaaggtgacatgcaggtcccattacagacttgcataacccctggggagctcagaacccaaaatggcccttcagagttgttccaagttgggtctagatggcttggcctttaatctaccacactgttctttgagtatgggcaccaaagtggctgaggcaatctctgatgggactgacagctgaaggatgtctgctgagagcactcccaagggctgaggcagttaagtcctttattgaaggtgcaactgagtagtgcatcacagtgtaaaccaca

SEQ ID NO: 126533 - DNA, 410 bp, Homo sapiens
ctcagcctcctgctgagaatgtgtttttcgttgctcacagctatggaggacttgcttttgttgaactgatgattcaacgagaagccgatgtaaaaaataaggtaactgctgtggcattgacagactctgttcacaatgtgtggcatcaagaagctggcaaaacgattcgagaatggatgagagagaactgttgtaattgggtctctagctcagaaccattagacacatcagtggagtccatgctacctgattgcccccgggtctcagcaggcaccgaccgtcacgagctaacttcctggaagagctttccgtctattttcaaattctttaccgaagcctcagaggccaagaccagctccctgaagccggctgtggcgcgccgctcccaccgcatcaagcacgaaggcgaa

SEQ ID NO: 126534 - DNA, 810 bp, Homo sapiens
ttacaacttctggaaatcaaggacacacttagagaagtgcaaaatgcactggaaagtctcagcaatggaatcaaacaagcagaagaaagaacttcagagcttgaagacaaggctttcgaattaactcagtgtgtcaaagacagatttgaaagtaggatgttgattgtaacgacacaccttaatatcctgcatgctaaacgttgtcttagagtctttcctagggaaccaacctgtgataaaagactgccaaacccagagttgactgataagtcatctacagggcacacttgtaaccaggtgggcttggatagcacaggacagagtaccatgaaatggagaatatgcaggcagaagtgtaaagtgataggagagatgattcaacgagaagccgatgtaaaaaataaggtaactgctgtggcattgacagactctgttcacaatgtgtggcatcaagaagctggcaaaacgattcgagaatggatgagagagcttgctcactgtgatggaaaccagctgccaggttgtaagctgccctgtggagaggcccacatggcaaggaactggtatatcaggccaaaagccagggaggacctgaggtccaccaacagccatacagaacttgctactgagtgtaacttttcattccctgtgggattttgttctaacaaatttggcctaaatcagaaggaaattgtacatacattccccagcacatatccatttatcactaaagtatttattgacatttactgtgttccaggcactgttctggaagctggagacatagcagtgaacaagagctcatcatga

SEQ ID NO: 126535 - DNA, 375 bp, Homo sapiens
ttaaccatgtttataaatactttttcctaccttgcctaggtgagcttgttcaaattatcccatccaaattattcccagaagcgcacatcacatcctcaagggttaaaatgacaagaccaagaaggtatggcttccccttaattcaattaatagagagaaagaaagaggcccaaaaaaaaaggaaggaagggagaaaaagagggatggaggagggaggaagggagggaaggaggtggggaagggagggaaagaggaaggtgttgttgctccttcctggaactctcttcctgggcttacttcacccctcaggtctcaactgaaacagtacctcctccagaaaaccaattagttcttcttactgttcccatgactctt

SEQ ID NO: 126536 - DNA, 514 bp, Homo sapiens
tcacaggttctcaagcttctggaagagttccatggctagaagtgatgctatccaacttaacactccaaaacgtgaagatattctactgaacatgaagatgtggtctgaatatccccctactccccagttctttgacagcctcatccaagaagaaggagagaatctgtctacaaagtgtgaagacagtgcttgggcttttggatgccttcgacttgagtttgaatctgagcactgtgtgatattctcctgtaaaagatgtcatgtctcaactgaaacagtacctcctccagaaaaccaattagttcttcttactgttcccatgactctttgcttctcctatgataactcttaccatgctttattggaattatttgttgcctttctttctttccaggctcccctgaagaacagaggagcactgaaggattggcagtatacttggaagagatttggagacttaaggagttatgaagactgtggtctggatatcgtgctactgataatttcagagtaa

SEQ ID NO: 126537 - DNA, 455 bp, Homo sapiens
ataattcggcacgagagcaaaaccagaaatgcacttgagcaggctttctatgtccttccttgcctcacccccattgggggcctgcatgatggtgagtggccacataaacagtccctacgtctccaagaattcccttggccatggctgctggaatgactcatccttctccatctgtagcctaggctttccccttctccttaatttccatgagggagcagtcttagatcagagcctccccaaggggacaggaccacagccctccctaaaaggtcctggatctggtataaatcttaccatgggagaaaacagaattcagttacagacaacatcaagggcaaacttgaaggggagcaaaaatcacaatatgggtgtgggaactggaccacagagttacagtggtcatttcctccccaccacatcttgtgaactttaccttgcccactgccccaaggggc

SEQ ID NO: 126538 - DNA, 546 bp, Homo sapiens
atgactcttgatggaactctacagttgttgacacctggtgggccacctacagctgaagtaaaccttcagaggacaaaggggaaattttcacttggacctcacaaggacgaggttcaaccagggggagcaatgatgggtgctggaaggggaagtgatgggggtgggaggctattcccaagtaccacaggcccctctgggaaattaatgatggttggagaggaagccagctccacagtcaagctgggggcatttgaagagcccaagcagccctcattggagtttgggaatccatttggctctatggaatctgattctacctggggctccaggggtggaacatgtgacccagaccagcacatttggctccccagccatgtggttggccatggggcgctcctccccacaggacttgccaagtcctcatgcacgttgagtcaacattttggatatgagctcattacatgggaaaaagagtttaaacaccagctcaacatgcaagtgtactatgggctctttcctgtcaatgtttcagttcaaatttcctga

SEQ ID NO: 126539 - DNA, 1546 bp, Homo sapiens
cggcagccgcccgcagctgcagagagtcccgctgcgtctccgccgcgtgcgccctcctcgaccagcagacccgcgctgcgctccgccgctgacatgtgtgccgctcagatgccgcccctggcgcacatcttccgagggacgttcgtccactccacctggacctgccccatggaggtgctgcgggatcacctcctcggcgtgagcgacagcggcaaaatagtgtttttagaagaagcatctcaacaggaaaaactggccaaagaatggtgcttcaagccgtgtgaaataagagaactgagccaccatgagttcttcatgcctgggctggttgatacacacatccatgcctctcagtattcctttgctggaagtagcatagacctgccactcttggagtggctgaccaagtacacatttcctgcagaacacagattccagaacatcgactttgcagaagaagtatataccagagttgtcaggagaacactaaagaatggaacaaccacagcttgttactttgcaacaattcacactgactcatctctgctccttgccgacattacagataaatttggacagcgggcatttgtgggcaaagtttgcatggatttgaatgacacttttccagaatacaaggagaccactgaggaatcgatcaaggaaactgagagatttgtgtcagaaatgctccaaaagaactattctagagtgaagcccatagtgacaccacgtttttccctctcctgctctgagactttgatgggtgaactgggcaacattgctaaaacccgtgatttgcacattcagagccatataagtgaaaatcgtgatgaagttgaagctgtgaaaaacttataccccagttataaaaactacacatctgtgtatgataaaaacaatcttttgacaaataagacagtgatggcacacggctgctacctctctgcagaagaactgaacgtattccatgaacgaggagcatccatcgcacactgtcccaattctaatttatcgctcagcagtggatttctaaatgtgctagaagtcctgaaacatgaagtcaagatagggctgggtacagacgtggctggtggctattcatattccatgcttgatgcaatcagaagagcagtgatggtttccaatatccttttaattaataaggtaaatgagaaaagcctcaccctcaaagaagtcttcagactagctactcttggaggaagccaagccctggggctggatggtgagattggaaactttgaagtgggcaaggaatttgatgccatcctgatcaaccccaaagcatccgactctcccattgacctgttttatggggacttttttggtgatatttctgaggctgttatccagaagttcctctatctaggagatgatcgaaatattgaagaggtttatgtgggcggaaagcaggtggttccgttttccagctcagtgcattatctatacctggggccagattttctgcactttgaaatgttgcctttgcctaatgaaagaaacaattcacttaccagcctcctcaccc

SEQ ID NO: 126540 - DNA, 932 bp, Homo sapiens
tgagcaaatcaaaatcagagagcgctgtctttctacgatgtggctcccaacccactgatggcctgtcctggatgccaggcacttgtttgggttggaagcggactgctccacagctgcaggcttttttgtggttagttgtggcccacaggatactggcagctggaggcagagcagtggtgccttttgaagccatggaagacctgctgattgccagcaaaatgtcttcccagccagttgttcctggagccgctgtgcagggctctggagatggacatgagagagctaaggttcgttcagaccccatgctcctttggcatgacactagctccaagaggattattaatgaactagacactggcatttggattcaggacccaaataagctgagagagtttgctggagtcactggacacatacgacatttgaattcaggggccaaggttcccatttgcctgtggctgtttggagccaccaatgggccagatgagaaatcagattcaaactccaggatgtttggtttgcaaaggggattaaaaagaaatcatgctggaaaaatgaaggaacgagggcacagagagattcgagttgtcacccaagctcacatagcaccagtgacagagatgaagaaactgacatctggagaagttgaagtaatttgcacaaagattcacttggctaccctggggctggatggtgagattggaaactttgaagtgggcaaggaatttgatgccatcctgatcaaccccaaagcatccgactctcccattgacctgttttatggggacttttttggtgatatttctgagatcagccctgaaagacaggaacctcccatatcatcattttatagatgtggaactgaagctcagccacaattaagtgacttgcccaaagccacacagccagtaaaggacaaggccaggacttaa

SEQ ID NO: 126541 - DNA, 366 bp, Homo sapiens
atgattgtgagccctccccagccatgtggaacgtttgacatgcaaaggataactctggaagagttgaagcacattctctatcatgccttccgagaccacctaacgatgaaggacattgagaacatcattatcaatgaggaagagagcctgaatgagacctcggggaactgccaaacagagtttgaaggaggctctctgaggtctgcgtgtgattggatgtgtggttttgtgctgtttgccttctcttggttgtggctgcatggggcggtgcaaagagcctattttggctgtccggcaaacttgggtcgagtccgttgtgtgaccttgggcaaaggatggaccttctctgtgtttcctcatctataa

SEQ ID NO: 126542 - DNA, 354 bp, Homo sapiens
atgattgtgagccctccccagccatgtggaacgtttgacatgcaaaggataactctggaagagttgaagcacattctctatcatgccttccgagaccacctaacgatgaaggacattgagaacatcattatcaatgaggaagagagcctgaatgagacctcggggaactgccaaacagagtttgaaggaggaatttctttcctgctgctctcattagagcaaacagtgcattcccagaagcagaacagacagacctgcgtccggaagagcctcatatgcgcctttgctatggccttcatcatcagtgtcatgctgattgcagccaaccagatactccggagcggcatggagtag

SEQ ID NO: 126543 - DNA, 416 bp, Homo sapiens
gtgtggggagcagcccactcacagagtgctgcctcccagcttctctcccagtgtgcagcaggaccaccctccctcccccaggcaggagcagaacactcctcttgggggaaaacccggaaggagatggcccagtagaccacccacaggaggccaccgtcgctgagcctgatgggcacccagaagcccccacgcagctcgaggctctctgggccgtgtcaccagacatcaaggatcagcagacaatgcagaagagcctgacgtgggtgggcaagagacccagaccaaggagcagagacaggtgatgtggagggggcagaggccacgcaacgagaagacttccagagctgtcactaacatcctcaccgcatagacggcctggcggaaacaagaaccgcatgcgcctttaaaagacgaaa

SEQ ID NO: 126544 - DNA, 1881 bp, Homo sapiens
atgacctacaagtaccaggcaggacatatgttcctagagaggagacctaaacatgtttgcaggctggggaagcatgtgaggtacacagagctacaggtggaccacatggtgttggggccgcagagaaatgcagcatccaatggatgggacgttggtgccaggcagcctggagtggaggaaggcaggagcagaacactcctcttgggggaaaacccggaaggagatggcccagtagaccacccacaggaggccaccgtcgctgagcctgatgggcacccagaagcccccacgcagctcgaggctctctgggccgtgtcaccagacatcaaggatcagcagacaatgcagaagagcctgacgtggagatggccatccatccacatgaccatgtggctttcaaagaacctggaaaaacacacctgttccaagtggaacaagcactatctgcctgttcatgtgggcataaccaccccacctgtggggactgcttggttctccagccttccacacatccagtgcccacgatatgcccatataccatatactgttaagtgcttggggattaccttattcttgggcccctggaggcttgcaggtgtccagctgtcctttcgcagtagacacatggtggtctcaggagctaacatcggcccttctacaagccagggggacaccaaacacttgcctgtcaatcgagctccactcagctgggttcagacaagctcaggggctaccccaggctcagcagtgccgactatagccttgtgcagttactgctgcacacaccccgaggccgagaatccagcggccgccgccaagcagggctgggaaatgcctgcaggcaagaagccaggacagggtcctcagcccctctcagcaagtggggagagagtcaaacagctggtagtggccagccaggacggtccccacatcactggcagggaggagggggcacatcaagcctgtataaaaatgtggctcctgaagcccccaaacatcgacccctcggtgctggctgggctggctgggcgcctcgtgcaggcgcagctgggcagccgtggggaacagttggaagccagctaccatgtcttgagcatgctcaatggcccatggagacctctagtcaacagccacctgggtaatgctggaagcagacctccagccccagtcaagccttcagatgcctgcagccctggccagaaactcacctctagtgaggaagatgtgcagaaaacagcagcaggagacagtgcagcccctgtgggcttaggaaagcctcttccagaaatggcctatgtgccacacccagagtctcagctagtcggggctctttacatgatgggatcattgaggctttatttgtgcctttggttgttgctgcacttcctcactgacctttatgaccggacagcaggtacttgtaggaaccccagagactccccctggcttctggaccttccttctgccttggtgtatagcagcacccagcttccccttggtaatcagggtggaccaccccggatgagagggcactcaaggcagcaggaacagcacgtttcagggtatggagcagtaaaaggcatgcacctttgggtcgtgggacactgctatattgccgaagggatctcagggtacactgggacctgctccgagcagctccctcaggcgtcagagcagaactgggcagctgaaggcccctgtggagacagcggcagtccgtccacccagataagggtagcgtttgagtccagctgctgcacctgtggccctaatctcaacacatgccgccagttgcagacctggggaacaatgccagtgcagcaggagaatgtcaccaaatgcctgcttcatgacagaggaggtcctgaggagctgagttag

SEQ ID NO: 126545 - DNA, 816 bp, Homo sapiens
tcacatggggatggtggtgctgactgtgggcattcgtcctgtcttcggggcatgctggcgctgctcctctggtgccccctgccctgcctgccgcaggggcacaggcagctgtaagtagaggtggaggtgccccaagacaaaagggagccccccacagggtgccttctggttacagaaggggtccgccaggatctctgcctgcagctgtgcgacacctggactggccattttctcccccttagcttttgtgggcagagattccaggtgcaacacaggccgcagttgaccctctgcagaaaagccttcctttgagcccctcggtgtcttcagttgtgagcaggcatgtccgtagagcctctcagtacctggcccttcaccccagccagatctaggccgcaaggctgctggaccttctaggtggacaggcactagccccttcaggggtattcccaccgtgcactggagccctgggcagcccaaggagtccattccagccctgctgcctagatccttcctagaaatagcagaggcagcaatagcttttttcccattctgctgcccaatggagtatctgccattggacagacccaaagagagccagggtccaggtgacgcttccaactgctctccactgtccgcaatagcctcgagctgcgtgggggcttctgggtgcccatcaggctcagcgacggtggcctcctgtgggtggtctactgggccatctccttccgggttttcccccaagaggagtgttctgctcctgcctgcaggtgttaattccaattcaatgcaaatatccttttcaatccggtccat

SEQ ID NO: 126546 - DNA, 3561 bp, Homo sapiens
atgcctctggtgctgttgatggagtggcctgaagccaccaactttgcctgcctgatcgcggggtactgccgcctcttgctggattccaggaagatggtcttctccaggcctgccagccagccacttccacctccaatgatcaaggcagattacatgcacagcgcccaccgccctgtcactgggggccacctggggaaaaaggagagtagttatgtgggcagcgtgggcaccagccccaggaaatcgagccgctgcacgcccccacctgccgactctgagcttgtcagcttctgctacctccatatgcgggaacaaaggaaggagcaggaaagccggacagatgtcaacgagaacctaatcttctttgaggagaccaggccccgaaccaagtctgaccccacatccaaaagctctggccaaggttatgaggtagtccctgatgactttgatgcagctagcctagaccacgagccttgtgccagcagggcccggtcctacaccttggacaattcccttggggctgaagccctgaatttctactgtgactcttgcaaagccaaacttcaggagcagctgggccctcgcaaaggtgggaagcctggctcctctcgtgacaatatagtagatttgatgtccctcccaccacctgggagtgaggaggaggaggaggaggaagatgagacaacttctctgttgccagccattgctgccccaccccctggtttccgagacaacagctctgatgaggatgaccccaagcgccgggctgtccagagccaggaacaaggacgccacctgcgtgggcttctgtacgatgagattccagtgacattgattgacagtgtgcagacccggacagttcgagatcatgcccaggagctagatgatgccctggtgtccactctgcaggctctagaagccctggctgcatccgaggatggaccacacccaccacccccacagactgcaggtctgattgtgctggccacaatcactcctgaatcatcgctggactcaggtcatgaaaccaactcttcagagctcacagacatgtcagagatgatgtcggccatgaagcagcaccagaacaccacctacttcctggcccagcacctcaacaaggacagcctccttgcccgcaaggacctgcccttccggatccagagctgtgcagcccaggccgttcttacggccccttactctcttgggcgcccggatcccaacccatctctccaacccattgccacaggccagagtcctggcccccctggcgctcggaggaagctgccccagtcagagggccaggtacagggagaacgaacatactccttggcagtgcacccagcactgtccccacagcttagtgaacagaagaatctgagtctgctgtccccagttcctgaggacaaagggcctggccacactagggcaggcctagaaatgtcactgagggcagccacatcatccctcagtgaagagcaggtctctgagctgagggacaacctgcccaaggaggtcaggttgagccccaagcttatcctcgacccaaagagcagtgtgacccctgccatcatctcggccgccctacagcaagtggttcacaataagagtctagtcactgctggtggggctttggggaacccccccagcaggggtgagagaaggctggaggccagcatggggaggccagaggttagcatgatgagcagcagtgccagtaagaatctgaagttcaaaattagccccagtgctccagagacctcatggaattctcaacatcagctgggtgcagaggtctcttccagccccagagcacccacaggcagccgggctgacagcctgcacctctcccaacaagaggacagtctgcctgttcaaaatttccctcccaaaagctatcttttgcgaacaagccgagagtcagtgggcaagcaagctacaggggaggtggcaggcaaaggcgggccagtgggtggtaagcccaccctgcagaagcagggcaccatctccagccaaggggagaaggcgcagctggagagcacacccaaaagaagcaagctcgaagagaccagcctggttccccgagctacctaccccatggctctgcagagccccagctgccagtcaagaagccacagccccagctgccagcctcatggccacagccccagcagccagtctcgaggtcagagccccagctgccaacctcgaggccagagcccactgaggtctcaggctgccagccggcaggtgagcaccatgccctctaggaagcttgaaacaactctcaatggagcccactcgacctctgaaggccctgccaaacccaagtcatcccgaggtcctttccggctacgcaatttattctctgccaccttcccaacccgccagaagaaggagacagatgagcggcaggcccaactgcagaaggtaaagcagtatgaactggagttccttgaggaacttctaaagccaccaagccagggggagctgccaggcaccgagtacctgcaacctccagcacctggccgctgcagctgccagctccgcagcagccctgtgcagcaggggcctggcatgtcccgtgagcagaggcgcagctgtgactgcaagcgcatctgccgggggggccggccacaagccacccagacaccagtgcccagcctccgggggagggaaagggacagagtcctccctagccagaggcagccagaggctggcccaggcgtgagcctcagcagccccatcaatgtccagcgcattcgttctaccagcctggagtcccgagagtgccgatcggaccctgagagtggtgtttcgtgcctgaccacgtgtgcctcggggggcgagtgtctgggagctcccaattacaggaaactgatgcgccgctacagtatcagtgagctggaccagggtgacagggcctcgctgacctcggatgtctacccacatcctcccctgggcatgctgcccagggaggccaaggaggtagaggcaagcctccccatagccttgggtcccaaaagcaggtctctggagtcaccgacgctgggagacccctcctacgtccaggttgccccagagaccaaaggccccagacagatggccgtgttctcactgcccgaggaggtgtaccggaagcctgccgagctagacgaggacagtgagagcagcaagtgctgctccatccgctactgcttctactaccgcaagtgtgacatggcagatgatgccagtgatggcaaggatgagctctcctactctatccaccatgaagatcctgcctggcatgaagctggacgagcaggtacatacctagaagtggaactgctgaatcgtaagggtgacgaggagacctctaacaattgcttcttccgcttcactcactccatcatcacctacctagactttgggttatcagatattgcactacccccaaatctcaatgcccaatatcccactctctacgacaccatccattcttccagtttacctccacaagggctcccactgcaggaagcatctgaacgcgtcatgatcacctattcacttcccacttga

SEQ ID NO: 126547 - DNA, 663 bp, Homo sapiens
ccataattccttgaaatcagatgaaaataaagagaattcattttcagcagaccatgtgactactgcagttgagaaatccaaggaaagtcaagtgactgctgatgaccttgaagaagaaaaggcaaaagcggaactgattatggatgatgacagaacagttgatccactactatctaaatctcagagtatcttaatatctaccagtgcaacagcatcttcaaagaaaacaattgaagatagaaatataaagaataaaaagtcaacaaataatagagcatccagtgcatctgccagattaatgacctctgagtttttgaagaaatctagttctaaaaggagaactccatcgacaactacctcttctcactatttagggactttaaaagtcttggaccaaaaacctttcacagaaacagaggcataggaacctgatagagcagataacataaggggcagctgtttattcaggagtggttaggaaaagaaaaatgtatatttacatgaaatgcacagaataaaaagaattgaaagtgaaaacttaaggatccaaaatgaacagaaaaaagctgctaaaagagaagaagcattagcatcatttgaggcctggaaggctaaaaagccaagcaagcaaagaaaatagctgccaaaaaagaacttgaagaa

SEQ ID NO: 126548 - DNA, 1050 bp, Homo sapiens
atggaggagaaggatggactagaagataaagaaactgccctcagtgaagaattggagttacattctgcaccttcttcccttccaacgccgaatggcatacaattagaagctgagaaaaaagcattctctgaaaaccttgatcctgagattaacagctccaaagaatccaatagtgaattgagtgattttaagcccatgttacctcaaaacaaattccaaaaaaatggtcataatgaaaccaacagaattaagacttttcacagtaaagattcaggtttagctgcaaggtggacgttggtagaactgaaagttggtgatcccattccaaaatgtgatccaaatgaagaaatcactgaaaaccataattccttgaaatcagatgaaaataaagagaattcattttcagcagaccatgtgactactgcagttgagaaatccaaggaaagtcaagtgactgctgatgaccttgaagaagaaaaggcaaaagcggaactgattatggatgatgacagaacagttgatccactactatctaaatctcagagtatcttaatatctaccagtgcaacagcatcttcaaagaaaacaattgaagatagaaatataaagaataaaaagtcaacaaataatagagcatccagtgcatctgccagccacgtcaaagaattggtgtggcggctgaccgcggcaagtggtagagacacggaccgagggcaagaaaaagctgtaggctttattgagcagagtgaaagtacaaagattccacagcctggtcccgaacgggtagccagagttagattatacgattgccttttaaactctttaagcaacgtgcctaatattgcaattgaatgtcttattgaagattcaatggctgcattgatcagggcagggtgctcgcctacaagaggcaatgcatgccgtgaaccagttctgctatctatggctgattctcccagaggaggacagggcactagagtggctgcctcctctgttactgataaattaattaacaacctgggagacttcaatgatttggaaggatcctaa

SEQ ID NO: 126549 - DNA, 1982 bp, Homo sapiens
atgtttctttcaaagccttctgtgtacatctgtcttttcacctgtgtcctccaactcagccacagctggtcggtgaacaatttcctgatgactggtccaaaggcttacctgatttactccagcagtgtggcagctggtgcccagagtggtattgaagaatgcaagtatcagtttgcctgggaccgctggaactgccctgagagagccctgcagctgtccagccatggtgggcttcgcagtgccaatcgggagacagcatttgtgcatgccatcagttctgctggagtcatgtacaccctgactagaaactgcagccttggagattttgataactgtggctgtgatgactcccgcaacgggcaactggggggacaaggctggctgtggggaggctgcagtgacaatgtgggcttcggagaggcgatttccaagcagtttgtcgatgccctggaaacaggacaggatgcacgggcagccatgaacctgcacaacaacgaggctggccgcaaggcggtgaagggcaccatgaaacgcacgtgtaagtgccatggcgtgtctggcagctgcaccacgcagacctgttggctgcagctgcccgagttccgcgaggtgggcgcgcacctgaaggagaagtaccacgcagcactcaaggtggacctgctgcagggtgctggcaacagcgcggccgcccgcggcgccatcgccgacacctttcgctccatctctacccgggagctggtgcacctggaggactccccggactactgcctggagaacaaaacgctagggctgctgggcaccgaaggccgagagtgcctaaggcgcgggcgggccctgggtcgctgggaactccgcagctgccgccggctctgcggggactgcgggctggcggtggaggagcgccgggccgagaccgtgtccagctgcaactgcaagttccactggtgctgtgcagtccgctgcgagcagtgccgccggagggtcaccaagtacttctgtagccgcgcagagcggccgcgggggggcgctgcgcacaaacccgggagaaaaccctaagggtttcctctgccccctccttttcccactggttcttggcttcctttagagaccccggtaattgtggaacctagggaatggggaacccgctctcccagacctagggatcctgaaagggaaaaactgcaatttctccaaagcttgccactttccagcctgtttccccaattcctctgtgctctcctaaagctctgtctgaatcctcgcagccacacctaggtctgaaaactcaggctttgagttactgatcttccttggattaggaaaacaggtgttcctcctcccctctcctatcagccctaatctctgacctagcctatcaacccttaggcgctggaaaaaccttctcatacacgcaggacccaggttaactcaaagctttgcccttttgcccactgtctgctaccaggggctcaccctctgctgcacctctcttctgcacagctcctcccctgctactgctgaccaaattcccaggaatcttgaatgctttctctcctcttctccctttcctttcccaaaaaaaactgaggaaactggccccggaaaagcatgtctttggggttggttcctagaggcagaggttgaagatggaagagggagctctggagtgctaacttgaacaccaagggtgctactcatccctatggtatcatatcatgaatggactttactagtggggcaatgactttcctagacaataacccgagggactccagatacataccccgaaggtctaggaaatacgttaagggcagattacagtcatttcctaccctttaaaggtaacttctcccttctcctgacctacttcctcctagcaaccaactttacctcttcttctccaaaggatctttgttcctctgagccaagactgaggtaaataaagccactttcctcttcagatcctggtctgcacctctaga

SEQ ID NO: 126550 - DNA, 613 bp, Homo sapiens
ttttttttttttttttaaagatatgtcgttcatttattctgaatcttatattgatagataataccagaagatttcagcatagcagataaaatacagcaaatcctaaccagcacaggttttagtgacaaacgggcccgttccatggacatagatgacttcatcaggtaattacatttttgttttcctaagtgtttacatttctttactgtgacaccttcagaatttttgggggatgattttaaaggcttttaagcggtataaggaatctattcggtggttagaagatgaaaaggccctcttagagatgactgaagaagtagattatgatgtcgattcatatgctacacaacttgaagctattcttgagcaaaaaatagacattttaactgaactgcgggaaaacgagaccctggttccaaagacaacaaagacaaacaaaacacacaaagattgcggggcaagggggggcgcgaaccagaaaacgacagaggggaaagctatccacagcgagaagcgagcaccaaacaagagcgcgacatacacggcgaaagaagaacacaacaagacagggcaggagcgacgcgaaccagagaaataccgcgaaagcgagtaa

SEQ ID NO: 126551 - DNA, 223 bp, Homo sapiens
atatgtcatgggacgtaacgatggtggatacctaatgattgattcaaaaactgctgaaatcaaatttgtcaaaaatatgaaccgagattctactttcatagttaacaaaacaatcacagctgaggttctggccatagatgcgttattcaggaaagaactgcttattaataagttggtcctacatatgcggatgacttccaaactgactacttacttcaaaagg

SEQ ID NO: 126552 - DNA, 429 bp, Homo sapiens
atcacatgtcgggctctaaatgcccaaggactagatgtagagaaaccacttatactaacggttaaaattttggatattaatgataatcctccagtattttcacaacaaattttcatgggtgaaattgaagaaaatagtgcctcaaaagtttgtacaaatacgtatgccagaggcacagcggtggaaggcacttcaggaatggaaatgaccactaagcttggagcagccactgaatctggaggtgctgcaggctttgcaacagggacagtgtcaggagctgcttcaggattcggagcagccactggagttggcatctgttcctcagggcagtctggaaccatgagaacaaggcattccactggaggaaccaataaggactacgctgatggggcgataagcatgaattttctggactcctacttttctcag

SEQ ID NO: 126553 - DNA, 503 bp, Homo sapiens
aaagcatttgcctgtgcggaggaagacgatggccaggaagcaaatgactgcttgttgatctatgataatgaaggcgcagatgccactggttctcctgtgggctccgtgggttgttgcagttttattgctgatgacctggatgacagcttcttggactcacttggacccaaatttaaaaaacttgcagagataagccttggtgttgatggtgaaggcaaagaagttcagccaccctctaaagacagcggttatgggattgaatcctgtggccatcccatagaagtccagcagacaggatttgttaagtgccagactttgtcaggaagtcaaggagcttctgctttgtccacctctgggtctgtccagccagctgtttccatccctgaccctctgcagcatggctttgatccacttctcacacaaaatgtgatagtgacagaaagggtgatctgtcccatttccagtgttcctggcaacctagctggcccaacgcagctacgagg

SEQ ID NO: 126554 - DNA, 825 bp, Homo sapiens
atggcactacaaaatggcaaacagtcagaagacaaaagcgggagtggatcaagtttgccgcagcctgtcgagaaggagaggacaactcgaagaggaaccccattgccaaataaagtgatctgcagaattccctccttccagctttatattaaaaacataattcgatcagactgcgaatcgaaccagaagataacataccggatttctggagtagggattgatcgaccaccatatggggtattcaccattaatcctcgcactggggaaattaacatcacttcagtggtagacagagaaataactccacttttcttgatctattgccgggctctgaattcacggggtgaagatttagaaaggcctcttgagcttagagtcaaagttatggacataaatgataacgctccagtcttttcgcaaagtgtatacacagccagcattgaagaaaatagtgatgccaatacattggtagtaaagttatgtgccacagatgcagatgaagaaaatcatctgaattctaaaattgcctacaagatcgtctctcaggagccatcaggtgcacccatgttcattctgaataggtacactggagaagtctgcaccatgtccagtttcttggacagagagcaacacagtatgtacaacctggttgtgagaggctcagatcgggatggagctgcagatggactgtcttctgagtgtgactgtagaatcaaggttttagacgtcaacgataatttccccaccttagagaaaacttcaagcaaaatagctctaggttcagtaattcactcctatcctcttttgaccagtggaggaagttga

SEQ ID NO: 126555 - DNA, 4285 bp, Homo sapiens
atgctggattatgaacaagcacctaacattcagcttagtatcggagttaaaaaccaagctgattttcactactccgttgcttctcaattccaaatgcacccaacccctgtgagaattcaagttgttgatgtgagagaaggacctgcatttcatccaagtactatggcttttagtgtgcgggaaggaataaaaggaagttccttattgaattatgtgcttggcacatatacagccatagatttggacacaggaaaccctgcaacagatgtcagatatatcatagggcatgatgcaggcagctggttaaaaattgattcaagaactggtgagatacaattttctagagaatttgataagaagtcaaaatatattatcaatgggatatacacagcagagatcctggctatagatgatggctctggaaaaacagctacaggaaccatatgtattgaggttcctgatatcaatgattattgtccaaacatttttcctgaaagaagaaccatctgcattgactctccatcagtccttatctctgttaatgaacattcttatgggtctccgtttactttctgtgttgttgatgagccaccaggaatagctgacatgtgggatgtcagatcaacaaatgctacctcggcaatccttacggctaagcaggttttatctccaggattttatgaaatcccaatcctggtgaaggacagctataacagagcatgtgaattggcacaaatggtgcagttatatgcctgtgattgcgatgacaaccacatgtgcctggactctggtgccgcgggcatctacacagaggacataactggtgacacgtatgggcctgtcactgaagaccaagctggagtttcaaatgttggtcttggaccagcagggattggcatgatggttctgggcatcctgctactgatttcagagacgctgcagagggcttttcttagacatcaactgcagacggctggcaggatagaagcagcggctcacttggactttttcaccagggaaatcagagacaatgatggggctcttccccagaactacaggggctctggccatcttcgtggtggtcatattggttcatggagaattgcgaatagagactaaaggtcaatatgatgaagaagagatgactatgcaacaagctaaaagaaggcaaaaacgtgaatgggtgaaatttgccaaaccctgcagagaaggagaagataactcaaaaagaaacccaattgccaagattacttcagattaccaagcaacccagaaaatcacctaccgaatctctggagtgggaatcgatcagccgccttttggaatctttgttgttgacaaaaacactggagatattaacataacagctatagtcgaccgggaggaaactccaagcttcctgatcacatgtcgggctctaaatgcccaaggactagatgtagagaaaccacttatactaacggttaaaattttggatattaatgataatcctccagtattttcacaacaaattttcatgggtgaaattgaagaaaatagtgcctcaaactcactggtgatgatactaaatgccacagatgcagatgaaccaaaccacttgaattctaaaattgccttcaaaattgtctctcaggaaccagcaggcacacccatgttcctcctaagcagaaacactggggaagtccgtactttgaccaattctcttgaccgagagcaagctagcagctatcgtctggttgtgagtggtgcagacaaagatggagaaggactatcaactcaatgtgaatgtaatattaaagtgaaagatgtcaacgataacttcccaatgtttagagactctcagtattcagcacgtattgaagaaaatattttaagttctgaattacttcgatttcaagtaacagatttggatgaagagtacacagataattggcttgcagtatatttctttacctctgggaatgaaggaaattggtttgaaatacaaacgtgatcctagaactaatgaaggcatcctgaaagtggtgaaggctctagattatgaacaactacaaagcgtgaaacttagtattgctgtcaaaaacaaagctgaatttcaccaatcagttatctctcgataccgagttcagtcaaccccagtcacaattcaggtaataaatgtaagagaaggaattgcattcccgtcctgcttccaagacatttactgtgcaaaaaggcataagtagcaaaaaattggtggattatatcctgggaacatatcaagccatcgatgaggacactaacaaagctgcctcaaatgtcaaatatgtcatgggacgtaacgatggtggatacctaatgattgattcaaaaactgctgaaatcaaatttgtcaaaaatatgaaccgagattctactttcatagttaacaaaacaatcacagctgaggttctggccatagatgaatacacgggtaaaacttctacaggcacggtatatgttagagtacccgatttcaatgacaattgtccaacagctgtcctcgaaaaagatgcagtttgcagttcttcaccttccgtggttgtctccgctagaacactgaataatagatacactggcccctatacatttgcactggaagatcaacctgtaaagttgcctgccgtatggagtatcacaaccctcaatgctacctcggccctcctcagagcccaggaacagatacctcctggagtataccacatctccctggtacttacagacagtcagaacaatcggtgtgagatgccacgcagcttgacactggaagtctgtcagtgtgacaacaggggcatctgtggaacttcttacccaaccacaagccctgggaccaggtatggcaggccgcactcagggaggctggggcctgccgccatcggcctgctgctccttggtctcctgctgctgctgttggccccccttctgctgttgacctgtgactgtggggcaggttctactgggggagtgacaggtggttttatcccagttcctgatggctcagaaggaacaattcatcagtggggaattgaaggagcccatcctgaagacaaggaaatcacaaatatttgtgtgcctcctgtaacagccaatggagccgatttcatggaaagttctgaagtttgtacaaatacgtatgccagaggcacagcggtggaaggcacttcaggaatggaaatgaccactaagcttggagcagccactgaatctggaggtgctgcaggctttgcaacagggacagtgtcaggagctgcttcaggattcggagcagccactggagttggcatctgttcctcagggcagtctggaaccatgagaacaaggcattccactggaggaaccaataaggactacgctgatggggcgataagcatgaattttctggactcctacttttctcagaaagcatttgcctgtgcggaggaagacgatggccaggaagcaaatgactgcttgttgatctatgataatgaaggcgcagatgccactggttctcctgtgggctccgtgggttgttgcagttttattgctgatgacctggatgacagcttcttggactcacttggacccaaatttaaaaaacttgcagagataagccttggtgttgatggtgaaggcaaagaagttcagccaccctctaaagacagcggttatgggattgaatcctgtggccatcccatagaagtccagcagacaggatttgttaagtgccagactttgtcaggaagtcaaggagcttctgctttgtccgcctctgggtctgtccagccagctgtttccatccctgaccctctgcagcatggtaactatttagtaacggagacttactcggcttctggttccctcgtgcaaccttccactgcaggctttgatccacttctcacacaaaatgtgatagtgacagaaagggtgatctgtcccatttccagtgttcctggcaacctagctggcccaacgcagctacgagggtcacatactatgctctgtacagaggatccttgctcccgtctaatatgaccagaatgagctggaataccacactgaccaaatctggatctttggactaaagtattcaaaatagcatagcaaagctcactgtattgggctaataatttggcacttattagcttctctcataaactgatcacgattataaattaaatgtttgggttcataccccaaaagcaatatgttgtcactcctaattctcaagtactattcaaattgtagtaaatcttaaagtttttcaaaaccctaaaatcatattcgc

SEQ ID NO: 126556 - DNA, 3669 bp, Homo sapiens
atgaagcaagttcagggcatgatgctggattatgaacaagcacctaacattcagcttagtatcggagttaaaaaccaagctgattttcactactccgttgcttctcaattccaaatgcacccaacccctgtgagaattcaagttgttgatgtgagagaaggacctgcatttcatccaagtactatggcttttagtgtgcgggaaggaataaaaggaagttccttattgaattatgtgcttggcacatatacagccatagatttggacacaggaaaccctgcaacagatgtcagatatatcatagggcatgatgcaggcagctggttaaaaattgattcaagaactggtgagatacaattttctagagaatttgataagaagtcaaaatatattatcaatgggatatacacagcagagatcctggctatagatgatggctctggaaaaacagctacaggaaccatatgtattgaggttcctgatatcaatgattattgtccaaacatttttcctgaaagaagaaccatctgcattgactctccatcagtccttatctctgttaatgaacattcttatgggtctccgtttactttctgtgttgttgatgagccaccaggaatagctgacatgtgggatgtcagatcaacaaatgattatgaacaactacaaagcgtgaaacttagtattgctgtcaaaaacaaagctgaatttcaccaatcagttatctctcgataccgagttcagtcaaccccagtcacaattcaggtaataaatgtaagagaaggaattgcattccgtcctgcttccaagacatttactgtgcaaaaaggcataagtagcaaaaaattggtggattatatcctgggaacatatcaagccatcgatgaggacactaacaaagctgcctcaaatgtcaaatatgtcatgggacgtaacgatggtggatacctaatgattgattcaaaaactgctgaaatcaaatttgtcaaaaatatgaaccgagattctactttcatagttaacaaaacaatcacagctgaggttctggccatagatgaatacacgggtaaaacttctacaggcacggtatatgttagagtacccgatttcaatgacaattgtccaacagctgtcctcgaaaaagatgcagtttgcagttcttcaccttccgtggttgtctccgctagaacactgaataatagatacactggcccctatacatttgcactggaagatcaacctgtaaagttgcctgccgtatggagtatcacaaccctcaatgctacctcggccctcctcagagcccaggaacagatacctcctggagtataccacatctccctggtacttacagacagtcagaacaatcggtgtgagatgccacgcagcttgacactggaagtctgtcagtgtgacaacaggggcatctgtggaacttcttacccaaccacaagccctgggaccaggtatggcaggccgcactcagggaggctggggcctgccgccatcggcctgctgctccttggtctcctgctgctgctgttggccccccttctgctgttgacctgtgactgtggggcaggttctactgggggagtgacaggtggttttatcccagttcctgatggctcagaaggaacaattcatcagtggggaattgaaggagcccatcctgaagacaaggaaatcacaaatatttgtgtgcctcctgtaacagccaatggagccgatttcatggaaagttctgaagtttgtacaaatacgtatgccagaggcacagcggtggaaggcacttcaggaatggaaatgaccactaagcttggagcagccactgaatctggaggtgctgcaggctttgcaacagggacagtgtcaggagctgcttcaggattcggagcagccactggagttggcatctgttcctcagggcagtctggaaccatgagaacaaggcattccactggaggaaccaataaggactacgctgatggggcgataagcatgaattttctggactcctacttttctcagaaagcatttgcctgtgcggaggaagacgatggccaggaagcaaatgactgcttgttgatctatgataatgaaggcgcagatgccactggttctcctgtgggctccgtgggttgttgcagttttattgctgatgacctggatgacagcttcttggactcacttggacccaaatttaaaaaacttgcagagataagccttggtgttgatggtgaaggcaaagaagttcagccaccctctaaagacagcggttatgggattgaatcctgtggccatcccatagaagtccagcagacaggatttgttaagtgccagactttgtcaggaagtcaaggagcttctgctttgtccacctctgggtctgtccagccagctgtttccatccctgaccctctgcagcatggaagtcaggtgctagagcagctggagaagtgcaggcagcctgtgcttccacagatgggggtgctgctgcaacaaggctttcaatgtgcccatcttaagtgggagaagctagatcctgtgcagcagcctgcttacactaatgagggtgtggcagcctctcagagactcacaggtactttgtgtcagctacatctcaaccgcaaagagcactgtaaacaaagttctgactggctaaccagcaaaaggaaagaactgcttattaataagttggtcctacatatgcggatgacttccaaactgactacttacttcaaaagggtgaaggaatttgacattgaaaatggcactacaaaatggcaaacagtcagaagacaaaagcgggagtggatcaagtttgccgcagcctgtcgagaaggagaggacaactcgaagaggaaccccattgccaaaattcgatcagactgcgaatcgaaccagaagataacataccggatttctggagtagggattgatcgaccaccatatggggtattcaccattaatcctcgcactggggaaattaacatcacttcagtggtagacagagaaataactccacttttcttgatctattgccgggctctgaattcacggggtgaagatttagaaaggcctcttgagcttagagtcaaagttatggacataaatgataacgctccagtcttttcgcaaagtgtatacacagccagcattgaagaaaatagtgatgccaatacattggtagtaaagttatgtgccacagatgcagatgaagaaaatcatctgaattctaaaattgcctacaagatcgtctctcaggagccatcaggtgcacccatgttcattctgaataggtacactggagaagtctgcaccatgtccagtttcttggacagagagcaacacagtatgtacaacctggttgtgagaggctcagatcgggatggagctgcagatggactgtcttctgagtgtgactgtagaatcaaggttttagacgtcaacgataatttccccaccttagagaaaacttcatactcagccagtattgaagagaattgtttaagttcggaactgatacgattacaagcaattgatcttgatgaagaaggcactgataactggttggctcaatatttaattctctctggaaatgatgggaattggttcgatattcaaacagatccacaaaccaatgaagccactttgaaagttgtcaag

SEQ ID NO: 126557 - DNA, 597 bp, Homo sapiens
atgttctcactcactgataggctggatgtggatagcttgtttagcaacattgagtccgtgcatcagatatcagccaagctgctgtcattgttggaagaggccacaacagacgtggaaccggccatgcaagtaattggtcagtgcggaggtttgggggacacccagatgcaacagttggaagatcagaatgcaaatgttagaagtaataggaaagctgtccgctttggagaaaatgacaatggggaaatggtattttcaggatcaaggatacaccaatcctcacaagaaagaaaaaatcagcaggaagcagagctgtacggcagctctgctccacaaggtgctctgggatgcaacctccttccagctcacagctccactcaccaagaggtggctgttatcttcatggacaagattttctatgcagttcatgcttttcaagcacggagtgaccatgaactcagccttcaggaataccagagagttcatatactcaggttttgtgacctaagtggcaataaagagtggtggttagctgaagctcaagggcagaaaggatacgtgccagctaactaccttggaaagatgacttatgcttaa

SEQ ID NO: 126558 - DNA, 615 bp, Homo sapiens
atgaccacaaaagactgttgcaagggctacggaggttgtcagccaggaaccattgtcaaacaccaatataaatacgtctgtcacaaccctacactacctgatctcatcggagtagcaaggacagcacatggccctcatagtccccgcacggtccaggctgaaacactcggagtgcttcgtcactggacatcagcaggcgtggcagtgctgagtgcgtcggtcaggaggaagaagaagaaggaggaggaggagaaggagaaggaaaagaagaagaagaagaagacggaggaggaggaggaagaagaggaggaagaggaagaagagaggaggaagaaggagaagaagaaggagaggaagaaggaggaggaggaggagaaggaagaaagaactgtacatgaggcagcatttgctcacaggctggctgtgaggagcctgtggtcaaaaaaacctgcacgggggcggagcgcagaggctgtgtttgctgtttctgccacactggcatcctggagtatcctctcttatgggctacgtggacttaccattgaggcgttcacttgttcatttgtcaaggaccagagaagtgtgtgcatctcctgtccccgtgatggctcctga

SEQ ID NO: 126559 - DNA, 532 bp, Homo sapiens
  misc_feature (1)...(532): n = a,t,c or g
ggattttgccgatttcggaaccaccatcaaacaggattttcgcctgctggggcaaaccagcgtggaccgcttgctgcaactctctcagggccaggcggtgaagggcaatcagctgttgcccgtctcactggtgaaaagaaaaaccaccctggcgcccaatacgcaaaccgcctctccccgcgcgttggccgattcattaatgcagctggcacgacaggtttcccgactggaaagcgggcantggtatcacggggccatcagcagaaccgacgccgagaacctgctccggctgtgcaaagaggccagctacctggtgcgcaacagtgagaccagcaagaatgacttctccctctccctcaatgccgcaagccaaaggcaacaatgtggttatcacaagggacatgacaaacacaggcttaaaaaggaaaaaaaggcaacatttgcgccaagcttcttaatgaacatcaaaggcaataaaacatccgttgtcaaaaacagcatcctggagcaaggacagcagacagtcaactaa

SEQ ID NO: 126560 - DNA, 794 bp, Homo sapiens
  misc_feature (1)...(794): n = a,t,c or g
ctggtatcacggggccatcagccgaaccgacgccgagaacctgctccggctgtgcaaagaggccagctacctggtgcgcaacagtgagaccagcaagaatgacttctccctctccctcaaacacttggaggccgccctggccgtggggagggcgcaatacggacggtttgtcacgtattggcgccccatgcccgcaaggctacatgttcttttcgacgtggtgagcggtggaaacccccggttgccccgccgagttccttcacaatccgcatcccacctggagaccttgtgtttgaactcaaccaacgccggggacgtggtgctggccctttcaaaggagccgttgggacccccagaaccggacggagtcccaacaacccccgggacactggtaacgtcattccagcccttgctgttcactgaggcgcaccgagagaagttccaacgcagctgtctccaccagacggtgcaacagttcaagcgcttcattgagaactaccggcgccacatcggctgcgtggccgtgttctacgccatcgctggggggcttttcctggagagggcctactactacgcctttgccgcacatcacacgggcatcacggacaccacccgcgtgggaatcatcctgtcgcggggcacagcaagccagcatctctttcatgttctcctacatcttgctcaccatgtgccgcaacctcatcaccttcctgcgagaaaccttcctcaaccgnnctacgtctgagttcccccagaagtattactggtggttcttccacgaccgtaccaggtga

SEQ ID NO: 126561 - DNA, 543 bp, Homo sapiens
ttagcattgccttaagtccacactggcatctcccagaccttctccagggacagaagcaggagtaagtttctcatcccatgggcgaccagggccatctcctcccaccagtggcccccactcacagggagctggcaatgccctacctgcctgttctccagatggagaaacaggctctggttcttcagagacggctccctgccaagcccagtcacagccagagctccaagaaaggagttctggagcagtgagaactggctgcccaggcatccacgtcagggtggccatagctctaaggaccattgccctcagttgggtctgccctgggccagcctgcaactgccctacaaatgggaaaattatagatgagccaggagactggagcagcaggtcaaggagataagggctctgaatgaaatattccttgccgagggccaagacttttccatgattcaagatatctccacccgagctcttttgcaacccagaatgagggggatcagagtgttcccaaccccacagattgttgtccttggcaggagccat

SEQ ID NO: 126562 - DNA, 5619 bp, Homo sapiens
  misc_feature (1)...(5619): n = a,t,c or g
gggccaggccgccagccccgccagccccgccagccccgccagccccgcgatggcttgggccgcgctcctcggcctcctggtcgcactgttgctgctgctgctactgagccgccgccgcacgcggcgacctggtgagcctcccctggacctgggcagcatcccctggttggggtatgccttggactttggaaaagatgctgccagcttcctcacgaggatgaaggagaagcacggtgacatctttactatactggttgggggcaggtatgtcaccgttctcctggacccacactcctacgacgcggtggtgtgggagcctcgcaccaggctcgacttccatgcctatgccatcttcctcatggagaggatttttgatgtgcagcttccacattacagccccagtgatgaaaaggccaggatgaaactgactcttctccacagagagctccaggcactcacagaagccatgtataccaacctccatgcagtgctgttgggcgatgctacagaagcaggcagtggctggcacgagatgggtctcctcgacttctcctacagcttcctgctcagagccggctacctgactctttacggaattgaggcgctgccacgcacccatgaaagccaggcccaggaccgcgtccactcagctgatgtcttccacacctttcgccagctcgaccggctgctccccaaactggcccgtggctccctgtcagtgggggacaaggaccacatgtgcagtgtcaaaagtcgcctgtggaagctgctatccccagccaggctggccaggcgggcccaccggagcaaatggctggagagttacctgctgcacctggaggagatgggtgtgtcagaggagatgcaggcacgggccctggtgctgcagctgtgggccacacaggggaatatgggtcccgctgccttctggctcctgctcttccttctcaagaatcctgaagccctggctgctgtccgcggagagctcgagagtatcctttggcaagcggagcagcctgtctcgcagacgaccactctcccacagaaggttctagacagcacacctgtgcttgatagcgtgctgagtgagagcctcaggcttacagctgcccccttcatcacccgcgaggttgtggtggacctggccatgcccatggcagacgggagagaattcaacctgcgacgtggtgaccgcctcctcctcttccccttcctgagcccccagagagacccagaaatctacacagacccagaggtatttaaatacaaccgattcctgaaccctgacggatcagagaagaaagacttttacaaggatgggaaacggctgaagaattacaacatgccctggggggcggggcacaatcactgcctggggaggagttatgcggtcaacagcatcaaacaatttgtgttccttgtgctggtgcacttggacttggagctgatcaacgcagatgtggagatccctgagtttgacctcagcaggtacggcttcggtctgatgcagccggaacacgacgtgcccgtccgctaccgcatccgcccatgacacagggagcagatggatccacgtgctcgcctctgcccagcctgccccagcctgccccagcctcccagctttctgtgtgcacagttggcccgggtgcaggtgctagcattaccacttccctgcttttctcccagaaggctgggtccaggggagggaaaagctaagagggtgaacaaagaaaagacattgaaagctctatggattatccactgcaaagttttctttccaaaatcaggctttgtctgctcccaattcacctcgttactctcacctcgtgatatccacaaatgctattcagataaggcagaactaggagtcttcactgctctgcccccaactcccggaggtgtcaccttcctagttcttatgagctagcatggcccgggscttatccagttcaaagcggatgctggccacagaaaggccactcaggatgtcctttgtgtccattgatgtcattcagcagtcagtcccccaataatccttaaactagctaaaaccaaaggagtcccttagaagatctgcttccctggggccccatttgccagattgccccattgctcacactacttgagaaaatgcaggagagcttcccccaaggctgatgcattcccggtgcagaacaggggcaccctccaaacactgggctctgaggagtggagttctctgttctagagtnacaggcaccagatgggatgggctttctcagtgtcagcactcaggtagggagctaaggaagacacagcccagacaagatggctggaaggagccagccaggactccttagactgatcaagccaaaaaagaaggtgccgatttcatgcattctagtgcagaagccccaactgtgatcacgatccagtctgcagacgtgttttgtttggacttcacttaaaaaaatgccttagttgttatcatctttgggagagttcattcaaaatgtccagcttctcttgaaaacttggtatatctggccacactgggctcacattcccaagggtaactcttggccagagctgagtggcagccgcctcccttatgcaggacatgtgctctcggcttcaccagggttctgaccgggtctgcttctgcattcacagcgsctcctggycctgaaggcatctgagtgtgagaccctgttctaactcttagaagtgacattgtaagaggtggtggggaccagctaattggtccaacccagcctgagtgcaccaccctttgaacaaatgtatcagtgatgaaaatttgcctttgccccggcttgcctgtaatcccagcactttgggaggccgaggtgggcggatcacttgaggtcgggagttcaagaccagcctggccaacatggcgaaaccccgtctctactaaacataaaaaaattagtcaggtgtggcggtgccgtgcctgtaatcccagctattcaggaggctgaggcaccagaattgcttgaacccaggaggtggaggttgcagtgaactgaagactgcgccacggcactccagcctgggcgacagagcaagactctgtctcaataaataaataattaattaaaataaaaaacagcttaaagagaaaaatggcctgcaaaccttttttatgatgctatttttattaatataaagtcctgtttattgagaccctttaaatgcctgcgagagaccctacagacagtatgtctactcctcacagcatctctatgaagagaaggagggttgtgcccacttcatagatgagaaaactgagaggtgaggtgacttgcctggggccacatagctcataayctgtagaactctgcaggcagatttactgtcccaggagcaaatgctggatgagcaactcctgttctttgggctcaaggggactggtgatgggacaattcttctcgacttcaggagctgacagagccagaggcacctaaacttgggtacatcttgtaagacacataatgaggtccctctagctttagctggagggagataaaagaaccccagacctctgaatgtcccagaggctagtctcttctcagagcagcactggggtttgggggcttccctgggcctcagcctccaggcacccccaggattcccagagagacgctgtgattggcaggaggcaggatatccccagggaaacccatcttcacgcctgggtgacccccactgccgcctccttcttaactctgcaggaaatcagagctggcagcctccagtgggaggacagagccggtttccgtggcaaccctcagctgcctcatcgtggctgggaagggaaggaagcaagccggcagaaatagctatggaaggtcttgcgcaggctgcaaccctggtgtgctgggcgaaaacccttatgactccccccttccaaatcaggctgggttgtcactgagactagattctcacctgccttcaaagaagggccaattccctttaaaggtcgcacctccttggaaccacagtcattagtgaattacactcaaggaaaagatgtgctcccaccaggcagctccagctgttacctgagatactgaagtgcagctcaggagacgattatttaaacctgcccttgttttaatcgttatttttctctttaaaaaaaatagaagctataaagaaaagagggagagatgagtgggttagctacctgctatgcgctagttaggaagttacctggatgccattgtatttcttcatcccttgcttaagaatcaaaattactggacatatgttaggaatactctttctttctttctttctttttaagctcagtggcaagaatgaaatactctttttttttttttttttttgagatggagtctcgctctgctgcccaggctagagtgcagtggcgtgatctcggctcactgcaagctctgcctcccgtgttcacaccattctcctgcctcagcctcctgagtagctgggactacaggcacccgccaccacacccggctaatttttggatttttagtagagatgggatttcaccgtattagccaggatggtcttgatctcctgagctcgtgatctgcccgcctcggcctcccaaagtgctgggattacaggtgtgagccaccgcgcccagccaagaataaaatactcttaagttgatctaatgaagtgtttccttaccattgtgattattgttactattatttgctatattttaatattgttgtttaccaaatattctcctttaaacagactcgctttttaaacttttttttttttttttgagacggagtttcacgcttattgcccaggctggagtgcaatggcacgatctcagctcaccacaacctccacctcctgggtttaagcaatgcttctgcctcagcttcccaagtagctgagattacaggcgcacaccaccacggccaactggtttttgtatttttagtagagacggggttcccccatgttggtcaggctggtctcgaaactcctgaccctcgtgatttgcctgcctggggcctcccaaagtgctaggattacaggcatgagccaccatgcccgggcctaaactttgtttttaaaatgaactttttttccccccaattgctgccaatagtggataacatgtatcactcactgccaaaaatagaaagtgacccatggaaaataaattcgctggggaagggggctcccatgctggtgtggccaaggggctgagagctctctcttcttctgttacaaaacgagataagcaagtgttagaattgccttaaggccacactggcatctccctgacctttttcagggacagaagcatgagtaaaattctcattccatgggcgaccagggccatctcctcccaacagcggtccccactcacagggagctggcaatgccctacctgcctgtgctgcagatggagaaacaggctctgagatttcacaggtcttgcccaacgtcattgattttgatgattaaaaagaataaacacagcgttgcctgagcaacataagattgtgatgccttgctattttaataaagattctattttcgtataacattgtcaagtggaaacatgctgaaatctattaaaccatctttgtttgtggaaaaaaaaaa

SEQ ID NO: 126563 - DNA, 944 bp, Homo sapiens
ctcccacccgcttccatcgggtgcacggtgccaacatccgcgtggacccctctgggacgcgggccacacgcgtggagagcttcgcccacggcgtgtgcttcagccgcgagccgctggccccgggccaggtcttcctggtcgagatcgaggagaaagagctgggctggtgcggacatctgcgtctcggtctgaccgcgctggaccccgccagtctggcccccgttcccgagttttctctgcccgatctggtcaacctgggccacacctgggtcttcgccatcacgcgccaccacaaccgcgtgccccgggagggccgcccggaggcggaggcagcggcccccagccgacctccaaccctcctcgtggaaccatatctgcgcattgagcagtttcgcattccccgggactcgcctggtgggccgcagccggccagggctctacagccatctcttggaccagctctatgagctgaacgtgctgcctccgaccgcgcgccgtagccgcctgggtgtcctcttttgcccgcgccccgatggcacggccgacatgcacatcatcatcaacggcgaggacatgggcccgagcgcccggggactgccagctgcgcagcccctctacgcggtggtggacgtgtttgcttccacaaagagcgtgcgccttgtccagctcgagtatggcttcttcttcccacagtgccatccctgcagactctgtgccgcctagtgatacaaaggagcatggtgcaccggctggccattgatgggctccacctgcccaaagaacttaaggatttctgcaagtatgagtgaagacccacagtgcaccagagcacagctgcatcctggagccccagacctgtggctggctggtccgaagttggccacattgctgccagccaagaccagaaataaacagccgatgctgacatcttgaaaaaaaaaaaa

SEQ ID NO: 126564 - DNA, 1137 bp, Homo sapiens
gatacgtactgcaggggagaccagctgcacatcctgctggttgtgagggaccacttgggacgcaggaagcaatatggcggggatttcctgagggccaggaggtcttccccagcgctgatggcaggtgcttcaggaaaggtgactgacttcaacaacggcacctacctggtcagcttcactctgttctgggagggccaggtctctctgtctctgctgctcatccaccccagtgaaggggtgtcagctctctggagtgcaaggaaccaaggctatgacagggtgatcttcactggccagtttgtcaatggcacttcccaagtccactctgaatgtggcctgatcctaaacacaaatgctgaattgtgccaatacctggacaacagagaccaagaaagcttctactgggtgaggcctcaacacatgcgctgtgctgcactcactcacatgtattctaagaacaagaaagtttcttatcttagcaaacaagaaaagagcctctttgaaaggtcaaatgtgggtgtagagattatggaaaaattcaatacaattagtgtctccaaatgcaacacactgaagtcagtggatctgcatgaatctggaaaattgcaacaccagcttgctgtggatttggataggaacatcaacatccagtggcaaaaatattgttatcccttgataggatcaatgacctattcagtcaaagagatggagtacctcacccgggccattgacagaactggaggagaaaaaaatactgtcattgttatttccctgggccagcatttcagaccctttcccattgatgtttttatccgaagggccctcaatgtccacaaagccattcagcatcttcttctgagaagcccagacactatggttatcatcaaaacagaaaacatcagggagatgtacaatgatgcagaaagatttagtgactttcatggttacattcaatatctcatcataaaggacattttccaggatctcagtgacattcgtcatgtcctcaaatacaatgcttcaaaaaacgctgctgatcttgatctctttttcagtagtaacctggatgatttttataatttctcagaacttcacaaaggtaggagcaaatcacctttgatgcagatcacacagtaa

SEQ ID NO: 126565 - DNA, 1213 bp, Homo sapiens
atggaccccgccgggcgcgcccggggccaaggggccacggcaggggggctgctgctccgggctgctgcggccgccaagggtctcagggaagacctgtggggcgcggccgccctggccttggaggagcctgtcccggatcccgaagcgggagggtcttggagaggaggacacagcagttgccggacacgagctcctactcccaaatgagagaagctttcagaatgctgctaaaagcaataatttggatcttatggagaagctgtttgaaaagaaggttaacattaatgttgtgaacaatatgaaccgcacagccctgcattttgcagtggggagaaatcatttatctgcagtggatttcttgcttaaacacaaggccagggtggatgttgctgataagaccagaatgagagagcttctcttggaaatctttctgactgtgcccagggcacagttccatgatttgcactgccttgagtccaagttggaagactgtgaaatgagagacacattaagacacatgcaggctgtgtatagggagactaatattttaactcacacagtaacttgtgtgagattgggagccctttcttaccttaagaccatggcatgccgtccccaacagaacatcttgagtgataagaacatggactctgttcttaccagctacatgaacctgggaaagctgcataacctctctgtgcttcagtttctctatctgaaaaatgaggataagaatagcacctacgttaatttaattctcagtgagcgaattcctaccctcatttttcagatacagaaaccgaagtacagagaggttatgcagcttgcccagatgttagtggttctggctttaaccctcttctcattcacagtcgtagtccttaactctattagggctatggtcccctctgaacgcatatttaaagcgaaagatcttctttctagaaaaatacacattcacatttatgataaaaatattgcatacgagtcggcagttcccattatgccagtgattcctcaaactggatctccaacttatacctccagtgcggcgctcccacaatgcttaactccaggaaacaccattcacagtgtagccattgtgaatggcagttcttggagtagcgcactacgtagccagtgtgaccacagactgcatacttgcagctttaccctagtgcctcagaggcatcctcacacccagctcatctga

SEQ ID NO: 126566 - DNA, 405 bp, Homo sapiens
gcacgagatgctgttggcttcagagatcaaacacctgccccgaagactcctaataggtcaagagagagagacccagactagcgaactcaaaataaagagaagaggaaacgaagaagctccctctcaccaccctcttctgcctatgagcggggaacaaaaaggccagatgacagatatgatacaccaacttctaaaaagaaagtacgaattaaagaccgcaataaactttctacagaggaacgccggaagttgtttgagcaagaggtggctcaacgggaggctcagaaacaacagcaacagatgcagaacctgggaatgacatcaccactgccctatgactctcttggttataatgccccgcatcatccctttgctggttacccaccaggttatcccatgcaggcc

SEQ ID NO: 126567 - DNA, 1092 bp, Homo sapiens
tttattgttgtttgtttcttatacttttccttgctttcctcactttctgccatgggagtatgtccttgtatgtgtgctgagtaaaacaaagaggagggaatgattcacacacagtttagctcctgtcttgggtaggtggtgcctagcacttctgcctcctggccacagaagtcccagggaagaaagatgaagtgcctggtggctccaaggcagccacctcatttatcctctttggtctcaccttttcatctcaaggcccgacaccccaccctccaaaccagtggcctttgaggagtttaagaatgagcaaggtagtgagatcaaccgaattttcaaagaaaacaaatccatcttgaatgaacggaggaaaagggccagcgagaccacacagcacatcaatgccatcaagcgggagattgatgtgaccaaggaggccctgaatttccagaagtcactacgggagaagcaaggtggtcagattgaggtggggctgctggtagggactatgaaaaaccaagtaagggaacaagaatgtggatgccagagagccaagggactcactttcagtaaggccattccctatgctgaatccctgacacccgtgctgggagcaactttttgtggtccttattttctttctagatatgatacaccaacttctaaaaagaaagtacgaattaaagaccgcaataaactttctacagaggaacgccggaagttgtttgagcaagaggtggctcaacgggaggctcagaaacaacagcaacagatgcagaacctgggaatgacatcaccactgccctatgactctcttggttataatgccccgcatcatccctttgctggttacccaccaggttatcccatgcatcgcctatgtggatcccagcaaccctaatgctggaaaggtgctcctgcccacacccagcatggacccagtgtgttctcctgctccttatgatcatgctcagcccttggtgggacattctacagaacccctttctgcccctccaccagtaccagtggtgccacatgtggcagctcctgtggaagtttccagttcccagtatgtggcccagagtgatggtgtag

SEQ ID NO: 126568 - DNA, 1386 bp, Homo sapiens
atgacatcagactgccagcttggcacgaggcaatatctgtgtcgttcttggcagaaattatattttccagcccgtgtctgcaggtatattcgaattgttgggactcacaacacagtgaacaagatttttcacattgtggcttttgaatgtatgtttacaaacaaaaccttcactcttgagaaggggctgataggttactactttgggattgtgacactcaaagtggacacagtggaacacctgggagagaaaaggaaaagaccccatgagtgaagggtcagcatgcggccctggagttgccgcaagttgggatactgccctgcccagctttgggggccaccacgagggagttagaggaggtccttcccactgcccacgcctgccccggcgcagacacctgatggcaactagcatgctgtaaacacattttgatcagtcaagaggaaaggaaattgagccagtggcccaaaagttagagacaccatgacacgggtttcccacaaaatctttcacactggattacttccgtttttgccaacctttgtctaattgggctctttttttcttttttaattaattttttgtattttggcagtttgggttaaaagtcaacaggagttgactgggtggtggtggtggtggtggttcgattctgtgaggttgtggaaagcaggtccacagataacgtccaccatctgtgtggcatctgcgtgggttgtctctgggtattctggttttctcccgcgtcccaaagctgtgcacttgaggttcattggtgtgtctgcagggtcccagtctgagtgcatgtgaatgtgtgtgagcgtgccctgcaatggcatggtgtcctgtcctgagctggttcctgatgcatagttctcctggccctgcaatggttgagcacagaccctgctaagcagccgtgctggggagtggacttcaacctcatgtggctccagccagcctggaacaaacgccctcaatgtgtagaagccagccacctggccgacagtcaccctctaggagctaagaagagtttgcatacctgacagcaggtcagccctggaagcaccatgaactctgtgcccaacaccgtgccagcactgtgcagaccagggcacagcaccgagctcagcgccccgcaagcaagggtaagccatggccctgacctggagagtagacaacgtgcttcggggggtcctgacatgcatgtgtgagctgtggggtgcaggagagaagggcggggtgggggctgtcgttgccactgcacgagcatgtgtgcacatacatacacacggccttctaccgtagaatcaagttcacagagacaaatgtagtatcaactgcagaattatattgaaaatataaattccacgcttaaaaaaaaaa

SEQ ID NO: 126569 - DNA, 1330 bp, Homo sapiens
acttgattgggtcagagtgatagatcattcacaatatctgtgtcgttcttggcagaaattatattttccagcccgtgtctgcaggtatattcgaattgttgggactcacaacacagtgaacaagatttttcacattgtggcttttgaatgtatgtttacaaacaaaaccttcactcttgagaaggggctgatagttcccatggagaatgttgcaacaattgctgattgtgccagtgtgattgaaggagtcagtcggagccgaaatgccttgctgaatggggacactaagaattatgactgggattctggctacacatgtcaccagctaggaagtggtgcgattgtggttcagttggcacaaccgtacatgattgggtcaatacgggtactactttgggattgtgatgatcgaagctatagctactacgttgaggtttctaccaaccagcaacagtggaccatggttgctgacagaactaaagtctcctgcaagtcctggcagtcagtaacttttgaaaggcagcctgcctccttcatccgtatcgttgggacacacaacacagcaaatgagtcacactgtgtcaagcgtgtgcctccgaggaacctctggtttaagagaggcagcataggaaatgatgggtcgaaatgcaacagtttaggaggcaagagtgaggatgctgtcaccgcagccttgttcatcctgaacccaacgggataccacgagcgtccatccacagaggatggggtttttatcgatttgtttattcttgtgcaagaacccgagcaggtgttccactgtgtccactttgagtgtccagagcagcagagcagccagaaggaggaaaatagtgaggaatcggggacaggggacaccagcctggccgcccaggctccaactcacgctcccccaaccggcagcaccaataaaggaggcagcgggcctggtgtgacttggtgggctcgggcaacggcaggaaacggtctcctccctgagcaggggtctctgttgactgcccccacctctgcccctttccagggaggagccgacctagctgcaaaagcagacaccgaacaggttttctcccaaggacagaaaggggctgctttgttcttctcaatttatccaaatcaggcaggtctcaagggggagaaaatgggtcttcaatcttcatcaagtccaccattaacaccctacctctctaatctagcccaggcgcagggaacaggaggaagtcatagacaggcctgtgttggaatacaaaaatggcacgcaaacactcaggcggaggagaaagccattgggcctttgctacctggaggcaccctttag

SEQ ID NO: 126570 - DNA, 2868 bp, Homo sapiens
atgccccgcgtctcggcgcctttggtgctgcttcctgcgtggctcgtgatggtcgcctgcagcccgcactccttgaggatcgctgctatcttggacgaccccatggagtgcagcagaggggagcggctctccatcaccctggccaagaaccgcatcaaccgcgctcctgagaggctgggcaaggccaaggtcgaagtggacatctttgagcttctcagagacagcgagtacgagactgcagaaaccatgtgtcagatcctccccaagggggtggtcgctgtcctcggaccatcgtccagcccagcctccagctccatcatcagcaacatctgtggagagaaggaggtccctcacttcaaagtggccccagaggagttcgtcaagttccagttccagagattcacaaccctgaacctccaccccagcaacactgacatcagcgtggctgtagctgggatcctgaacttcttcaactgcaccaccgcctgcctcatctgtgccaaagcagaatgccttttaaacctagagaagctgctccggcaattccttatctccaaggacacgctgtccgtccgcatgctggatgacacccgggaccccaccccgctcctcaaggagatccgggacgacaagaccgccaccatcatcatccacgccaacgcctccatgtcccacaccatcctcctgaaggcagccgaacttgggatggtgtcagcctattacacatacatcttcactaatctggagttctcactccagagaacggacagccttgtggatgatcgtgtcaacatcctgggattttccattttcaaccaatcccatgctttcttccaagagtttgcccagagcctcaaccagtcctggcaggagaactgtgaccatgtgcccttcactgggcctgcgctctcctcggccctgctgtttgatgctgtctatgctgtggtgactgcggtgcaggaactgaaccggagccaagagatcggcgtgaagcccttgtcctgcggctcggcccagatctggcagcacggcaccagcctcatgaactacctgcgcatggtagaattggaaggtcttaccggccacattgaattcaacagcaaaggccagaggtccaactacgctttgaaaatcttacagttcacaaggaatggttttcggcagatcggccagtggcacgtggcagagggcctcagcatggacagccacctctatgcctccaacatctcggacactctcttcaacaccaccctggtcgtcaccaccatcctggaaaacccatatttaatgctgaaggggaaccaccaggagatggaaggcaatgaccgctacgagggcttctgtgtggacatgctcaaggagctggcagagatcctccgattcaactacaagatccgcctggttggggatggcgtgtacggcgttcccgaggccaacggcacctggacgggaatggtcggggagctgatcgctaggaaagcagatctggctgtggcaggcctcaccattacagctgaacgggagaaggtgattgatttctctaagccattcatgactctgggaattagcattctttaccgcattcatatgggacgcaaacccggctatttctccttcctggacccattttctccgggcgtctggctcttcatgcttctagcctatctggccgtcagctgtgtcctcttcctggtggctcggttgacgccctacgagtggtacagcccacacccatgtgcccagggccggtgcaacctcctggtgaaccagtactccctgggcaacagcctctggtttccggtcggggggttcatgcagcagggctccaccatcgcccctcgcgccttatccacccgctgtgtcagtggcgtctggtgggcattcacgctgatcatcatctcatcctacacggccaacctggcagccttcctgaccgtgcagcgcatggatgtgcccattgagtcagtggatgacctggctgaccagaccgccattgaatatggcacaattcacggaggctccagcatgaccttcttccaaaattcccgctaccagacctaccaacgcatgtggaattacatgtattccaagcagcccagcgtgttcgtgaagagcacagaggagggaatcgccagggtgttgaattccaactacgccttcctcctggaatccaccatgaacgagtactatcggcagcgaaactgcaacctcactcagattgggggcctgctggacaccaagggctatgggattggcatgccagtcggctcggttttccgggacgagtttgatctggccattctccagctgcaggagaacaaccgcctggagatcctgaagcgcaaatggtgggaaggagggaagtgccccaaggaggaagatcacagagctaaaggcctgggaatggagaatattggtggaatctttgtggttcttatttgtggcttaatcgtggccatttttatggctatgttggagtttttatggactctcagacactcagaagcaactgaggtgtccgtctgccaggagatggtgaccgagctgcgcagcattatcctgtgtcaggacagtatccacccccgccggcggcgcgccgcagtcccgccgccccggccccccatccccgaggagcgccgaccgcggggcacggcgacgctcagcaacgggaagctgtgcggggcaggggagcccgaccagctcgcgcagagactggcgcaggaggccgccctggtggcccgcggctgcacgcacatccgcgtctgccccgagtgccgccgcttccagggcctgcgggcacggccgtcgcccgcccgcagcgaggagagcctggagtgggagaaaaccaccaacagcagcgagcccgag

SEQ ID NO: 126571 - DNA, 1257 bp, Homo sapiens
atgctgtggtcgaattcagcaatgcagacagcagcagctcaaaggtgcttcctgagtccatcctccacccccgatggaggacacagggtggtacttcggggcactgagggttgttcctctttgccagcacaaagcctgcctcaccccagggagtggcatggcccctgctgctgttctgtgtcacctgctgagaaagcagatctggctgtggcaggcctcaccattacagctgaacgggagaaggtgattgatttctctaagccattcatgactctgggaattagcattctttaccgcgttcatatgaagagccttcctttcctcttgtcagctgaactggctctaagtgcagagcgtcatacagatttgcccaatacactagtcattttcagtgcccatgattcagctgccatggtatgctccagaacagagcctgtacctcgaggctgcccaacagggtctaggcagccacgtggcatcctggcgcttcagtgtggaggccagaagaggagaggaatcctcaccaaacagtcaggtcagatagccattttccccagagacctgggaatggacaatgtaagatgcgatgcactgaacctcattgtcaaaaactgtctttacaatggagctagcctgggaatggagaatattggtggaatctttgtggttcttatttgtggcttaatcgtggccatttttatggctatgttggagtttttatggactctcagacactcagaagcaactgagtgcctaggacagaaatgtggacatattctgacacctaaaaagcttggagagttccaagttccttgtaagtttgatgcaaatgcactcagcggcagcgtggcttggctgatgtttgtggcctttatctcacacgccaggctcatgtcccaggagaagagcagtggccacgccaagccttcaggctttgacagaaatggtggcagctgcacggcccctattaatctccaggaggccaaagagaagcgttcaatactgctgaccgccatcatccacttaagcaaagtggggaccactcatcaagtttgcacagactgtgcacctgatgagattttgcctgtcagcttcttagggtcgtctttgcctgtgtttagctatttgttttcagcaaggcacagagctgcccatttcccatctggttctcacttgccctggtgctgtctcgatggagctcagtgtacttcagtggctgtgaaagcaggagcagtcaccaaaatccaggtcttctga

SEQ ID NO: 126572 - DNA, 579 bp, Homo sapiens
atggggtctggccactgtgcacagtcagacatgctggctgctacagcagggcaggcagctccagctggttatcccaatgtctgctcagcactggctgagtccagggcttttatgggcttcagggtagaggaagtgagtgctgattggcccatgggcggccacaggcaggcccagaaaaggtaccacaagttcccactccagtcggtgggagtggcagtctggcctgaagccctgcccactggagcatatcctgcccacagtgcccctgctgcccctgctggagcacctacacccatgccctgtcaatggtctgggaacaccccagcctctctatcccagccaaagctcaacagtgagagaccagaggacaaagctgctgacccagtcccagtcccacaggatgatcacactagctccccagtagtggatcctaaccagaatgaaatggctgaaatgccaggcagagaattcagaatcgggatgataaggaagcacactgagacacaagaagaggttgaaacccaacccaggcaaaacagtaaaacaacccaacagttgaaagatgacataaccatttaa

SEQ ID NO: 126573 - DNA, 3046 bp, Homo sapiens
atggccgtgacaccagtgactggagagactgtggacacccatggctgtgacaccagtgatctggagagactgtgggtcacccagggccgtgacaccagtgactgcagagactgtgggacacccatggccgtgacaccagtgactggagactgtgggacacccatggccgtgacaccagtgactggagagactcacatcctcatcagactcctcaatacaccaaagcacatcctcatcagactcaatacaccaaagcacattctcatcagacacctcaatacaccaaagcacatcctcatcagactcaatacaccaaagcacattctcatcagactcaatacaccaaagcacattctcatcagacacctcaatacaccaaagcacatcctcatcggactcaatacaccaaagcacatcctcatcagactcctcaatacaccaaagcacatcctcatcagacacctcaatacaccaaagcacaccctcatcagacacctcaatacaccaaagcacattctcatcagtcacctcaatacaccaaagcacatcctcatcagactcaatacaccaaagcacattctcatcagacacctcaatacaccaaagcacatcctcatcagactcaatacaccaaagcacatcctcatcagactcaatacaccaaagcacatcctcatcagacacctcaatacaccaaagcacattctcatcagactcctcaatacaccaaagcacatcctcatcagactcctcaatacaccaaagcacatcctcatcagactcctcaaaaccagtgtggtgtccatgggctctggagaccatcagttcaacctcgcagagatcctgtcacagaactacagtgttaggggggagtgcgaggaggcctcgaggtgcccagacaagcccaaggaggagctggagaaggacttcatctcccagaaacccacgagccgatttcaaaagcatatggaagctcaaggtaccccaaacagcccaaacaatcttgaaacaatacttcctgatttcaaaattcaccacagagccacagcaatcaaaacagtgtggtactgccataaggacagcacaaagatcaacgaactagaactgagaatccagaaatacagtcacacattcatagtcaactggatttccacaaagagaataaaaactgtgctcaaaaagacagtaacaagtgttgacaagaacgtggacaaagtggaactctcctgtgccctgccgggcctcctccacattgaagttgcatttcaccaactcgtacagcgcctggggagaggacatgttggctcttccatgggctcagcgcaggagccgacagcaagaactgtctataccatccagcgagtggcatcaggggccgtccacaccaccctcctgggcgatgtcagagccacctacacctctatccagggagtgacatcagggcccgtccacaccaccctcctgggcgatgtcagggccacctacacctctatccagggagtgacatcaggggccgtccacaccaccctcctgggcgatgtcagggccacctacacctctatccagggagtgacatcaggggccgtccacaccaccctcctgggcgatgtcagggccacctacacctctatccagggagtgacatcaggggccgtccacaccaccctcctgggcgatgtcagggccacctacacctctatccagggagtgacatcaggggccgtccacaccaccctcctgggcgatgtcagggccacctacacctctatccagggagtgacatcaggggccgtccacaccaccctcctgggcaatgtcagggccacctacacctctatccagggagtgacatcaggggccgtccacaccaccctcctgggcgatgtcagggccacctacacctctatccagggagtgacatcaggggccgtccacaccaccctcctgggcgatgtcagggccacctacacctctatccagggaggactggcatcagggcccgtccacaccaccctcctgggcgatgtcagagccacctacacctctatccagggactggcatcaggggccgtccacaccatcctcctgggcgatgtcagggccacctacacctctatccagggagtgacatcaggggtgtcccaggtatccagggcagcccaaatggcagtccccagctcgcggatcctccagttgtcaaagccgaaggccccagccaccctcttggaaagagtgggaccccgtgccaaaacccaagccacatgtgtcagaccataaccgcctccttcacttggccaaagttccacgcaaagagggatctggaaagaaggtgggagctttcccagaaatcaaaggccctgaagccttcagagacaaggcgagggccatggaatcacagagcaacgacatgccctttgatgagctgcttgcgctctatggctacgaggcgtcagaccccatttcagaccgggagagtgagggtggtgacgtggacccgaacctcccagacatgaccctggacaaagaacaaatagcgaaggatttgctttcaggggaagaagaggaagagacgcaatcatctgctgacgacctcaccccgtccgtgacctcccacgaggcctccgacctcttccctaaccggagtggatgcctcctcgctggggaggcagagtcctcgcgtggtctcctgcctcgagcacagcctgtgcccaggggagccgggcttgcagacaacagcaggggggccctcctgagggcccacgggactgtcagagtcggaacgacagccacagtcaaaccagccgacgctcctcctgagagcccacgggaccgtcggagtcggaacgacagccacaggcccacgggaccgtcagagtcggaacgacagccacagtcaaaccagccgacgctcctgctgaggggccacgggaccatcagagtcagaacgacagccacggtcaaaccagccgacgctcctgctgagagcccacgggaccgtcggagtcggaacgacagccacggtcaaagcagccgacgctcctgctga

SEQ ID NO: 126574 - DNA, 1414 bp, Homo sapiens
atggaggagacttggccttggcggatgggaagggaggtgaaccagacactgcagaactctcgctcaacgtcaggacttggctccacgcaggtgtcagacaggttcctggccaagaaagtcacactgaagcttcccagggccaaggagctcaggtatcccaggacgcagactaccaggatgtatctgggctcagaatgtgagcctctggcagtggatgggggagaggttcccagccagaccccgcagacagagtcacttggatcaggagcaaatgggaaagatgcagaggccctgacaccagccaacacctcagtctcctcccagatgactcctgcttccctggccaccctcagctcagcagggccccaggagccccagtgccatggcagcaccttccataagtggctcctgaatgttgtctattcggaattccccctggaaggccagcgctgggtctgtcctggtcaccacgtgcctggatccccatttttatgtggaagaaggctatgatgtccctttcagagaaaattcgagaagctccactcaggcgcaagctctggggctgctggccgtgagttcagtgttagtgaatccacaaggcagatccagtgagacagtggctcccaaccttttttggcaccagggcactggtttcgtggaagacaatttttccacggatgttggagtagggggcgtggtttcaggaggaaaccgttccacctcagatcatcaggcattagattctcataaggagtgtgctgcctgcctccctgggcccaaagctcagtcggacaagtgcgttcctgaccgagatcctcgctgggaggtgctggatgtcaccaagaaggtggtggccagcccccggatcatctccctggccaagcccaaagtgcgcaagggcctcaacgagggatacgacaggcgggccacgggaccgtcggagtcggaacgacagccacagtcaaagcagccgacgctcctgctgagggcccacgggaccgtcggagtcggaacgacagccacagtcaaagcagctgacgctcctcctgagggcccacgggaccgtcggagtcggaacgacagccacagtcaaaccagccgacgctttccccccctgctgaggggccacgggaccgtcggagtcggaacgacagccacagtcaaaccagccgacgctcctgctgaggggccacgggaccgtcggagtcggaacgacagccacagggccacgggaccgtcggagtcggaacgacagccacagtcaaaccagccgacgctcctgctgaggggccacgggaccgtcggagtcggaacgacagccacagtcaaaccagccgacgctcctgctgaggggccacgggaccgtcggagtcggaacgacagccacagtcaaaccagccgacgctcctgctga

SEQ ID NO: 126575 - DNA, 927 bp, Homo sapiens
atgcagccgtctgatgaggccacaacccctaggcccctcaggagctttgcagagaggaggacgtgtactccaggcgaggcctctggacctgtgttcctgtgccaaagtcctgtcaggctggtgggcaccaggaaaggcctgcaccctcttcctgctctcccaggaagccagctccctgagctcctgagccagccggaaactcttcctccagcctcccgggttgaacacccctccccattctgggaaaggaaagcagcctccagggaaatgttttctgccttcctgcttctagaaccacctcagtgttgccggaaatggaagcagcccctgtgggctttgagctggagctctggggctactcttgtggctgctggccagctcggggcatcgggttctgtctgggatgatctaaggaagcagcacccgtggtgtatctggagccgagtgctgctgatgggaggggatcctgtgtaccagctgggctggagcgggaacacggctgagctgaccctggcacagtcggctcctccagggcaatggaatggaggagtctcagctgaggagggcacggtccagggaaacaggaaaaccctccagaggagagatttggataatgcgatagaagctgtggatgaatctgcttttttggaaggtacttcgggtcgattgctcagcagtgcaggttcccggccttcatctgcatccttcagctcgcccctctccgcaggcttcagcgttgagaagaacagtcttggcacttgcatacatactcttcctgttctaccctcgctcacaccgatcttccacaacgtgtgtccgtcttccagtcaggcctggatgcagccgctgctgcttggagcagagatgaagaaagtgttctgcttaagtggcttactgcacgatgaggaccagaataaaggtctttga

SEQ ID NO: 126576 - DNA, 735 bp, Homo sapiens
cctgctcctcctcatcgcctccattgtggcagcttccaagagtgacaaccagagcggactggtagccggagcggtgaggatgttttggggagcctttaggaatgaattcttatttaaaatgctcattttcttcctgatgggggaagagaagggcttggtttctggggcattcccttcatagaattaatacctaccttgatccagccatcagctctctccaaagagccttaagcagaggcgtacagtcccagaaggtggattgtcagggctgccagcaaattcatagaccccagcagcccaggcctctctctcttacaggcactactgaaatcagggggccaggcgggttttaattcacacacccactctgatcatttgctcgttggctgcctcagcactatgcagagacagatgctggagcctcttttgggcccagtgggaaatgtactgtgatcaattagagatacatgccatgagcctgagctttgccattcctgatttttaacagtattcaggccaggaaataatactcctgtatctttcagaggcaaaaattgatccatctgatagccataaatagaagtagatggaaatatacaaaaataccggcctgtgagatatatacctacctatatatgtgtataccttacagaaggttatggctttttttttaaagaattctggaattccggcgtctgggttccggagttaaataacctattttttccgtccggg

SEQ ID NO: 126577 - DNA, 277 bp, Homo sapiens
atgcaatttaaatatcacctttgccctctgatcctcttccataaggaacttctgcactatttaatcggtaccctgctcctcctcatcgcctccattgaagcagcttccaagagttacaaccagagcggactggtagccggagcgatggccagtaacatgtggtctgagacagctttcagaagagagaatgaacagcggcccagtccagatgtggacactcagtattttaccacacgttgtgcatttaccctagcaatagtcatccaactgctgacaa

SEQ ID NO: 126578 - DNA, 2566 bp, Homo sapiens
atgttggaattatcagaccatgaatttaaaacaactatgactaatacgctaaggactctagtggaaaaagtagacaacatgcaagaacagatgggtaatgttaagcagagaggtcaaaaaccatcaaatattggcaacttcgtacaattgggcctaatatgtaaaccccaggtcaccatcacgctgtcctctttgctctatggatatccagcagatgaaagggatggttctgctttgttattttcttgttttcctgcttcttctgagggggcttcccgctggcacaatctaacaaacttcagagaggacgaagtcaccctgctgattgccttcatctgtgtgcggagctccctgtggaccaactacagcgcctacagctactttgaagtggtcaccatttgcgacttgataatgatcctcgccttttacctggtccacctcttccgcttctaccgcgtgctcacctgtatcagctggcccctgtcggaacttctgcactatttaatcggtaccctgctcctcctcatcgcctccattgtgggcagcttccaagagttaacaaccagagcgggattggtaggccggagcgacaattggtacaaaaggagcccaggaaaagaaacccggggaagaagtggatgtgggctgctgccggtgttgttcacaagcaaggaaaatggctgcaggcttcaaagcccagagattccagaagaagctactgcctcttcgtcgaccatttgatgagcctcccacaggcactcttcgtctcccagcacccgaatctcatctacaaatctttggtttcatggccaccttcctctgcatggcaagcatatggctgtcctataagatctcgtgtgtaacccagtccacagaagcagcaagcagcatacagcaggtgaacacttacagagtgcctacctgcaagagtatcctgccaactgtaactaacacaacaactctgaggggcgtgattatctcccatttggcagatattgaaaatttgctacctgcacctgctgtgttcccaccctctggagacctgggaacctggctgcagcctgggaaggctggagaagcagatggcagcacccaccagctcctctccctgtcccacctcttccctggggaaccagaccctacctgtgtggtgtattgtaatcgagcttctctccctgactaccctggaacttttcttgctaatgtcactggcaaccttcttatagctcagtctaagtgttgccggaaatggaagcagcccctgtgggctttgagctggagctctggggctactcttgtggctgctggccagctcggggcatcgggttctgtctgggatgatctaaggaagcagcacccgtggtgtatctggagccgagtgctgctgatgggaggggatcctgtgtaccagctgggctggagcgggaacacggctgagctgaccctggcacagtcggctcctccagggcaatggaatggaggagtctcagctgaggagggcacggtccagccctcagagacccttgcccctctgggcactgtggggacccagaggcagagcagagggtgtggggaacctcatagtccctggatcctgggagctttcgaggaaggctggccagagctctggggcctggggctctctgggagctgttcaacccaggggccttgtggaacccaaactgtgtacccaccacccctgctcccagagcagttacagccaggtggatccaagcaaagatgtgagaggagggaaggatgcacccatgggggaggagcagggagccaggggagccatcctggcaacctgaggccccaggaaagggtgttggcaccggtggccgcaagggcactgggagatgaggccgacggacatttgctcacatcccccaccacaaccagcccgttccctggccttgctcttggggagaaaatgaaaagaattgaaattaagagaaggcagagattgaagtgtggcatcaagattgagaggagaaaggttgaggaatatgctagccctgcaaggcctacgaccatgtcatgccagcataacctgatagctgtgatttgggccttcaactgtcaccttggcgctttcctgtggacactgccatgggacctgctcagcggccacacagtgcaacttgcaagtgctgcaggggaattcactccctgtgaggtaacactgaccaatgggacacaggaaccaaagaagaaggaggaggaggaggaagaggaagaggaagaagaagaagaagaagatagaagaaggacaaggaggagaggaggagaggagggggagggggaggaggaggagaaaagaagaaaaaagaaagaagaagaagaagaaaagtggccctacagcaaaattggccgctggatggtacatccaaacctaagaatattcctacagctttccatcccccagtcatcagacatgtggccacatttgcccccagagctgaacaaacaagacctaaagatcaagccagacagcagtaacagaagccttgccctagagccctttatttcctttgggtcaaggaactacagggtctgggactaa

SEQ ID NO: 126579 - DNA, 932 bp, Homo sapiens
tggaccaactacagcgcctacagctactttgaagtggtcaccatttgcgacttgataatgatcctcgccttttacctggtccacctcttccgcttctaccgcgtgctcacctgtatcagctggcccctgtcggaacttctgcactatttaatcggtaccctgctcctcctcatcgcctccattgtggcagcttccaagagttacaaccagagcggactggtagccggagcgatctttggtttcatggccaccttcctctgcatggcaagcatatggctgtcctataagatctcgtgtgtaacccagtccacagatgcagccgtctgatgaggccacaacccctaggcccctcaggagctttgcagagaggaggacgtgtactccagggcgaggccttctgggacctgtgttcctgtgccaaagtcctgtcaggctggtggggcaccagggaaaggcctgcaccctcttcctgctctcccaggaagccagctccctgagctcctgagccagccggaaactcttcctccagccttccggggagaacatccctcccattctgggaaaggaaagcagccctcccagggaaatgttttctgccttcctgcttctagaaccacctcaggtactgatggaacccaacttagcacagcttgaaggggtttgtgaatactcccgcctaaatccctttctacttcactcctcaggggagtgaagtgcctttaaggaacaaagccctgtcctaaatttatcttagcttgtcagtccggtcttagagataccctctttcctgaagtgaggcgtgccctgagaaaacaactatgtggtcagcctgtccccaaggagatcttgtgtctcctctccatctctgcctttgttaccagtgtgcatgtgtttgtgtgttttttaataaaatattgactcggccagttaaa

SEQ ID NO: 126580 - DNA, 1389 bp, Homo sapiens
agcggccgcggtgggccgcccactgttgctcggtcccggtacccagtcgccatccgtcgtccggcccgctgctgccgccgcgcttctacccgcgctacgtgctaccgctcgccttcggagagtacttcgcgtccgtgtcagcgcacgtcagcatctggaaggtgcccgtgtcctatgcacacaccgtcaaggccaccatgcccatctgggtggtcctcctgtcccggatcattatgaaggagaagcagagcaccaaggtatacttgtcactcatccccatcatcagcggtgtcctgctggccaccgtcaccgagttgtcttttgacatgtggggactcgtcagcgccctcgccgccacgctgtgcttctcgcttcagaacattttctccaaaaaggtatttggtcaccatcagcggacatgcatggggtttcaggggtgtgcgggcagcaaactgcatgtaatcccggaacttcctacactcgagaaaaggccagcggctgcagacatctgcaaagtcttgggcaaacgacagtctgctctccccaaaacatggtgcaagcaatgatgctggatccatcctcctgaccgaaaatagttttctttcttcttcctcgctgacgttagcgctgctgaagccttgattcgtgtttttttctctagaagagtccatcaagcttcctagcaatactttcatttcttcttcgtcactgtctggagaatcaaatgttctagcaggttctttctgtttgggggttagcaaagtcctctctttcccagcaggtgcttcaggggatatgttttcaacaggtgcttgtttcttctttagaaacctactgaccttcgcgttctgtgcattattttcggtgacaggaagttcacgggcttgattctgggaagttttgtctgtgttctgggacgcgagttcgagtgcacccccagagaggattctgtcagctctctttggaagaccagcatcggcggtcattgagtcagattccgtgtcagacaaattcctctgcagcttccgattcatgatccgggtttccagctgggccagcttcatgagtgcggcattggctcggatcctggaggcagtggtgggcggtctacatgaggcaagcctgggtccactcccgagcacagggttctctttcaggagtaagtgtttctcatctagagtttggtttctttttagaaatctgctatgaccaggtgctattttggtaagatttctactgatctggaagtttctgatttcttccattgttgaatcttccaaggaaacatcactgaagtcaccaaaaacatcacgcatgggacggctggctttccttgcagaagccattctaatcccacgccgtccattcgcagaggcagccgccacgaaa

SEQ ID NO: 126581 - DNA, 522 bp, Homo sapiens
  misc_feature (1)...(522): n = a,t,c or g
atggcactgaaagcagagaaggaagctcctgccactcctaaagccaaagccaaggctttgaaggccaagaaggcagtgttgaaaggtgtccacagccacaaaaaacagaagatctacatgtcaccaaccttccagtggcccaagacactgcgactccagaggcaacccaaagatcctcggaagagcacccccaggagaaatgagcttgaccactatgctgtcattaagtttctgctgaccactgagccggccatgaagaagatagaagacaacaacaacatgcttgtgttcattaaggacgttaaagccaacaagcaccaaatcaaacaggctgtgaagaagctctataacattgacgtggcccaattcaacaccctgattcggcctgatggagagaagaaggcgtatgttcagccatctcctgattatgatgctttggatgttgccaacaaaattgggatcatctaaactgagtccagctgcctaattctgannnnnnnnnnnnnnnnnnnnnnncaccat

SEQ ID NO: 126582 - DNA, 1170 bp, Homo sapiens; identical to SEQ ID NO: 88975

SEQ ID NO: 126583 - DNA, 512 bp, Homo sapiens
gaaccaaagtggtttcttgagatggaatctactcttggtgaagatgctgtgaacactgttgaaatgacaacaaagaattcagaagattacataaatttagttgataaagcagtggcaggttttgagaagattagctccagttttgaaagaagttctactgtgggtaaaatgctatcaaacagcatcacacattacagataaatcttttgtgaaaagaaaagtcaattgttgcagcaaactcttcattgtcatattttaagaagttgccacagccaccccaaccttgagcaaccactacccagatcaatcagcagccatcaatatcaaggctagcccctccaccagcaaaaagaccacatcttgcagaaggctcagatgaacattagcattttttagcattaaaatattttttgaattgagatatgtatatttttcagccataatggtattacacacttactagattacaatataatataaatgttttatatgccctgggaaaaaaaaaaaaa

SEQ ID NO: 126584 - DNA, 1749 bp, Homo sapiens
aaacaagcataagccatgaatcctccacttggtgtgttactttttattactacagaaagtgctgttgcttgaatatgaatatcatttagtgtaataaaatgtagaaggacacattattgtgttccagctctggttcagtctggcagtgcccagcataaaccgtcaaaacttgataaaagactgtcttggggttatcttgctgtcatgattccgatgtgttttgatttccttctggagtcataaattgcacctttggtaccatgagggaagaattgttccttcggatagaattgttcctcctcatggaattgtttcttctcatggagttgcgcttcctcagagaattttgatgagacagttcactcttttggagggtctgaataaggatggaaggtttctcatccagctctcgggcactgcaccgtggagcagctactttaacagtgttgccaaatttggagtaatccacagaatacactccttcttcctcagtcacaatggacacaaagcggtggccccattggatctcctcagcaatgtaggaggttcgtgcttgtgtggtgatgccagtagtttcaaccactccttccagaataactatgacctccaagtcttggttggccaggtcagttgctgagatgtcatacaggggactgcgcttgtcaatcacgtggcagatgatcaaaggggccaccagaaaaatgttattgctctcgattgggttatcaacaggaatgtccagttggtgaataggaaccacctccccttcaggtgtagttgttttcttgaccacctggatgcgcacagaggcactaatgatcatgcttttcctcaggtcacccactcggaacatgaagcacagcttgccatttcggacggcaatcacagcatggcggctgaaaatcaaagtttctgcccttctgtgagcctgagctgttttcatgaaaatgcagcctaacatgactgcattgatgatcaaacccacaatattctggagaatcaaaaccgtgatggccaaagggcattcctctgtcatcatcctccctccaaacccaatggtaacttgaacttcaatggagaagagaaaagcagaagtgaaagacctgacattagtcacacacacagtggactccaaaccacttttctccattccacttttctccatgtaagcatagatgtccccatgggcaaaggccaccagccaccacatgatagcgaagagcagccagctgcagaggaaggacatggtaaagatgaccagcgtgtggcgccatttcaggtccaccaaggtggtgaagatgtcctgtagaaagcgtccttgctcacggatgttcttatgcgccaggttgcaggccccgctcttggcgatgaagcgggctttggggaggcggtctcggatgcgcggcttgcgcaggttctctgcggcgatgcgcgccagcacatactcctccgggatgatactctttctggccaacatcgtcctgtcaccatagccagcttagccacctccctctcacctgcctctccgtccctggacacccgtcctcagactccgggtagcgggcgcggcggctggacctccttgcacacgccggcgggccgcgggcaggtccctcgctctcccatgctggcgcgcgggaccaggggccgcccaggccggagggacaaattgggggctgcgtgtcctaaggagaagagttaaaataataaaaggtgcaactgaatctaaacgcagggagggcctcgtgc

SEQ ID NO: 126585 - DNA, 1968 bp, Homo sapiens
atgaagcttccagagaaaggaacaggcagcattctttgctgtcctgcagcctccactggtgatacccaggcaaacagggtctggagtggacctccaccaaacttcagcagactgcagctgaggggcctgactgttaaaaggaaaactaacaaacagaaagcaaaagcatcaacatcaacaaaaaggatgtccacaaagaaaccccatctgcaggtcaccaacatcaaataccaaaggatcacaattcctcaccagcaagggaacaaaactggacggacagagaatgagtttgacgaatcgacagaagtaggcttcagaaggtgggtaataacaaactcctccgagctaaaggagcatgttcaaacaaaatgcaaggaagctaagaaccttgaaaaaagggacatggatgaagctggaaaccatcattctcagcaaactattgcagggacaaaaaaccaaacaccacatgttctcactcataagtgggagctggacgatgagaacacatggacacaggaaggggaacatcacacaccggggcctgttggggggacacgcagcccccaatttgtccctccggcctgggcggcccctggtcccgcgcgccagcatgggagagcgagggacctgcccgcggcccgccggcgtgtgcaaggaggtccagccgccgcgcccgctacccggagtctgacgatgttggccagaaagagtatcatcccggaggagtatgtgctggcgcgcatcgccgcagagaacctgcgcaagccgcgcatccgagaccgcctccccaaagcccgcttcatcgccaagagcggggcctgcaacctggcgcataagaacatccgtgagcaaggacgctttctacaggacatcttcaccaccttggtggacctgaaatggcgccacacgctggtcatctttaccatgtccttcctctgcagctggctgctcttcgctatcatgtggtggctggtggcctttgcccatggggacatctatgcttacatggagaaaagtggaatggagaaaagtggtttggagtccactgtgtgtgtgactaatgtcaggtctttcacttctgcttttctcttctccattgaagttcaagttaccattgggtttggagggaggatgatgacagaggaatgccctttggccatcacggttttgattctccagaatattgtgggtttgatcatcaatgcagtcatgttaggctgcattttcatgaaaacagctcaggctcacagaagggcagaaactttgattttcagccgccatgctgtgattgccgtccgaaatggcaagctgtgcttcatgttccgagtgggtgacctgaggaaaagcatgatcattagtgcctctgtgcgcatccaggtggtcaagaaaacaactacacctgaaggggaggtggttcctattcaccaactggacattcctgttgataacccaatcgagagcaataacatttttctggtggcccctttgatcatctgccacgtgattgacaagcgcagtcccctgtatgacatctcagcaactgacctggccaaccaagacttggaggtcatagttattctggaaggagtggttgaaactactggcatcaccacacaagcacgaacctcctacattgctgaggagatccaatggggccaccgctttgtgtccattgtgactgaggaagaaggagtgtattctgtggattactccaaatttggcaacactgttaaagtagctgctccacggtgcagtgcccgagagctggatgagaaaccttccatccttattcagaccctccaaaagagtgaactgtctcatcaaaattctctgaggaagcgcaactccatgagaagaaacaattccatgaggaggaacaattctatccgaaggaacaattcttccctcatggtaccaaaggtgcaatttatgactccagaaggaaatcaaaacacatcggaatcatga

SEQ ID NO: 126586 - DNA, 990 bp, Homo sapiens
tatacagattttagaatagagtctggcatgtaataaatgatcagtaaaaatgagctgctgttgtagtaattcttttaaactatggagtgaatatttacctttaaaaacggataccaaatttttattatgtttaccatgtaagtgtggtgttttaaagtataaacacaataaagatcttttgacagttatgaatagtattataaattaacatttttcttgtaataaagggaacatttttgtcttggtgcttgtctttgtttcctacctttttaattgctttaaattagtgttatatttttgttcacttttttatctttttttaaatagctggggctctcagtgcacataggtatttccggagataatccttccgaattatgcgtggtatcattgttgatagtgggatattcctttacacatatagttccttattgtaggaagtaaaaagaaaaaaggaaggcaattattcgggtggagttgtatttaaatttttcatgttgtttctaaagattaaacagaatgatatgtgcgataattaaatttgagttctccccctgcaggatatatgtgggaagaaaatctcttaaccaatcatctaaaggagatcatatcttacaggtgatgcttagctttgattctttgggaggatggggctctggggaggaaccttttacagtaatttaagattattccttacttttaaggccagtcattgtgactcacgcctgtaatcccagcacattgggaggccgaggtgggtgcatcacttgaggccaggagttcgagaccagcctgggcaacctggtgaaaccccacttctactaaaaatacaaaaattagccaggtgtggtggtacacacctgtaatcccagctactcgggaggctgaggcatgagaatcatttgaaccaggaggtggaggttgcagtgagccgagatcgcgccacttcactccagcctgggtgacaaagtgagactctctctctctcaa

SEQ ID NO: 126587 - DNA, 1579 bp, Homo sapiens
ttccactcaacaccatctcttcccttggcttacaaaagccctttttaattgtactgaagtcaggcaagacatagtctatcattactgtattttcttctcctttcaactttgcaatatccatgtctctataaaaatcctgagacacatagcatacatcttctttcacttgattaatcacatgtgtttcatccataacatgtagctgcctgtaagatatgatctcctttagatgattggttaagagttttcctcccacatttatccgaataattgcttcttttttctttttacttctacaataaggaactatatgtgtaaaggaatatccactatcaacaatgatacagcataattcggaaggattatctcggaaatacctatgtgcactgagagccccagcatttactcttaatactgcttgaaactggtattcttcaaatagaatttcattcattgattcttgaattgaagtgaagttaaagtatggttcagtgataataatattagtatctaaaaaatcaaccttttgaaaagggaggatgtaaaagagtccagaagggtcttttatttcatctatctggttggcagtaaaagttttaagacgtgctgtttttgaccggaactgacaattaggaataaccgacacattttcatggctgtaaccgattttggcgttgtaagctccattatccagcactaaggtcgtcatctcaccaccaaccacaccgcagccgtagttgttttccctttccgacccctctgctcgagctttttccggtactctggcttccggggcgtcgcgggggcaacggccagcgggcgggggcaagggccagcgggctaggacaactgccaacgggcttggaggggggcgttctacaaattccaggccactttgagcgccggggccggaacccgggcagaggagggcagcgacggcgatggggaggctgcagagcccggggcgggtaccgcgcgggaaccagcgcgactgcgtggctaccgcagccgtcggttcgtgttggacgggcgccgctgctgcctctgctacttcaagaacccccacgacccgctgcccctcggccacctggacatagcagaagcctgcttcagctaccagcgcgccgacgaggcggcggagcagcctgcgcacttccaggtgcgcagcgcgggagccgccacggtgcttgaggtgggaactcgcgccctccgaggggtccacctgcttcgagcacatagagggatctgggcccaggcctggagcccagtatcctttctccaggctgtgctccctgcctggctcctgtgaacctccaccttctctctcattcctcttccgcgctgcaggctcggctttctccagggcagcagggttgggctgcctttgtgccacactcccttccctagcaggacgatggttcctctcagcactgtcctttttgtttggcctcctggtgggaggtgaagccagctggacttcctgggtcgagtggggacttggagaacttttctgtctagtctttgggtccgtgccacctttaagagctgcaacactcaccgcaaaggtctgcagcttcat

SEQ ID NO: 126588 - DNA, 1794 bp, Homo sapiens
atgggtagcacttgtggctgcagcttttactccgagaaaactttgccacaaaatattaataactactgcagcatgacagagcttctgaggtattttaatattctcgttctcacataccagtctccgtcagatagtgtgactgatgctaaatttacatttcataaggctattgctgacatagatagtgagtcctgtgatggagctgggcaaagtaaatttaaaaccatctggaaaggattcaccattctagatgccattaagaacatttgtgattcacgggaggaggtcagaatattaacattaacaggagttgggaagaagttcattctaattctcatgaatgagtttgaggggttcaatacttcagtggagggagtcactgcacatgtggtagaaatagcaagagaattagaattacaagggcattctgaagatgtgactgaattgctgcaatctcatgataaaacttggatgaatgaggagttgcttcttctggacaagcaaccaaagtggtttcttgagatggaatctactcttggtgaagatgctgtgaacactgttgaaatgacaacaaagaattcagaagattacataaatttagttgataaagcagtggcaggttttgagaagattagctccagttttgaaagaagttctactgacacgcagcccccaatttgtccctccggcctgggcggcccctggtcccgcgcgccagcatgggagagcgagggacctgcccgcggcccgccggcgtgtgcaaggaggtccagccgccgcgcccgctacccggagtctctcatctttcaccaagaaacctcggcgaacctgcgactgacgcgttgccagcctccgcaagaacaactctgcccagcaagtggagctggggatgaggaaaacttcatgataagggtaaagaactcgaacccaggctctgcgacgtccccaagctgtccgggtccctggaccccgcaggaatcaaggggaaccgagagaggacggaggagaacgcgagaggccggatccacccctacagatgaagatccaaactccgaggcgtttcctcgcaagcccagtcagccagcaacttccacgtcggactccaggcgggggcgggagcgagggtcagctgcgactgcgcgcctgggaactggtggcctgatgcatccgcgatcgtcgctttcgactgacggtcccgcgctcacagtaccggaaaaagctcgagcagaggggtcggaaagggaaaacaactacggctgcggtgtggttggtggtgagatgacgaccttagtgctggataatggagcttacaacgccaaaatcggttacagccatgaaaatgtgtcggtgtattcctaattggcagttgcggtcaaaaacagcacgtgttaaaacttttactgccaaccagatagatgaaataaaagacccttctggactcttttacatcctcccttttcaaaagggctacttggtgaattggggatgttcagagacaagtttggggattaccttttttgggaaaagaaatgtatcaggttgattttttagatactaatattattattcactgaaccatactttaacttcacttcaattcaaggaatcaatgaatgaaattctatttgaaggaataccagttttcaagcagtatttaaggaggtaaatgctggggctctcagtgcacataggtatttccgagataatccttccgaattatgctgtatcattgttgatagtggatattcctttacacatatagttccttattgtagaagtaaaaagaaaaaagaa

SEQ ID NO: 126589 - DNA, 1449 bp, Homo sapiens
atggagaaaaaaatcactggatataccaccgttgatatatcccaatggcatcgtaaagaacattttgaggcatttcagtcagttgctcaatgtacctataaccagaccgttcagctggatattacggcctttttaaagaccgtaaagaaaaataagcacaagttttatccggcctttattcacattcttgcccgcctgatgaatgctcatccggagttccgtatggcaatgaaagacggtgagctggtgatatgggatagtgttcacccttgttacaccgttttccatgagcaaactgaaacgttttcatcgctctggagtgaataccacgacgatttccggcagtttctacacatatattcgcaagatgtggcgtgttacggtgaaaacctggcctatttccctaaagggtttattgagaatatgtttttcgtctcagccaatccctgggtgagtttcaccagttttgatttaaacgtggccaatatggacaacttcttcgcccccgttttcaccatgggcaaatattatacgcaaggcgacaaggtgctgatgccgctggcgattcaggttcatcatgccgtttgtgatggcttccatgtcggcagaatgcttaatgaattacaacagtactgcgatgagtggcagggcggggcgcactggcagtaccgcagtgaccaaaacaaagtccctacctccattggagcttgtatcacaggggcaataaccatggctttgctagaaaacttggtagcaggaaatgtgtacattgtcaagatatctgcatccaatgaggtgggagaaggacccttttcaaattctgtggagctggcagtacttccaaaggaaacctctgaatcaaatcagaggcccaagcgtttagattctgctgatgccaaagtaacagtgcctgaaatgcctgagtcgctgagaacaccacgggacatatggaaatcatctgcttccaagacggcacagaatggaactcaacagttacctcgtaccagtgcctccttagctagtggaaatgaggtaggaaagaacctggaaggagctgtaggaaatgaagaatctttaatgccaatgatcatgccaaacagcttcattgatgcaaaggcaccgtgtatgaaatctaacaatgcgctcatcgtcatcctcggcaccgtcaccctggatgctgtaggcataggcttggttatgccggtactgccgggcctcttgcgggatatcgtccattccgacagcatcgccagtcactatggcgtgctgctagcgctatatgcgttgatgcaatttctatgcgcacccgttctcggagcactgtccgaccgctttggccgccgcccagtcctgctcgcttcgctacttggagccactatcgactacgcgatcatggcgaccacacccgtcctgtggatctacccactagtcaattcaccatcttgttga

SEQ ID NO: 126590 - DNA, 2450 bp, Homo sapiens
cgtttttcctgctcctctgctgctgggccagacttgagctggccccagattctatgtcagaggccatgacccaggtgtcagagcaggccgtaccgctggcctcttctctgaataattatatgggggctggcatgatgttaaactttgtcagtagaaggtgctggagagacattataagagtaaggggcttttgctttccttcctgtttcggttgttcctctgaacgggtttctgcagcattcatagcctccttccaggtcctgcagtgctggcaacatcagtgccaggctctgcaatgccggcagcacccagggcatcttcctttggcactcccctcagaaggtagcaccacagcagcttctctggcatccagtgagccgcagctgtgcactcaccgtgtctccaagattttccccatgttagctccagggcttgggagaaacaaagggctttccctctacctgagttgctcagatccccagtggaaagaccccagaagaaaatatcatgtgagactcctggcttacaacaacatagacgatggctatcaggcagatcagactgtcagcactccaggatgcgtgtctgttcgtgatcgcatggtccctcctccaccaccaccccaccatctctatgcgaaggctaacacctcatcttccatcttcctgcactggaggaggcctgcattcaccgctgcacaaatcattaactacaccatccgctgtaatcctgttggcctgcagaatgcttctttggttctgtaccttcaaacatcagaaactcacatgttggttcaaggtctagaaccaaacaccaaatacgaatttgccgttcgattacatgtggatcagctttccagtccttggagccctgtagtctaccattctactcttccagaagcaccagcaggcccaccagttggagtaaaagtgacattaatagaggatgacactgccctggtttcttggaaaccccctgatggcccagaaacagttgtgacccgctatactatcttatatgcatctaggaaggcctggattgcaggagagtggcaggtcttacaccgtgaagtagataaacagcaggggatggtccataggtttagatccaaaattaaaatgtttgcagataaacatcctagcaagtgtacagaagcaatgaaaagtagctcaatgttagtgaaacaccattctatttctgcatttgaagtccagccaatttccactgaggtccacgaaggtggagttgctcgatttgcatgcaagatttcatcccaccctcctgcagtcataacatgggagttcaatcggacaactctacctatgactatggacaggataactgccctaccaacaggagtattgcagatctatgatgtcagccaaagggattctggaaattatcgttgtattgctgccactgtagcccaccgacgtaaaagtatggaggcctcgctaactgtgattccagctaaggagtcaaaatccttccacacaccaacaattatagcaggtccacagaacataacaacatctcttcatcagactgtagttttggaatgcatggccacaggaaatcccaaaccaatcatttcttggagccgccttgatcacaaatccattgatgtctttaatactcgggtacttggaaatggtaatctcatgatatctgatgtcaggctacaacatgctggagtatatgtttgtcgggccactacccctggcacacgcaactttacagttgctatggcaactttaactgtattagttaagaaggatgataggtacatatattttaagtgtgtctatatagatgctctgaatagggaaatcatggaggaagtgaacactgagcaatgccgagaaaaggcacctggagagatgtatggagatgtagacaggagctcagcatctcctccttcatttgttgaatggccagaaagtttaacaaggcctcgagctggcactgctcgatttgtgtgtcaggcagaaggaatcccctctcccaagatgtcatggttgaaaaatggaaggaagatacattcgaatggtagaattaaaatgtacaacagtaaattggtaattaaccagattattcctgaagatgatgctatttatcagtgcatggctgagaatagccaaggatctattttatctagagccagactgactgtagtgatgtcagaagacagacccagtgctccctataatgtacatgctgaaaccatgtcaagctcagccattcttttagcctgggagaggccactttataattcagacaaagtcattgcctattctgtacactacatgaaagcagaaggtccccaatcacttttaccagagattgtaaattccttgagttcagagaacatgtcttacttgtctgtgttgctaacagccagaacagtgccctgcatacaacaggcactcgataaaggtttacttgaatga

SEQ ID NO: 126591 - DNA, 3330 bp, Homo sapiens
atggcagaagtaacaggaacaaagagagggcgcacaaaagagacactgtacaccaaacatcatttggctcagcggtattcaggggagaccgaggaaaggatccatatagttctgaggtttctggcccgtaaagtagataaacagcaggggatggtccataggtttagatccaaaattaaaatgtttgcagataaacatcctagcaagtgtacagaagcaatgaaaagtagctcaatgttagtgaaacaccattctatttctgcatttgaagtccagccaatttccactgaggtccacgaaggtggagttgctcgatttgcatgcaagatttcatcccaccctcctgcagtcataacatgggagttcaatcggacaactctacctatgactatggacaggataactgccctaccaacaggagtattgcagatctatgatgtcagccaaagggattctggaaattatcgttgtattgctgccactgtagcccaccgacgtaaaagtatggaggcctcgctaactgtgattccagctaaggagtcaaaatccttccacacaccaacaattatagcaggtccacagaacataacaacatctcttcatcagactgtagttttggaatgcatggccacaggaaatcccaaaccaatcatttcttggagccgccttgatcacaaatccattgatgtctttaatactcgggtacttggaaatggtaatctcatgatatctgatgtcaggctacaacatgctggagtatatgtttgtcgggccactacccctggcacacgcaactttacagttgctatggcaactttaactgtattagaaagtttaacaaggcctcgagctggcactgctcgatttgtgtgtcaggcagaaggaatcccctctcccaagatgtcatggttgaaaaatggaaggaagatacattcgaatggtagaattaaaatgtacaacagtaaattggtaattaaccagattattcctgaagatgatgctatttatcagtgcatggctgagaatagccaaggatctattttatctagagccagactgactgtagtgatgtcagaagacagacccagtgctccctataatgtacatgctgaaaccatgtcaagctcagccattcttttagcctgggagaggccactttataattcagacaaagtcattgcctattctgtacactacatgaaagcagaaggtttaaataatgaagagtatcaagtagtcatcggaaatgacacaactcattatattattgatgacttagagcctgccagcaattatactttctacattgtagcatatatgccaatgggagccagccagatgtctgaccatgtgacacagaatactctagaggatgccaaatatcggcggggccaagtggtgctgtatcgcttgtctttccgcctaagtactgagaattcaatccaagttctggagctcccggggaccacgcatgagtaccttttggaaggcctgaaacctgacagtgtctacctggttcggattactgctgccaccagagtggggctgggagagtcatcagtatggacttcacataggacgcccaaagctacaagcgtgaaagcccctaagtctccagagttgcatttggagcctctgaactgtaccaccatttctgtgaggtggcagcaagatgtagaggacacagctgctattcagggctacaagctgtactacaaggaagaagggcagcaggagaatgggcccattttcttggataccaaggacctactctatactctcagtggcttagcgtttttcctgctcctctgctgctgggccagacttgagctggccccagattctatgtcagaggccatgacccaggtgtcagagcaggccgtaccgctggcctcttctctgaataattatatgggggaccccagaagaaaatatcatgtgagactcctggcttacaacaacatagacgatggctatcaggcagatcagactgtcagcactccaggatgcgtgtctgttcgtgatcgcatggtccctcctccaccaccaccccaccatctctatgcgaaggctaacacctcatcttccatcttcctgcactggaggaggcctgcattcaccgctgcacaaatcattaactacaccatccgctgtaatcctgttggcctgcagaatgcttctttggttctgtaccttcaaacatcagaaactcacatgttggttcaaggtctagaaccaaacaccaaatacgaatttgccgttcgattacatgtggatcagctttccagtccttggagccctgtagtctaccattctactcttccagaagcaccagcaggcccaccagttggagtaaaagtgacattaatagaggatgacactgccctggtttcttggaaaccccctgatggcccagaaacagttgtgacccgctatactatcttatatgcatctaggaaggcctggattgcaggagagtggcaggtcttacaccgtgaaggggcaataaccatggctttgctagaaaacttggtagcaggaaatgtgtacattgtcaagatatctgcatccaatgaggtgggagaaggacccttttcaaattctgtggagctggcagtacttccaaaggaaacctctgaatcaaatcagaggcccaagcgtttagattctgctgatgccaaagtttattcaggatattaccatctggaccaaaaatcaatgactggcattgctgtaggtgttggcatagccttgacctgcatcctcatctgtgttctcatcttgatataccgaagtaaagccaggaaatcatctgcttccaagacggcacagaatggaactcaacagttacctcgtaccagtgcctccttagctagtggaaatgaggtaggaaagaacctggaaggagctgtaggaaatgaagaatctttaatgccaatgatcatgccaaacagcttcattgatgcaaagggaggaactgacctgataattaatagctatggtcctataattaaaaacaactctaagaaaaagtggttttttttccaagactcaaagaagatacaagttgagcagcctcaaagaagatttactccagcggtctgcttttaccagccaggcaccactgtattaatcagtgatgaagactcccctagctccccaggtcagacaaccagcttctcaagaccctttggtgttgcagctgatacagaacattcagcaaatagtgaaggcagccatgagactggggattctgggcggttttctcatgagtccaacgatgagatacatctgtcctcagttataagtaccacaccccccaacctctga

SEQ ID NO: 126592 - DNA, 1362 bp, Homo sapiens
atgggcatggtggaaaagtggctccagcaggtggagcagatgatgctggccagtatgcgagaagtcattggacttgggattgaagcatatgtcaaggtccctcgaaatcactgggtcttacagtggcctggacaggtggttatctgtgtctcctccatcttttggacccaggaggtgtcccaagccctggcggaaaataccttactggatgggaatgattttaaggagccctaccaagagatgaagtttttcatacctcagctaatcatgatcaaacttgaagtcagtgaacccattattgtcttcaatccatcttttgatggctgctgggaattaatacgtgactctttcctggaaattattaagaactctaatgggatccccaagctgaaatacataccacttaagttctccttcactgctgctgctgctgatcggcaatgtgtgaaagcagctgagccaggagagcccagcatgcacgcggctgccactgcaatggcaggtaccagggccggtactacatttgatgaattacaatgccaagaagacatggtttgtaccaggtgtgggatgatctacatggagccccatcaactaggctggaagcccctgaaggattcctacatggacaccctgccctccagtctcaccaaggagcacaaagaattgagatactattactatctgaccaatggaattcgcaaagacatgattgcccctgaggagggtgaagtgatggttcggatttcaaagctgatttctaacacgctgctgacgagtcccttcctggagcccctgatggtggtcctcgtgcaggagaaggagaatgactattactgtagcctcatgaaaagcatcgggccgaatcttatttatttaccgctaagggtttataatctcgcgttctcggatacatccgtcgacaaagtcttcctacccttcagttccgataaagatacaaacatcttgtgtgcaattgatgacattcaaatgctacttgatgatcacgtgataaagacccagaccatgtgtggctccccattcatcaaaccaatagaagcagaatgccggaaatgggaagaaaagctaattcgcatacaagacaatttggatgcctggttgaaatgccaagccacctggctgtacctggaaccaatcttcagttcagaggacatcatagcccagatgccagaagaggggaggaaatttggcattgttgatagttactggaaatcacttatgtcccaagcgatctgtgctgatgatttgaaagccgcactaagtgcgaatttagccttgccggtcgtgcgctgcttcagcgctgccacaacaacgaaccatctatatagaaagaaagaataa

SEQ ID NO: 126593 - DNA, 675 bp, Homo sapiens
atgctgcaggcagtgcgagccctgatgatcgtaggcatcgtcctgggtgccattggcctcctggtatccatctttgccctgaaatgcatccgcattggcagcatggaggactctgccaaagccaacatgacactgacctccgggatcatgttcattgtctcaggtctttgtgcaattgctggagtgtctgtgtttgccaacatgctggtgactaacttctggatgtccacagctaacatgtacaccggcatgggtgggatggtgcagactgttcagaccagggtacctgatcagttggctgtgacccacaggaatgtgtgttcaggggcatggtcagggatggatgtggaatccaaaagtggggacagaaagaacaggcacagccaggtgcagtacacatttggtgcggctctgttcgtgggctgggtcgctggaggcctcacactaattgggggtgtgatgatgtgcatcgcctgccggggcctggcaccagaagaaaccaactacaaagccgtttcttatcatgcctcaggccacagtgttgcctacaagcctggaggcttcaaggccagcactggctttgggtccaacaccaaaaacaagaagatatacgatggaggtgcccgcacagaggacgaggtacaatcttatccttccaagcacgactatgtgtaa

SEQ ID NO: 126594 - DNA, 1284 bp, Homo sapiens
atgggacatgatggcctctcggaacctgaagtcccagcctgggagggcagccctggggtggctgtgaaggtggaggagcccaggtataaaaaggacaagcagctcaatgagaaaatctccctgctccgcagcgacatcaccaagctggaggtggacgccatcgtcaacgccggcctctgtttcctcctctgcaaaatgagggtggtgaagaaaccacccgtcaggttactgggggcactcggagctgatgcacgtgacgtgcaaatgacggtcactcagcacctggcgggaatcggggctcagcacctcgcactggtgctgaaactggtgtcatcagcgccgttctgggcatcacccctgtcccagcggtgccgagggacatgcaccggcagcccctgcctcatcctctcctgccgcctggagggcccagcagagcctggcctgtgggcaggggagatggccgggccagcgacgagtccagggctggctgtacagcagactttgcagctggaacctgttagcgacatgggcctggccctgggctccctcctcctcggggaagccaagcgcaggggcctccggaccagtgaccccagtcaaacccagagggtcttgggcggcagcgacgaaggagggcaggagcagcccaagagagaccactctaaggctgtgactaccaaccaagcctttattgagcacctactgcatgccaggccctgttcagatggggaacatgcagcaaatgggaccgagagccccctgccctgtggagctcacgtgctgcctgccggcagctcccctgtgctccggaagcactggacacagccccagcacctgctgcaggaattaatgaaacgaatgaatgactgttacagactacatgggagcgacagcaaacccaggtctggggaagttcctggaggggagggtttctcagctgggacctggaggacggtcggagtcagccaaggaaatggaggagagggtgctcctgacagagagggcttatttttcacttacactgagaagtctacactgccagtggctggcaaggtgccccagatggcacctgaggggagccagctggcatacccgggcatcgcagaggacagaatgactctcgccatcccagggtgtctaagcacattgtcacctctgactctgggcatctaccagtccaaggagcaacactccttccccctacaccctgagggggtcccgggggtctgcgtccagctgacggaattagctgatggactggatgcgggctgtgaaagaggatga

SEQ ID NO: 126595 - DNA, 402 bp, Homo sapiens
atgtggccgagaggaaaaggtgtcaggtctcagggatgctgggagctccggctctgcctggctggcttcattatagaccaggcagaaacacaagagcacccgtccacagcccgcagagaaaacctcaggaaattctacaagggcaagaagtaccagcccgtggacctgcagcctaagaagacatgcgccatgagccactgtctcaacaagcacgaggagaacctgaagggcaagaagcagcagtggaaggagtggctgtccccgctgaggaaggaggaaggagcgcctgtccctgctgaggaagggctgcccggctgtcctggcatccagcccagaaaagctgcgctccctgggaacggcttggagcagatgagcgcttacagcattgcaccatcctggtaa

SEQ ID NO: 126596 - DNA, 402 bp, Homo sapiens; identical to SEQ ID NO: 126595

SEQ ID NO: 126597 - DNA, 573 bp, Homo sapiens
tttttttcagaatacatttctttcttaatctttgtgagtacataccaccatactggtggcaatggcggtgagagcctctgtggaccagggaagctgtggtgtgagttccatgctagctctataagccaggctctggggcagcatccaagacgctctgtattagatactgaccagtctcatgtgccactggtgaggaggaagacaacgtgcttttcccaaagggcgatgatctccccagatgatgacccttctcaggaggcaggagcgctttcccggaataaccttttggctccttattcagctctgactttcatggagaatggcaactgtcttctccagctttttcagctgggcaagctcctggttcaggcaagccacctgcatggtcagctgttggtttttgtgcagaagatcatcataagtatgtgactgttgcccactcacaattgagatggcagcaccttcctccaactgttgaattttttctgacaaaatgaggttttcctccagcactctgaccagtttttgcttcaaactttccgagaaacttcttgttgaggaggagggagccgg

SEQ ID NO: 126598 - DNA, 1480 bp, Homo sapiens
atggcggagcaatgggagctggacgaggaaggcattcgccgcctgggggcgctgacgctggagcagccggaactggtggagtctctttcattgcagggatcttatgctggcaaaatccattccattggtgatgccttcagaaattttaaaaatctccgatccttagatttatcaaggaatttgatcactagccttaagggaatccagtatttatgttcactccaagacctgaatttatattataacaacattccttcattagtggaagtgtcccgtctacaaccgttacccttcctcaaagaactggatttgagacttaatcctgttgtaaggaaagatacagattataggctctttgctgtatatacactacaaactctggagaaattagatgaccgaactgtacgtgaaggtgagagaaaagctgccaagctgcattttagtcagttgggcaacagtgaaaattttcttttagaggtggaaaaaagctctagggagaagacaatgaaaaactgtgtaacagatctgtatgccacaacccatttcaacagtgaccctgctgtacttgtcaatgtagagcaacaattatctaccagcctggatgatttaacaccagcacatggttctgtcccaaacaacgctgtcctgggaaacaggacaactcctctgcggacactgctgttgtctcctgggacttcagaacacagaaagatttttaccaagaggtcactaagcccatcgaagagaggattcaaatggaaggacaatatccttgccaacctgaatctaaagcatggtttccaagatgctaacaggcagcgaggcaagtgttggcttgtttgtgtttgtgcgagaaacaggtcaggaaagtttgaagcaaaaactggtcagagtgctggaggaaaacctcattttgtcagaaaaaattcaacagttggaggaaggtgctgccatctcaattgtgagtgggcaacagtcacatacttatgatgatcttctgcacaaaaaccaacagctgacccatgcaggtggcttgcctgaacccaggagcttgccccagctgaaaaagctggagaagacagttgccattctccatgaaagtcagagatcccctggtggtaacataatgagtattctgctgcagcagcttgaataaggagccaaaaggttattccgggaaagcgctcctgccatcctgagaagggtcatcatctggggagatcatcgccctttgggaaaagcacgttgtcttcctcctcaccagtggcacatgagactggtcagtatctaatacagagcgtcttggatgctgccccagagcctggcttatagagctagcatggaactccccccccagcttccctggtccacaaaggctctccccgccattgcccccagtatggtggtatgtactcccaaagattaaaaaagaaatgtattttgattaaaaaaaaaaaaaaaaaaaaaaaaaaaaaaaaaa

SEQ ID NO: 126599 - DNA, 463 bp, Homo sapiens
ctctcttccatccttgccaagacagccagcaacatcattgatgtgtctgctgcagactcacagggcatggagcagcatgagtacatggaccgtgccaggcagtacagacatacagggcatcacactgaaaaggagctgtgatctgagggtcaggagtgtgggcctgggtaccagcactgccactgacttgcctctctctcagccttagttgccccttcactgaagacctttccagctttggtgatctacgattctatcacagcaagcaacaggaagacagagcatcatgctaggcacataagaagcttttaaaatactggttaaattgagatcaccacaccaggggaatagtgtccaagtcatgctccagctcctttcccctcttagggatcttggaatagaaaaggccaaacattgttaaaatcttaaaacttgaatctgaatatacacagaaaaaaaaaaa

SEQ ID NO: 126600 - DNA, 1443 bp, Homo sapiens
  misc_feature (1)...(1443): n = a,t,c or g
ctgcctcagattcaggtctgttcagctttgacagtgttcccatcatcactggacaagggacaagaacagtctcatccagtctgaggttagcccaagccaggtctcagctaagagctgacaccctaaacccttgtctcttgggttcatcttcaatatccctggaagatgtccccttccccccatcttactctcatagacctaagtaatcaaaagtagaatgggtagaacagaggggccagaaccagcacatggatgaatatacttccctttatcagagggtgacaaaccaaaacacaaaaagaccaaacatgtaaaaacccagggttctagaaatacaaactcaattcattcaaattcaaggctcatccagaccctggtcacaaaccatagtgaggtgcatcgtcgagcaccaagtcagggagagggggcaggagtgactctgaggccaacagagagggtgggaagggggatctccctaggtcccctgggtgatcaccccccacccaaactgggtatcttccacattctcaaatgactatggaatacataccaaggctcttgtccttttgggcccccaccccatccctggggccaggagctttcaaagggccagttccccaaaaggtttttacccttcactttgctcaggcttctaagccttcctcttcttcctccttcttcacattttctcctgtgattagtaagcaggttagggtactgtataagccgcaagtgaaggctggggggccaagggggtggggtagagatgggatgaagagaggagaagagcctgtccaaggacccccnctcttcatgggatccccaaactttacaaccagctcctcttttgcgtccaccacggatctgaaaaaanttgcaactgtaggcataaccaggctatccttgaagacctgctgcaaaaatcagagaacgggaatgggctcaactggccagcacttggtggggctggctggtaaagagacggcagcggtggcaagcttcttccaaatgggtcaaggctgctgctcaagcaacacccaaagcgggtgctgtactgcctggcacggtccaatgtactcatgctgctccatgcccctgtgagtctgcaagcagacacatcaatgatgttgctggctgtcttggcaaggatggaagaagagcagggcctgctcatcagtgcgagcggaaggcaggctgtggtagttgggctcggctccattgagagctttggtaggggggggctgactagggtccagacagacagcttccgctcctctgcggtcctggtccgagtcctcgttcctcgctgctgtagcagcaccccatggccgggctcgggccggccgctcaggccgcgccgaggagggacggcgtccgtgaggagcccttccggtcacatgacccgcggcggcctcccgcaggcaaccacccgcccccaccccc

SEQ ID NO: 126601 - DNA, 426 bp, Homo sapiens
cttcacttcctgaaagtcccgcagtcttcgaatgtctttgtcctttctgagcagtgtgtttggtagctttctgatcttctccactcgttctggtttaatccccagttcacagcaactcacgtttagtaggttttggtaactcagttcttgtctcttcagttcaatttcaatgaagtcattttctttggggttctgaattctgactttaaacacaagctctagacaggtgtcactgggtttcttgttatcacttgggtccgttgttggcaagtgtggatttgtgccttcttgtttatattcacctgctggcttctccccgatgtcctgttccggttcagccatgagtcacctctagtccgtcagatgtgcagcccctctcgcatttatgcacaagctcccaaccaaataaaaagcactttctacagc

SEQ ID NO: 126602 - DNA, 1278 bp, Homo sapiens
atggaaaccgtgttgtttacgtttcacagatttgccggggataaaggctacttaatgaaggagggcctgaaagtactcatgggaaaggagttccttggatttttggagaatcaaaaagaccctctggctgcagacataacaatgaaggacatggaccagtgccaagacagcacactgaacttccagaacttgttttcactcactgcggggctcaccactgtggacaacaactattttgtagtacctatgaagcagaagggaacgaagcaggcagaactaagcaattactcagcccttatagacacacaacacacttccggatccagtggtggggtgcagatagggcaagcacaggacaacatcctcttcagagaagggaagaacagaagatgcaaagcaggctctgatgacagcgatgatgccatttggccagagagacggcgcgagagccccagtgggaaccacccggagacccagaagatcgaattcgccactgcgctgcgcggccgccacactcgccgggatcggccgggtttgaagacgcgccatggaagccagaggggtctgacgatggggacctctcggagcgtcgtcgccctgctactgcgccttggcggccgcgctccatctggaggcttcctcgtgacgcatacgcagcctggccgccaagaagaccgtcgcctgcctgggacagccaccctggacacccagaagccaggagatttccaaaagacacaccagcatgctgggaagacagcatcggcctggcagccaggtgacccaggtccagtgccaggcctgtgcctggctggccacgtgactagtggtgaatataaacaagaaggcacaaatccacacttgccaacaacggacccaagtgataacaagaaacccagtgacacctgtctaggtattttgtttcctttacaaactgtatttgaatttatgggtgatttagagcttgtgtttaaagtcagaattcagaaccccaaagaaaatgacttcattgaaattgaactgaagagacaagaactgagttaccaaaacctactaaacgtgagttgctgtgaactggggattaaaccagaacgagtggagaagatcagaaagctaccaaacacactgctcagaaaggacaaagacattcgaagactgcgggactttcaggaagtggaactcattttaatgaaaaatggaagctccagattgacagaatatgtgccatctctgacagaaaggccctgctatgatagcaaagctgcaaaaatgacttattaa

SEQ ID NO: 126603 - DNA, 777 bp, Homo sapiens
atggtggtggtggtgatgatggtggtggtggtggtggcagcaatgatggtggtggcagcgacatccagcatccaccatgggcaatatcggagctcctatcagccggaatcaggttttgtggccttcagtgaagaaccgtcactgacgcgctctgtgcatggccttgggcttctccggagctcattcttgcttcgggcgttcaccctctatagagctcagacacagcccatcagctctgagctgcagaaaagccaaggcaaccctggcagggtctgcgtttacttctttcacttgcttctgctcggggtggaggagtgggactggggaggccagcggagccttccaattcctccccagggcagagggggaatggaagtcctggcggtggagctggagctccgcatcctcctggccctgctcagtggctgtgatgctgggccccaaaccaccctattgaggtctgacgggggagaggagagcagccagtctggacgatgggtggccgacaggaggcaaaagcaagaggggaagctggctgaaatttctgtatttccactcagtttctccaacaaaacctgctggttgaagctgaattatccggggactgtggacgctggcagtgaattgtgtctggcggaaagcactcaggctcttgaatctaacaggccaggttggggctggcagccctccactactttctgttccttcgtcaacgttgactcttgccttggacagaccgagctgctgactggccccttctctccactctctggctag

SEQ ID NO: 126604 - DNA, 3507 bp, Homo sapiens
atggttggatactttcgcctttggatacctggttttgccatcctaacaaaaccattatataaactcacaaaaggaaacttagctgaccccatagatcctaaatcctttccccactcctctttctgttccttgaagacagctttagaaactgcccccactctagctctccctgactcatcccaacctgcttcattacacacagccgaagtgcagggctgtgcagtcggaattcttacacaaggaccaggatcgcgtcctgtagcctttttgtccaaacaacttgatcttactgttttaggctggccatcatgtctccgtgcagccgctgctgctgccctaatacttttagaggccctcaaaatcacaaactatgctcaactcactctctacagctctcataatttccaaaatctattttcttcctcacacctgacacatatactttctgctcccggactccttcagctatacttacactttgttgagtctcccacaattaccattgttcctggcccggacttcaatccggcctcccacattattccggataccacacctgaccctcatgactgcatctctctgatccacctgacattcaccccatttccccacatttccttcttccctgtttctcaccctgatcacacttggtttattgatggcagttccaccaggcctaatcgccactcaccagcgaaggcaggctatgctatagtatcttccacatctatcattgaggctactgctctgcctccctccactacctctcagcaagctgaactagttgccttaactcaagccctcactcttgcaaaaggactatgcgtcaatatctatactgattctaaatatgccttccatatcctgcaccaccatgcagtcatatgggctgaaagaggtttcctcactacacaagggtcctccatcattaatgcctctttaataaaaactctgctcaaagccgctttacttccaaaagaagctggggtcattcactgcaaggggcatcaaaaggcatcagatcccattgctctaggcaatgcttatgttgataaagtggctagacaagcagctagctctccaacttctgtccctcacggccagtttttctccttcacttcagtcactcccacctactcccccactgaaacttccacctatcaatctcttcccacacaaggcaaatggttcttagaccaaggaaaatatcttcttccagcctcacaggcccattctattctgtcatcatttcataacctcttctatgtagacataattcctcggtttggccttcccacctctatacagtctgataacggaccagcctttactagccaaatcacccaagtagtttctcaggctcttggtattcagtggaaccttcataccccttaccgtcctcaatcttcaggaaaggtggaacggactaatggtcttttaaaggcacacctcaccaagtttagcctccaacttacaaaggattggacagcacttttacctcttgctcttctcaaaatcagagcctgtcctcgagatgctacaggatacagtccatttgaacttttatatggacgcactttcttgcttggccccaacctcatcccagacaccagccctctaggcgactatcttccagtactccagcaggctagacaggaaattcgccaggctgctaatcttctcttgcctactccagatccccagccatatgaagacaacctagctggacgatcagttcttgttaagaatctgacccctcaaactctacaacctcgatggaccggaccctacttagtcatctatagtaccccgactgccgtctgcctgcagaatcctccccactgggttcaccattccagaataaagctgtgtccatcggacagccagcctaatccctcctcttcctcctggaagtcgcaagtactctcccccacttcccttaaactcactcatatttctgaagaacatgcctacacagctgtccccgccttacagacagactgggcaacatctcccatctccctacacctccgaacttcctttaacagccctcacctttaccctcctgaagaactcatttactttctagacaggtccagcaagacttccccagacatttcacatcagcaagctgccgccctccttcgcacttatttaaaaaacctttctccttatatcaactctactccccccatatttggacctctcacaacacaaactactattcctgtggccgctcctttgtgtatctcttggcaaagacccactggaattcccctaggtaatctttcaccttctcgatgttcctttactcttcatctccgaagtccaactacaaacatcaatgaaacaattggagccttccagctccatattacagacaagccctctatcaatactgacaaacttaaaaacattagcagtaattattgcttaggaagacacttgccctgtatttcactccatccttggctatcttccccttgctcatcagactctcctcccaggccctcttcttgtttacttatacccagccccgaaaataacagtgaaagattgctcgtagatactcgacgttttctcatacaccatgaaaatcgaaccttcccctctacgcagttaccccatcagtccccattacaacctctgacagctgccgccctagctggatccctaggagtctgggtacaagacacccctttcagcactccttctcacctttttactttacatctccagttttgcctcgcacaaggtctcttcttcctctgtggatcctctacctacatgtgcctacctgccaattggacaggcacatgtacactagtcttccttacccccaaaattcaatttgcaaatgggaccgaagagctccctgttcccctcatgacaccgacacaacaaaaaagagttattccactaattcccttgatggtcggtttaggactttctgcctccactgttgctctcggtactggaatagcaggcatttcaacgtctgtcatgaccttccgtagcctgtctaatgacttctctgctagcatcacagacatatcacaaactttatcagtcctccaggcccaagttgactctttagctgcagttgtcctccaaggacaactccgaggccttgacttactcactgctgaaaaaggaggactctgtatattcttaaatgaagagtgttgtttttacctaaatcaatctggcctagtgtatgacaacataaaaaaactcaaggatagagcccaaaaacttgccaaccaagcaagtaattatgctgaatccccttgggcactctctaattggatgtcctgggtcctcccaattgttagtcctttaatacccatttttctccttcttttatttggaccttgtatcttccgtttagtttctcaattcatccaaaaccgtatccaggccatcaccaatcattctatacgacaaatgtttcttctaacatccccacaatatcaccccttaccacaagacctcccttcagcttaa

SEQ ID NO: 126605 - DNA, 741 bp, Homo sapiens
tcaatttgcaaataggaccgaagagctccctgttcccctcatgacaccaacacgacaaaaaagagttattccactaattcccttgcttgttggtttaggactttctgcctccactattgctctcggtactggaataggaggcatttcaacctctgtcacgaccttccatagcctctctagtgtcttctctgctagcatcacagacatatcacaaactttatcagtcctccaggcccaagttgactctttagctgcagttatcctccaaaaccaccgaggccttgacttactcactgctgtctggtctgcagatctcgaagcacaaaggtccttattacttatatttcttcttgtgccattattcacttgtagatctccagtgtcctcatactgagtggcatttgaacaacttcctttttggcattttagcaatactccctgagaaaccaacaggatcaaggagatcaaagtcaaagtgagaataccattcacggttccagatattcccagtaagattttataccagtgcaacgtcactgaataatctttaaatgtaagttgagatgtttgggcagaactccttttctttgactgtacattcaatgtcatgtatctttcttcatcttgcatcttcaatgtgagtgaatgtgtgtgtacacaggtatgttttgttttattaagtataacttaaaaaaaggaaagaataataaatctgctgctaatcagagcgcacgcgtgggt

SEQ ID NO: 126606 - DNA, 885 bp, Homo sapiens
atggagacagaaactggagttatgcagccacaatctaaggaagacctggaaccaccagaaactgcaagagtcaaggaagggttctcccatagagcctctggaaagaacctggccttggccaaccttgattccagacttctggccttcagaatgctgcttatgctgcagttctctcaaccactgtggagggatctaaaaccagctgtaaccagtcagggaaccaagaaatgtagcaggacgagctgcagacaaaatccctcagacaccaagatagtgaagggagtggctttaatcagctggaagcatcggcagactagcgtcttaaaatccaggcttctcagggaccagtgtaagcctcttccccctgggaccagcaccgagttagcacttacccgagccttagaactgggaaaaggaaaaagaacaaatgtgtatacagatagcaagtgtgcttacctaatcctacatgcccatgctgcaatatggaaagaaagggcattcctaacatctgggggaacctccattaaatatcacaaggaaaccatggagttattgcatgcagtgcaaaaacccaaggagttggcagtcttatgctgccaaagccatcaaaaggggaaggagaggggagaacagcagcacaagcagctggcagaggcaaaggaaagaccagccagaaaggaaagagaaagagacagaaagagagaaagaaaaagaaagagagacaaagtcaaagacagaagaaggtaccttcttttgctggtgctctctcgtgtttttgtgtttctgtgtttcttcattcgtttcttcggttcgtctctgctttgtactgctttttctctctgctctcgttctgtcctgcgtcttcgtccctcattctgttcttag

SEQ ID NO: 126607 - DNA, 464 bp, Homo sapiens
aattacaagaagtaaaggcaaggcgtaacacactgcataattagaaggaccatcttgtaaatgattatgagcaaaacatgaaactgttacaaaccaaatatgatgctgatataaaccttctaaaacaagaacatgctctttcagcttctaaggcatctagtatgattgaagaattagagcagaatgtctgtcaattaaaacagcagttacaggaatcagaacttcaaagaaagcaacaactaagggatcaagaaaataagtttcagatggagaaaagtcatctaaaacacatctatgaaaaaaaggctcatgacttgcagagtgaacttgataaaggaaaagaagatactcaaaagaaaattcataaatttgaggaagctttgaaatggaaaaagtggaggcagatctaactagatccaaatctcttcgtgagaaacaatcaaaggagtttttatggcaactgg

SEQ ID NO: 126608 - DNA, 1038 bp, Homo sapiens
cgacccacgcgtccggaaagaaagaataatgaaatagaagaactgaaaactttatacaggagtaaacaacatgaaactgaagagactattagaaagcttgaaaagaaagttcagacactgatacgtgactgtcaagttatcagagagactaaagaagaccagattgcagagctgaaaaagatatgtgaacaaagtacggaatctctaaataatgactgggaaaaaaagcttcacaatgctgtagcagaaatggaacaggaaaagtttgatcttcaaaagcaacacactgaaaacattcaagaattgcttgaggatacaaatgtgcgtctgaataaaatggagagtgaatacatggcgcaaacacagtccacaaaccacatgatcaaagaactggaggcccgtgtccagcagctgactggagaagcagagaacagtaatttacagaggcagaaattaattcaagaaaaagcagaacttgaaagatgttaccagataacgtgtagtgaattacaagaagtaaaggcaaggcgtaacacactgcataaagagaaggaccatcttgtaaatgattatgagcaaaacatgaaactgttacaaaccaaatatgatgctgatataaaccttctaaaacaagaacatgctctttcagcttctaaggcatctagtatgattgaagaattagagcagaatgtctgtcaattaaaacagcagttacaggaatcagaacttcaaagaaagcaacaactaaggaaaaagatcaaggtggacaaccagcttctccaacatattgggttccctggcagaggacctgtctctgccttaagccacaggaaacattgtgagttcctgaagggagaaatattcctgaggatagccagagacaaagggagagcatctgtgcttctctttgtgcatctgccccgctttcctcttggcatcaacacaactactcgacactttagcttgcgtatggcccgtagtggctgcctagtcaaccttcctcatagaaacgttccaggttttcagcttctgcattga

SEQ ID NO: 126609 - DNA, 498 bp, Homo sapiens
aggtgagcatcacaaacatcttagtcttcacagccgactgcttatcaccgacatcattctcttggtctcgagggacttcaacctgatgtgagtcatcctcctccttggcatgagtgatcctggaggacaaggtcgaatgggaagatgcgtacagcagggccgcccgggcatactcatcccgctcacggcctcgctcccactctgtcatgctggggtccagacagcgttccagagcatctttctgaccctgtttcatgtgtactaagaactcgtcgtatcgcttttgcttttccggatctttggcgaaaggcttgaagttgctggcttttaaggtggccgtcccaccacctaatgccatgttccaagagcagtgcccagcagccgctgcaggggagggctgggctctgctgctctgagcgttctgggccagactcatggccgtgagctgagctgctttcaggtcagttgcctgcttcatttctttgattctctctttgg

SEQ ID NO: 126610 - DNA, 1086 bp, Homo sapiens; identical to SEQ ID NO: 122597

SEQ ID NO: 126611 - DNA, 1122 bp, Homo sapiens; identical to SEQ ID NO: 122595

SEQ ID NO: 126612 - DNA, 454 bp, Homo sapiens
  misc_feature (1)...(454): n = a,t,c or g
tacgtctgcaagnccggnggaannnnctcctgcacctggtgagggaatgcaggatatgcgccttcctgctgcgtttataagtgtttcgggcagngggccaagcagctgagggtcatcagggaggaccagctcctgtgctacaaaagctccaaggatcggcagccacatctgaggttggcactggatacctgcagcatcatctacgtgcccaaggacagccggcacaagaggcacgagctgcgtttcacccagggggctaccgaggtcttggtgctggcactgcagagccgagagcaggccgaggagtggctgaaggtcatccgagaagtgagcaagccagttgggggagctgagggagtggaggtccccagatccccagtcctcctgtgcaagttggacctggacaaggcaaagggaagaagagcagcctggcagaactgaagggctcaatgag

SEQ ID NO: 126613 - DNA, 453 bp, Homo sapiens
atgagcagctcctatgagtcctacgatgaagaggaggaggaagggaagagcccgcagccccgacaccagtggccctcagaggaggcctccatgcacctggtgagggaatgcaggatatgtgccttcctgctgcggaaaaagcgtttcgggcagtgggccaagcagctgacggtcatcagggaggaccagctcctgtgttacaaaagctccaaggatcggcagccacatctgaggttggcactggatacctgcagcatcatctacgtgcccaaggacagccggcacaagaggcacgagctgcgtttcacccagggggctaccgaggtcttggtgctggcactgcagagccgagagcaggccgaggagtggctgaagcagacctcatccttgcaccgcctctacttcactctgacaccatcctttcctcctctgatcttcctgctggaacaatga

SEQ ID NO: 126614 - DNA, 474 bp, Homo sapiens
ttcacccagggggctaccgaggtcttggtgctggcactgcagagccgagagcaggccgaggagtggctgaaggtcatccgagaagtgagcaagccagttgggggagctgagggagtggaggtccccagatccccagtcctcctgtgcaagttggacctggacaagaggctgtcccaagagaagcagacctcagattctgacagcgtgggtgtgggtgacaactgttctacccttggccgccgggagacctgtgatcacggcaaagggaagaagagcagcctggcagaactgaagggctcaatgagcagggctgcgggccgcaagatcacccgtatcattggcttctccaagaagaagacactggccgatgacctgcagacgtcctccaccgaggaggaggttccctgctgtgaggccctgacactcaacgaaaggaaaagccagctgaccactgtatttctatgctccctgtga

SEQ ID NO: 126615 - DNA, 1410 bp, Homo sapiens; identical to SEQ ID NO: 118421

SEQ ID NO: 126616 - DNA, 846 bp, Homo sapiens
atggggaaaaaacagagcagaaaaactggaaactctaaaaagcagagcacctctcctcctccaaaggaacgcagttcctcaccagcaacggaacaaagctggacggacaatgactttgacaaactgagagaagaatggttcagacgatcaaattactctgagctacaggacgatattcaaaccaaagtcaaagaagttgaaaactttgaaaaaaatttagaagaatgtatagctagaataaccaatacagagaagtgcttaaaggagctgatggagctgaaaaccaggctcaagaactacgtgaagaatgcagaagcctcaggaaccaatgcaatcaactggaagaaaggaactagaaaagcaagagcaaacacattcagagctagcagaaggcaagaaataactaagatcagagcagaactgaaggaaatggagacacaaaaaacccttcaaaaaattaatgaatccaggagctggttttttgaaaagatcgacaaaattgatagaccgctagcaagactaataaagaaaaaaagagagaagaatcaaatagacacaataaaaaatgataaaggggatatcaccaccgatccaaaagaaatacaaactaccatcagagaattctacaaacacctctatgcaaataaactagaaaatctagaagaaatggataaattccttgacacatacactctcccaagactaaaccaggaagaagttgaatctctgaatagagcaataacaggagctgaaattgtggcagtaatcaatagcttaccaaccaaaaagagtccaggaccagatggattcacagccgaattctaccagaggtacaaggaggaactg

SEQ ID NO: 126617 - DNA, 1281 bp, Homo sapiens
aataaccaatacagagaaccaatacagaaccaatacatctgcttaaaggagcagatggagctgaaagccaagactcgagaattacgtgaagaatgcagaagcctcaggagccgatgcaatcaactggaagaaagggtatcagcgatggaagatgaaatgaatgaaatgaagcgagaagggaagtttagagaaaaaagaataaaaagaaatgaacaaagcctccaagaaatatgggactatgtgaaaagaccaaatctacgtctgattggtgtacctgaaagtgatggggagaatggaaccaagttggaaaacactctgcaggatattatccaggagaacttccccaatctagcaaggcaggccaacgttcagattcaggaaatacagagaacaccacaaagatactcctcgagaagagcacctccaagacacataattgtcagattcaccaaagttgaaatgaaggaaaaaatgttaagggcagccagagagaaagcactaaatgcccacaagagaaagcaggaaagatccaaaattgacaccctaacatcacaattaaaagaactagaaaagcaagagcaaacacattcaaaagctagcagaaggcaagaaataactaaaatcagagcagaactgaaggaaatagagacacaaaaaacccttcaaaacattaatgaatccaggagctggttttttgaaagaatcaacaaaattgatagaccgctagcaagactaataaagaaaaaaagagagaatcaaatagacgcaataaaaaatgataaaggggatatcaccaccgatcccacagaaatacaaactaccatcagagaatactacaagcacctctacgcaattaaactagaaaatctagaagaaatggataaattcctcgacacatacactctcccaagactaaaccaggaagaagttgaatctctgaatagaccaataacaggagctgaaattgtggcaataatcaatagcttaccaaccaaaaagagtccaggaccagatggattcacagccgaattctaccagaggtacaaggatgaactgataccattccttctgaaactattccaatcaatagaaaaagagggaatcctccctaactcattttatgaggccagcatcatcctgataccaaagccgggcagagacacaaccaaaaaagagaattttagaccaatatccctgatgaacatcgatgcaaaaatcctcaataaaatactggcaaacggaatccagcagcacatcaaaaagcttatccaccatgatcaa

SEQ ID NO: 126618 - DNA, 316 bp, Homo sapiens
atggataaattcctcgacacatacaccctcccaagactaaaccaggaagaagttgaatctctgaatagaccaataacaggctctgaaattgtggcaataatcaatagcttaccaaccaaaaagagtccaggaccagatggattcacagccgaattctaccagaggaatccaacttacaagggatgtgaaggacctcttcaagcagaactacaaaccactgttcaaggaaataaaagaggatacaaacaaatggaagaacattccatgctcatgggtaggaagaatcaatatcgtgaaaatggccatactgcccaag

SEQ ID NO: 126619 - DNA, 2265 bp, Homo sapiens; identical to SEQ ID NO: 116371

SEQ ID NO: 126620 - DNA, 2745 bp, Homo sapiens; identical to SEQ ID NO: 119717

SEQ ID NO: 126621 - DNA, 1275 bp, Homo sapiens
atggataaattcctcgacacatacactctcccaagactaaaccaggaagaagttgaatctctgaatagaccaataacaggagctgaaattgtggcaataatcaatagcttaccaaccaaaaagagtccaggaccagatggattcacagccaaattctaccacagacaaacaaagagccaaatcatgagtgaactcccatttacaattgcttcaaagagaataaaatacctaggaatccaacttacaagggatgtgaaggacctcttcaaggagaactacaaaccactgctcaaggaaataaaaaagtatacaaacaaatggaagaacagtccatgctcatgggtaggaagaatcaatatcatgaaaatggccatagtgcccaaggtaatttacagattcaatgccatccccatcaagctaccaatgactttcttcacagaattggaaaaagctactttaaagttcatatggaaccaaaaaagagcccacatcaccaagtcaatcctaagccaaaagaacaaagctggaggcatcacactacctgatttcaaactatactacaaggctacaggaaccaaaacagcatggtactggtaccaaaacagagatatagaccaatggaacagaacagagccctcagaaataatgccgcatatctacaactatctgatctttgacaaacctgagaaaaacaagcagtggggaaaggattccctatttaataaatggtgctgggaaaactggctagccatatgtagaaagctaaaactggatccattccttacaccttatacaaaaatcaatgcaagatggattaaagacttaaacattagacctaaaaccatcaaaaccctagaagaaaacctaggcattaccattcaggacataggcatgggcaaggacttcatgtctaaaacaccaaaagcaatggcaacaaaagacaaaattgacaaatgggatctaattaaactaaagagcttctgcacagcaaaagagattaccatcagagtgaacaggcaacctacaaactgggagaaaattttcacaacctactcatctgacaaagggctaatatccagaatctacaatgaactcaaaccaatttacaagaaaaaaccaaacaaccccatcaaaaagtgggcgaaggacatgaagagacacttctcaaaagaagacatttatgcagccaaaaaacgtgaaaaaatgctcaccatcactggccatcagagaaatgcaaatcaaaaccacaatgagataccatctcacaccagttag

SEQ ID NO: 126622 - DNA, 2133 bp, Homo sapiens
atggcaaagaagttaaaaactgtgaaaaaaaatcaagacgaatggataactagaacaaccaatgcagagaagtccttaaaagacctgatggagctgaaaaccaaggcacgagaactacgtgacgaatgcagaagcctcagtagccgatgcgatcaactggaagaaagggtatcagtgatggaagatgaaatgaatgaaaggaagcgagaagagaagtttagagaaaaaagaacaaaaagaaatgaacaaagcctccaagaaatatgggactacgtgaaaagaccaaatctatgtctgattggtgtacctgaaaatgacggggagaatggaaccaagttggaaaacactgtgcaggatattatccaggagaacttccccaatctagcaaggcaggccgacattcaaattcaggaaatacagagaacaccacaaagatactcctcgagaagagcaactccaaaacacataattgtcagattcaccaaagttgaaatgaaggaaaaaatgttaagggcagccagagagaaaggtcgggttacccacaaagggaagcccatcagactaacagctgatctctcagcagaaactctacaagccagaagagagtgggggcaaatattcaacattcttaaggaaaagaattttcaacccagaatttcatatccagccaaactaagcttcataagtgaaggagaaataaaaccctttacagacaagcaaatgctgagagattttgtcaccaccaggcctgcactaaaagagctcctgaaggaagtgctaaacatggaaaggaacaaccggaagaagttgaatagaccaataacaggctctgaaattgtggcaataatcaatagcttaccaaccaaaaaaagtccaggaccagatggattcacagctgaattctaccagaggtacaaggaggagctggtaccattccttctgaaactattccaatcaaaagaaaaagagggaatccaccctaattcatttgatgaggccagcatcatcctgataccaaaggctggcagagacacaaccacaaaagataattttagaccaatatccttgatgaacattgatgcaaaaatcctcaataaaatactggcaaaccaaatccagcagcacatcaaaaagcttatccaccatgatcaagtgggcttcatccctgggatgcaaggctggttcaacatatgccaatcaataaatgtaatccagcatataaacagaaccaaagacaaaaaccacgtgattatctcaatagatgcagaaaaggcctttgacaaaattcaacaacgcttcatgctaaaaactctcaataaattaggtattgataggatgtatctcaaaataataagagctatctatgacaaacccacagccaatatcatactgaatgggcaaaaactggaagcattccctttgaaaatgggcacaagacagggatgccctctctcaccactcctattcaacatagtgttggaagttctggccagggcaatcaggcaggagaaagaaataaagcatattcaattaggaaaaaaggaagtcatattgtccctgtttgcagatgacatgattgtatatctagaaaactccattgtctcagcccaaaatctccttaagctgataagcaacttcagcaaagtctcaggatacaaaatcaatgtacaaaaatcacacgcattcttacacaccaacaacagacaaacagagagccaaatcatgagtgaactcccattcacaattgcttcaaagagaataaaatacctaggaatccaacttacaaaggatgtgaaggacctcttcaaggagaactacaaaccactgctcaatgaaataaaagaggatacaaagaaatggaaacacattccatgctcatgggtaggaagaatcaatatcgtgaaaatggccatactgcccaaggtaatttatagattcaatgccatccccatcaagctaccaatgactttcttcacagaattggaaaaaactactttaaagttcatatggaaccaaaaaagagcccacaccgccaagtcaatcctaagccaaaagaacaaagctggaggcatcacactacctgacttccaactatactgcaaggctacagtaaccaaaacagcatggtactag

SEQ ID NO: 126623 - DNA, 474 bp, Homo sapiens
atggagctgaaaaccaaggctcgagaactacgtgaagaatgcagaagcctcaggagccgatgcgatcaactggaagaaagggtatcagcaatggaagatgaaatgaatgaaatgaagcgagaagggaagtttagagaaaaaagaataaaaagaaatgagcaaagcctccaagaaatatgggactatgtgaaaagaccaaatctacgtctgattggtgtacccgaaaaaatacaaactaccaacagagaatactacaaacacctctacgcaaataaactagaaaatctagaagaaatggatacattcctcgacacatacactctcccaagactaaaccaggaagaagttgaatctctgaatagaccaataacaggagctgaaattgtggcaataatcaatagtttaccaaccaaaaagagtccaggaccagatggattcacagccgaattctaccagaggtacaaggaggaactg

SEQ ID NO: 126624 - DNA, 1200 bp, Homo sapiens; identical to SEQ ID NO: 125990

SEQ ID NO: 126625 - DNA, 1521 bp, Homo sapiens
atgggagactttaacaccccactgtcaacattagacagatcaacgagacagaaagtcaacaaggatacccaggaattgaacttagctctgtaccaagcagacctaatagacatctacagaactctccaccccaaatcaacagaatatacatttttttcagcaccacaccacacatattccaaaattgaccacatacttggaagtaaagctctcctcagcaaatgtaaaacaacggaaattataacaaactatctctcagaccacagtgcaatcaaactagaaatcaggattaagaatctcactcaaaaccgctcaactacatggaaactgaacaacctgctcctgagtgactactgggtacataacgaaatgaaggcagaaataaagatgttctttgaaaccaacgagaacaaagacacaacataccagaatctctgggacgcattcaaagcagtatgtagagggaaatttatagcactaaatgcccacaagagaaagcaggaaagatccaaaattgacaccctaacatcacaattaaaagaactagaaaagcaagagcaaacacattcaaaagctagcagaaggcaagaaataactaaaatcagagcagaactgaaggaaatagagacacaaaaaactcttcaaaaaattaatgaatccaggagctggatcaacaaaattgatagaccgctggcaagactaataaagaaaaaaagagagaagaatcaaatagatgcaataaaaaatgataaaggggatatcaccaccaatcccacagaaatacaaactaccatcagagaatactacaaacacctctatgcaaataaactagaaaatctagaagaaatggataaattccttgacacatacactctcccaagactaaaccaggaagaagttgaatctctgaatagaccaataacaggatctgaaattgtggcaataatcaatagcttaccaaccaaaaagagtccaggaccagatggattcacagccgaattctaccagaagtacaaggaggaagtggtaccattccttctgaaactattccaatcaatagaaaaagagggaatgctccctaactcattttatgaggccagcatcatcgtgataccaaagctgggcagagacacaaccaaaaaagagagttttagaccaatatccttgatgaacattgatgcaaaaatcctcaataaaatactggcaaaccgaatccagcagcatatcaaaaagcttatctaccatgatcaagtgggcttcatccctgggatgcaaggctggttcaatatactcaaatcagtaaatgtaatccagcatataaacagaaccaaagacaaaaaccacatgattatctcaatagatgcagaaaaggcctttgacaaaattcaacaacccttcatgctaaaaactctcaataaattaggtattgatgggatgtatctcaaaataataagagctatctatgacaaacccacaaccaatatcatactgaatgggcaaaaactggaagcattcccttag

SEQ ID NO: 126626 - DNA, 3192 bp, Homo sapiens; identical to SEQ ID NO: 118064

SEQ ID NO: 126627 - DNA, 2202 bp, Homo sapiens; identical to SEQ ID NO: 122760

SEQ ID NO: 126628 - DNA, 2823 bp, Homo sapiens; identical to SEQ ID NO: 120411

SEQ ID NO: 126629 - DNA, 1593 bp, Homo sapiens; identical to SEQ ID NO: 121955

SEQ ID NO: 126630 - DNA, 3552 bp, Homo sapiens
atgggagactttaacaccccactgtcaacattagacagatcaaggagacagaaagtcaacaaggatacccaggaattgaactcagctctgcaccaagtggacctaatagacatctacagaactctgcaccacaaatcaacagaatatacatttttttcagcaccacaccacacctattccaaaattgaccacatagttggaagtaaagctctcctcagcaaatgtaaaagaacagagattataacaaactatctctcagaccacagtgcaatcaaactagaactcaggattaagaatctcactcaaaaccgctcaactacatggaaactgaacaacctgctcctgaatgactactggatacataacaaaatgaaggcagaaataaagatgttctttgaaaccaacaagaacaaagacacaacataccagaatctctgggatgcattcaaagcagtgtgtagagggaaatttatagcactaaatgcccacaagagaaagcaggaaagatccaaaattgacaccctaacatcacaattaaaagaactggaaaagcaagagcaaacacattcaaaagctagcagaaggcaagaagtaactaaaatcagagcagaactgaaggaaatagagacacaaaaaacccttcaaaaaattaatgaatccaggagctggttttttgaaaggatcaacaaaattgatagaatgctagcaagactaataaagaagaaaagagagaagaatcaaatagacacaataaaaaatgataaaggggatatcaccaccgatcccacagaaatacaaactaccatcagagaatactacaaacacctctatgcaaataaactagaaaatctagaagaaatggataaattcctcgacacatacactctcccaagactaaaccaggaagaagttgaatctctgaatagaccaataacaggagctgaaattgtggcaataatcaatagcttaccaaccaaaaagagtccaggaccagatggattcacagccgaattctaccagaggtacaaggaggaactggtaccattccttctgaaactattccaatcaatagaaaaagagggaatcctccctaactcattttatgaggccagcattattctgataccaaagccgggcagagacacaaccaaaaaagagaattttagaccaatatccttgatgaacattgatgcaaaaatcctcaataaaatattggcaaaacgaatccagcagcatatcaaaaagcttatccaccatgatcaagtgggcttcatccctgggatgcaaggctggttcaatatacgcaaatcaataaatgtaatccagcatataaacagaaacaaagacaaaaaccacatgattatctcaatagatgcagaaaaagcctttgacaaaattcaacaacccttcatgctaaaaactctcaatagattaggtattgatgggacgtatttcaaaataataagagctatctatgacaaacccacagctaatatcgtactgaaggggcaaaaactggaagcattccctttgaaaactggcacaagacagggatgccctctctcaccactcgtattcaacatagtgttggaagttctggccagggcaattaggcaggagaaggaaataaagggtattcaattaggaaaagaggaagtcaaattgtccctgtttgcagacgacatgattgtatatctagaaaaccccattgtctcagcccaaaatctccttaagctgataagcacttcagcaaagtctcaggatacaaaatcaatgtacaaaaatcacaagcattcttatacaccaacaacagacaaacagagccaaatcatgagtgaactcccattcacaactgcttcaaagataataaaatacctaggaatccagcttacaagggatgtgaaggacctcttcaaggagaactacaaaccactgctcaaggaaataaaagaggatacaaacaaatggaagaacattccatgctcatgggtaggaagaatcaatattgtgaaaatggccatactgcccaaggtaatttacagattcaatgccatccccatcaagctaccaatgactttcttcacacaattggaaaaaactactttaaagttcatatggaaccaaaaaagagcccgcatcgccaaggcaatcctaagccaaaagaacaaagctggaggcatcacactacctgacttcaaactatactacaaggctacagtaaccaaaacagcatggtactggtaccaaaacagagatatagatcaatggaacagaacagagccctcagaaataacgccgcatatctacaactatctgatctttgacaaacctgagaaaaacaagcaatggggaaaggattccctatttaataaatggtgctgggaaaactggctagccatatgtagaaagctgaaactggatcccttccttacaccttatacaaaaatcaattcaagatggattaaagacttaaatgttagacctaaaaccataaaaaccctagaagaaaacctaggcattaccattcaggacataggcatgggcaaggacttcatgtccaaaacaccaaaagcaatggcaacaaaagccaaaattgacaaatgggatctaattaaactaaagagcttctgcacagcaaaagaaactaccatcagagtgaacaggcaacctacaaaatgggagaaaattttcgcaacctcctcatctgacaaagggctaatatccagaatctacaatgaactccaacaaatttacaagaaaaaaacaaacaaccccatcaaaaagtgggcaaaggacatgaacagacacttctcaaaagaagacatttatgcagccaaaaaacacatgaaaaaatgctcatcatcactggccatcagagaaatgcaaatcaaaaccacaatgagataccatctcacaccagttagaatggcaatcattaaaaagtcaggaaacaacaggaatccaacttacaagggatgtgaaggacctcttcaaggagaactacaaaccactgctcaaggaaataaaagaggatacaaacaaatggaagaacattccatgctcatgggtaggaagaatcaatatcgtgaaaatggccatactgcccaagaattggaaaaaactactttaaagttcatatggaaccaaaaaagagcccgcatcgccaaggcaatcctaagccaaaagaacaaagctggaggcatcacactacctgacttcaaactatactacaaggctacagtaaccaaaacagtatggagaagtgatatcaaaagacaacgactacaccaaaatttggagaaaaaggtgaatccagacagtcacagtactaacttcatcttcgagaaattcatctctcctgtggggtttattgaagctataacccaagaaatcaaggaacgtggattctacattgatctgagagtgatttttgttgttctccgatggaagttggacagcaaagctaaagcagtgatcaaacatcttggtggaccaggcctcaactgtgatcgcccagacaaggctggttcaggtttgctgaaattaggatag

SEQ ID NO: 126631 - DNA, 2727 bp, Homo sapiens; identical to SEQ ID NO: 119729

SEQ ID NO: 126632 - DNA, 3570 bp, Homo sapiens
atgggactctcagaggatccagaactgcagcccgtcctcgctgggctgtccctgtccatgtatctggtcacggtgctgaggaacctgctcagcatcctggctgtcagctctgactcccacctccacacccccatgtacttcttcctctccaacctgtgctgggctgacatcggtttcacctcggccacggttcccaagataattgtggacatgcagtcgcatagcagagtcatctcttatgtgggctgcctgacacggatgtcttttttggtcctttttgcatgtatagaagacatgcttctgactgtgatggcctatgactgctttgtagccatctgtcgccctctacactacccagtcatcgtgaatgctcacctccgtgtcttcttagttttggtgtcctttttccttagcctgttggattcccagctgcacaggatccttttgtcttactgtaaaattgttccctccattctaaggatttcaacatcagatgggaaatataaagccttctccacctgtggctctcacctggcacttgtttgcttattttatggagcaggcattggcgtgtacctgacttcagctgtgtcaccaccccccaggaatggtgtggtggtgtcagtgatgtacactgtggtcacccccatgctgaaccctttcatctacagcctgagaaacagggacattcaaagcaccctgcggaggctgctcagcagaacagtcgaatctcatgatctgttccatcctttttcttgtgtggggaagcgcaaatccaaccaagaatgtgataccacacatttggatggatgtgataaacaaacaagcattggtgaaactagagggaaggagtacaccctgtgtgacagtaggagtaacctcacccaaggatataaggaacaaatacagaggatgcacacgtgttgtgacattagcagtaacatccatttaggatattacgaatattaccacaatgtgaataccccctgtgatattaggagtaacatccccctacaatattgggaaccatatcacacggtgtacaccccctgtgacattagagggaggcccatgaaccgaggaagcaggtggccatctgtggcagctgtcacagcccagcataaagctaagcacttctacttattatatcattcaaaagctgcctcagcctgcaagggcagtaattccccaaagcaggctccagggcccaaggaaagccctcggcagggaaacattgagtgtcaggcacagggaatcaggccatcgggtcacctggacaccgtaaggctccaagagctgccccctctccaccaggaggaactgacttaccaaggtgacagtctagagactgcttgcccaattaaagccatgatccccaatctcacactccaactacgggaggacattcaaaccaaaggcaaagaagttgaaaactttgaaaaaaatttagaagaatgtataactagaataaccaatacggagaagtgcttaaaggagctgatggagctgaaaaccaaggctcgagaactacgtaaagaatgcagtagcctcaggagccgatgccatcaactggaagaaagggtatcagcaatggaagatgaaatgaatgaaatgaagtgggaagggaagtttagagaaaaaagaataaaaagaaataagcaaagcctccaagaaatatgggactatgtgaaaagaccaaatctacgtctcattggtgtacctgaaagtgacggggagaatggaactaagttggaaaacactctgcaggatatcgtccagaacttccccaatctagcaaggcagaccaatgttcagattcaggaaatacagagaacgccacaaagatactcctcgagaagagcaactccaagacacataattgtcagattcaccaaagttgaaatgaaggaaaaaatgttaagggcagccagagagaaagaaatacaaactaccatcagagaatactacaaacacctctacgcaaataaactagaaaatctagaggaaatggataaattccttgacacatacactctcccaagactaaaccaggaagaagttgaatctctgaatagaccaataacaggctctgaaattgtggcaataatcaatagcttaccaaccaaaaagagtccaggaccagatggattcacagccgaattctaccagaggtacaaggaggaactggtaccattccttctacaactattccaatcaatagaaaaagagggaatcctccctaactcattttatgaggccagcatcatcctgataccaaaggctggcagagacacaaccaaaaaagagaattttagaccaatatccttgatgaacgttgatgcaaaaatcctcaataaaatattggcaaaacgaatccagcagcacatcaaaaagcttatccaccatgatcaagtgggcttcatccctgggatgcaaggctggttcaatatacgcaaatcaataaatgtaatccagcatataaacagagccaaagacaaaaaccacatgattatctcaatagatgcagaaaaggcctttgacaaaattcaacaacccttcatgctaaaaactctcaataaattagaattggaaaaaactactttaaagttcatatggaaccaaaaaagagcccgcatcgccaagtcaatcctaagccaaaagaacaaagctggaggcatcacactacctgacttcaaactatactacaaggctacagtaaccaaaacagcatgcctggccccacaccacagtccatcaactcctgctccaggtggaaacctcagaaacccacaaagctcggacctgctccaggtcaccaagcagcagggccaggcactggcaatccaacgagaagccccactacatcgcattccagctcctgaagccattccctggtattttcagccccagccggccacacagctcggatctcctcctgtggatccccccagctctgcgatgatggcagaagagcacacagatctcgaggcccagatcgtcaaggatatccactgcaaggagattgacctggtgaaccgagaccccaagaacattaacgaggacatagtcaagaacgcctgccttcttcagaaaaacaaacacccatttgccccccggctcaggctacacaacacccagaggaaccagatgcccaccagccctacaaacacttgttccaggtttgtgctcatcagggacaccctgttgcacaaagaagaaactgacctggtggattttgaagacgtgatcgcagagcctgtgggcacctacagctttgacggcgtgtggaaggtgagctacaccaccttcactgtctccaagtactggtgctaccgtctgttgtccacgctgctgggcgtcccactggccctgctctggggcttcctgttcgcctgcatctccttctgccacatctgggcggtggtgccatgcattaagagctacctgatcgagatccagtgcatcagccacatctactcactctgcatccgcaccttctgcaacccactcttcgcggccctgggccaggtctgcagcagcatcaaggtggtgctgcggaaggaggtctaa

SEQ ID NO: 126633 - DNA, 2064 bp, Homo sapiens
aaaagcaagagcaaacacattcaaaagctagcagaaggcaagaaataactaaaatcagagcagaactgaaggaaatagagacacaaaaaacccttcaaaaaattaatgaatccaggagctggttttttgaaaggatcaacaaaattgatagaccgctagcaagactaataaagaagaaaagagagaagaatcaaatagacgcaataaaaaatgataaaggggatatcactaccagtcccacagaaatacaaacaaccatcagagaatactacaaacacctctacgcaaataaactagaagatctagaagaactggataaattcctcgaaacatacaccctcccaagactaaaccaggaagaaggtgactctctgaatagaccaataacaggatctgaaattgtggcaataatcaatagcttgccaaccaaaaagagtccaggaccagatggattcacagccgaattctaccagaggtacaaggaggaactggtaccattccttctgaaacgattccaatcaatagaaaaagagggaatcctccctaactcattttatgaggccaacatcatcctgataccaaagtcggccagagacacaaccaaaaaagataattttaggccaatatccttgatgaaccttgatgcaaaaatcctcaataaaatactggcaaactgaatccagcagcacatcaaaaagcttatccaccatgatcaagtgggcttcatccctgggatgcaaggctgtgttggaagttctggccagggcaattaggcaggagaaggaaataaagggtattcaattaggaaaagaggaagtcaaattgtccctgtttgcagatgacatgattgtatatctagaaaaccccattgtctcagctcaaaatctccttaagctgataagcaacttcagcaaagtctcaggatacaaaatcaatgtacaaaaatcacaagcattcttatacaccaataacagacaaacagagagccaaatcatgagtgaactcccattcacaattgcttcaaagagaataaaatacctaggagtccaccttacaagggatgtgaaggacctcttcaaggagaactacaaaccactgctcaatgaaattaaagaggatacaaacaaatggaagaacattccatgctcacggataggaagaatcaatatcgtgaaaatggccatactgcccaaggtaatttatagattcaatgccatccccatcaacctaccaatgactttcttcacagaattggaaaaaactactttaaagttcatatggaaccaaaaaagagcccgcatcaccaagtcaatcctaagccaaaagaacaaagctggaggcatcatgctacctgacttcaaactatactacaaggctacagtaaccaaaacagcatggtactggtaccaaaacagagatatagatcaatggaacagaacagagccctcagaaataacgccgcacatctacaactatctgatctttgacaaacctgagaaaaacaagcaatggggaaaggattccctatttaataaatggtgctgtgaaaactggctagccatatatagaaagctgaaactggatcccttctttacaccttatacaaaaatcaattcaagatggactaaagacttaaatgttagacctaaaaccataaaaaccctagaagaaaacctaggcattaccattcaggacataggcatgggcaaggacttcatgtctaaaacaccaaaagcaacggcagcaaaagcccaaattgacaaatgggatctaattaaactaaagagcttctgcacagcaaaagaaactaccatcagagtgaataggcaacctacaaaatgggaggaaattttcgcaacctactcatctgacaaagggctgatatccagaatctacaatgaactcaaacaaatttacaagaaaaaaacaaacaaccccatcaaaaagtgggcaaaggacatgaacagacacttctcaaaacaagacatttatgcagccaaaaaacacatgaaaaaatgctcatcatcactggccatcagagaatgcaaatcaaaaccacaatga

SEQ ID NO: 126634 - DNA, 3370 bp, Homo sapiens
atggagctgaaaaccaaagctcaagaactacgtgaggaatgcagaagcctcaggagccgatgcgatcaactggaagaaagggtatcagcaatggaagatgaaatgaatgaaatgaagcgagaagggaagtttagagaaaaaagcataagaagaaatgagcaaagcctccaagaagtatgggattatgtgaaaagaccaaatctacatctcattggtgtacctgaaagtgatggggagaatggaaccaagttggaaaacactctgcaggatattatccaggagaacttccccaatctagcaaggcaggccaacgttcagattcaggaaatacagagaacgccacaaagatactcctcgagaagagcaactccaagacacataattgtcagattcaccaaagttgaaatgaaggaaaaaacgttaagggcagccagagagaaagcaccacaccacacctattccaaaattgaccacatacatggaagtaaagctctcctcagcaaatgtaaaagaacagagattataacaaactatctctcagaccacagtgcaatcaaactagaactcaggattcagaagctcactcaaaaccgctcaactacatggaaactgaacaacctgctcctgaatgactactggatacataacgaaatgaaggcagaaataaagatgttctttgaaaccaacgagaacaaagacacaatgtaccagaatctctgggacgcattcaaagcagtgtgtagagggaaatttatagcactaaatgcccacaagagaaagcaggaaagatccaaaattgacaccctaacatcacaattaaaagaactagaaaagcaagagcaaacacattcaaaagctagcagaaagcaagaaataactaaaatcagagcagaactgaaggaaatagagacacaaaaaacccttcaaaaaattaatgaacccaggagctggttttttgaaaggatcaacaagattgatagactgctagcaagactaataaagaaaaaaagagagaagaatcaaatagacgcaataaaaaatgataaaggggatatcaccaccgatccctcagaaatacgaactaacatcagagaatactacaaacacctctacgcaaataaactagaaaatctagaagaaatggataaattcctcgacatatacactctcccaagactaaaccaggaagaagttgaatctctgaatagaccaataacaggagctgaaattgtggcaataattaatagtttaccaaccaaaaagagtccaggaccagatggattcacagccgaattctaccagaggtacaaggaggaactggtaccattccttctgaaactattccaatcaatagaaaaagagggaatcctctgtaactcattttatgaggccagcatcattctgataccaaagccgggcagagacacaacaaaaaaagagaattttagaccaatatccttgatgaacattgatgcaaaaatcctcaataaaatactggcaaaccgaatccagcagcacatcaaaaagcttatccaccatgatcaagtgggcttcatccctgggatgcaaggctggttcaatatatgcaaatcaataaatgtaatccatcatataaacagagccaaagacaaaaaccacatgattatctcaatagatgcagaaaaagcctttgacaaaattcaacaaccgttcatgctaaaaactctcaataaattaggtactgatgggacgtatttcaaaataataagagctatctatgacaaacccacagccaatatcatactgaatgggcaaaaactggaagcattccctttgaaaactggcacaagacagggatgccctctctcaccactcctattcaacatagtgttggaagttctggccagggcaattaggcaggggaaggaaataaagggtattcaattaggaaaagaggaagtcaaattgtccctgtttgcagatgacatgattgtatatctagaaaaccccattgtctcagcccaaaatctccttaagctgataagcaacttcagcaaagtctcaggatacaaaatcaatgtacaaaaatcacaagcattcttatacaccaataacagacaaacagagagccaaatcatgagtgaactcccatttacaattgcttcaaagagaataaaatacctaggaatccaacttacaagggatgtgaaggacctcttcgaggagaactacaaaccactcctcaaggaaataaaagaggatacaaacaaatggaagaacattccatgctcatgggtaggaagaatcaaaatcgtgataatggccatactgcccaaggcaatttacagattgaatgccatccccatcaagctaccaatgactttcttcacagaattggaaaaaactactttaaagttcatatggaaccaaaaaagagcccacaccgccaaggcaatcctaagccaaaagaacaaagctggaggcatcacactacctgacttcaaactatactacaaggctacagtaaccaaaacagcatggtactggtaccaaaacagagatatagatcaatggaacagaacagagccctcagaaataatgccgcatatctacaactatctgatgtttgacaaacctgagaaaaacaagcaatggggaaaggattccctatttaataaatggtgctgggaaaactggctagccatatgtagaaagctgaaactggatcccttccttacaccttatacaaaaatcaattcaagatggattaaagacttaaacgttagacctaaaaccataaaaaccctagaagaaaacctaggcattaccattcaggacataggcatgggcaaggacttcatgtccaaaacaccaaaagcaatggcagcaaaagccagaattgacaaatgggatctaattaaactaaagagcttctgcacagcaaaagaaactaccatcagagtgaacagacaacctacaaaatgggagaaaattttcgcaacctactcatctgagaaagggctaatatccagaatctacaatgaactcaaacaaatttacaagaaaaaaacaaacaaccccatcaaaaagtgggcgaaggacatgaacagacacttctcaaaagaagacatttatgcagccaaaaaacacatgaaaaaacgctcatcatcactggccatcagagaaatgcaaatcaaaaccacaatgagataccatctcacaccagttagaatggcaatcattaaaaagtcaggaaacaacagaataaaaagactcacagactcagaaaggaggaaaatgaaatcagaggacaggttgacatgtgaggactccagaaaccttattactttcatacaatggaataaagaacaagaagaagaaagaaaaacca

SEQ ID NO: 126635 - DNA, 3018 bp, Homo sapiens
atggggttttaccatgttggtcaagctggtactgaactcctgacttcaaatgatccactcacctcagcctctcaaagtgctcgcattacagggaaagctttacaaaaacccacagaggtacctgtaccatatgagaagatgctacaagaccagtcagctttgatagtacaggggcttccggaaggtgttgcctttaaacaccctgagaactatgatcttgcaaccctgaaatggattttggagaacacagctgggatttcatttattattaatagtgccaccattgagcctcctgctgctcagcccatgtcctttactcacatgggacactctttgtgtgttcttgtggtagagactcacgcaaagccagttgctgtgcagagctcaagcttcaccagaaacccagaggtcatttccctggaagtggcagctgtgacagtaaaggaagaatcagaagatcctgattatgattatatcacattcaaggatttacctggtattgcatatgaaacaaaagcctatgtcttgtggccacagctaagtaagatctgctctaaaaacggcgataaaaacaaggcttatcgaggccaacaatgcagactcaggcagcagaaccccttagctgcactgacaggcaaaatatctgtttcagtatacgtctctcatccatcacttaggtcagtgtccataggatggacccggcaggtggcaagacaaacgatgcaaaaggatcgtgatggacccctcaaaaatgaaggtgaaaagaactgcgcaggcagcgaaaaaaacaccctaacatcacaattaaaagaactagaaaagcaagagcaaacacattcaaaagctagcagaaggcaagaaataactaaaatcagagcagaactgaaggaaatagagacacaaaaaactgttgaaaaaattaatgaatccaggagctggttttttgaaaggatcaacaaaattgatagaccgctagcaagactaataaagaaaaaaagagagaagaatcaagtagatgcaataaaaaacgataaaggggatatcaccaccgatcccacagaaatacaaactaccatcagagaatactacaaacacctctacgcaaataaactagaaaatgtagaagaaatggataaattcctcgacacatacactctcccaagactaaaccaggaagaagttgaatctctgaatagaccaataacaggctctgaaattgtggcaataatcaatagcttaccaaccaaaaagagtccaggaccagatggattcacagccgaattctaccagaggtacaaggaggaactggtaccattccttctgaaactattccaatcaatagaaaaagagggaatcctccctaactcattttatgaggccagcatcattctgatagcaaagccaggtagagacacaacaaaaaaagagaattttagaccaatatccttgatgaacattgatgcaaaaatcctcaataaaatactggcaaaacgaatccagcagcacatcaaaaagcttatccaccatgatcaagtgggcttcatccctgggatgcaaggctggttcaatatacgcaaatcaataaatgtaatccagcatataaacagagccaaagacaaaaaacacatgattatctcaatagatgcagaaaaagcctttgacaaaattcaacaacccttcatgctaaaatctctcaataaattagaattggaaaaaactactttaaagttcatatgggaccaaaaaagagcccgtgtcgccaagtcaatcctaagccaaaagaacaaagctggaggcatcacagtacctgacttcaaactatactacaaggctacagtaaccaaaacagcatggtactggtaccaaaacagagatatagatcaatggaacagaacacagccctcagaaataatgccacatatctacaactatctgatctttgacaaacctgagaaaaacaagcaatggggaaaggattccctatttaataaatggtgctgggaaaactggctagccacatgtagaaagctgaaactggatcccttccttacaccttatacaaaaatcaattcaagatggattaaagacttaaacgttagacctaaaaccataaaaaccctagaagaaaacctaggcattaccattcaggacataggcatgggcaaggacttcatgtctaaaacaccaaaagcaatggcaaccaaagacaaaattgacaaatgggatctcattaaactacagagcttccacacagcaaaagaaactaccatcagagtgaacaggaaacctacagaatgggagaaaattttcacaacttactcatctgacaaagggctaatatccagaatctacaatgaactcaaacaaatttacaagaaaaaaacaaacaaccccatcaaaaagtgggcgaaggacatggacagacacttctcaaaagaagacatttatgcagccaaaaaacacatgaaaaaatgctcatcatcactggccatcagagaaatgcaaatcaaaactacaatgagataccatctcacaccagttagaatggcaatcattaaaaagtcaggaaacaacaggtgctggagaggatgtggagaaataggaacacttttacactgttggtgggactgtaaactagttcaaccattgtggaagtcagtgtggcgattcctcagggatctagaactagaaataccatttgacccagccagcccattactggatatatacccaaaggactataaatcatgctgctataaagacacatgcacacgtatgtttattgcagcattattcacaatagcaaagacttggaagcaacccaaatgtcgaacaatgatagactggattaagaaaatgtggcacatatacaccatggaattctatgcagccataaaaaatgatgagttcaagtcctttgtagggacatggatgaaattggaaatcatcattctcagtaaactatcgcaagaacaagaaaccaaacaccgcatattctcactaataggtgggaattga

SEQ ID NO: 126636 - DNA, 4216 bp, Homo sapiens
  misc_feature (1)...(4216): n = a,t,c or g
atggagaatgactttgatgagctgagagaaggcggcttcagaagatcgaattattctgagctacgggaggacattcaaaccaaaggcaaagaagttgaaaactttgaaaaaaatttagaagaatgtataactagaataaccaatacagagaagtgcttaaaggagctgatggagctgaaaaccaaggctcaagaactacgtgaagaatgcagaagcctcaagagccaatgcaatcaactggaagaaagtgtatcagcaatggaagatgaaatgaatgaaatgaagcgagaagggaagtttagagaaaaaagaataaaaagaaatgaccaaagcctccaagaaatatgggactatgtgaaaagaccaaatctacgtctgattggtgtacctgaaagtgatggggagaatggaaccaagttggaaaacacgctgcaggatattatccaggagaacttccccaatctagcaacgcaggccaacgttcagattcaggaaatacagaaaacgccacaaagatactcctcgagaagnagcaactccaagacacataatgaaatacaaactaccatcagagaatactacaaacacctctacgcaaataaactagaaaatctagaagaaatggataaattcctcgacacatacactctcccaagactaaaccaggaagaagttgaatctctgaatagaccaataacaggagctgaaattgtggcaataatcaatagcttaccaaccaaaaaagagtccaggaccagatggatccacagccgaattctaccagagaataaaatacctgggaatccaacttacaagggatgtgaaggacctcttcaaggagaactacaaaccactgctcaaggaaataaaagaggatacaaacaaatggaagaacattccatgctcatgggtaggaagaatcaatatcatgaaaatggccatactgcccaaggtaatttatagattcaatgccatccccatcaagctaccaatgactttcttcacagaattggaaaaaactactttaaagttcatatggaaccaaaaaagagcccgcatcaccaagtcaatcctaagccaaaagaacaaagccggaggcatcacactacctgacttcaaactatactacaaggctacagtaaccaaaacagcatggtactgttaccaaaacagagatatagatcaatggaacagagcagagccctcagaaataatgctgcctatctacaactatctgatctttgacaaacctgacaaaaacaagcaatggggaaaggattccctatttaataaatggtgctgggaaaactggctagccatatgtagaaagctgaaactggatcccttccttacaccttatacaaaaattaattcaagatggattaaagacttacatgttagacctaaaaccataaaaaccctagaagaaaacctgggcaataccattcaggacataggcatgggcaaggactttatgtctaaaacaccaaaagcaatggcaacaaaagccaaaattgacaaatgggatctaattaaactaaagagcttctgcacagcaaaagaaactaccatcagagtgaacaggcaacctacaaaatgggagaaaattttcacaacctactcatctgacaaagggctaatatccagaatctacaatgaactcaaacaaatttacaagaaaaaaacaaccccatcaaaaaatttggagtcaaaatatggacctgagaaaatatctccagaaaatgatatttttgaaataaatttacccaaacatgttataaagcaaataagtaaaacacttggcctcgaggccttttattttagaaatgactcagaatatagaagtagatttgagggacgacagggacatcaagaaggatatatcaaccagaagatcatcagctatgaagaaatgcctgcttatactcatgcttctcctattcataatacacataaaccatatgaatgtaaggaatgtgggaaatactttagttgtggttcaaatcttattcagcatcagagtattcatactggagagaaaccctataaatgcaaagaatgtgggaaagcctttcaacttcacatacaacttactcgacatcagaaatttcatactggtgagaaaacttttgaatgtaaggaatgtggaaaagcctttaatcttcccacccagcttaatcgccataagaacattcacacagttaagaaactgtttgaatgtaaggaatgtgggaagtcttttaatcgtagctcaaaccttactcagcatcaaagtattcatgctggtgtaaaaccatatcaatgtaaggagtgtgggaaagcctttaatcgtggttcaaatcttattcagcatcaaaaaattcattccaatgagaaaccctttgtatgtagggaatgtgagatggcctttcgatatcattaccaactcattgaacattgccgaattcatactggcgagaaaccctttgaatgtaaagaatgcagaaaggcctttactcttctgacaaagcttgttcgacatcagaagattcatatgggtgagaagccctttgaatgcagggaatgcgggaaggcctttagtctcctcaatcagcttaatcgccataagaatattcacacaggtgaaaaaccatttgaatgtaaagaatgtgggaagtcctttaatcgtagttcaaaccttattcaacaccagagtattcatgctgatgtaaaaccatatgaatgtaaggagtgtgggaaaggctttaatcgtggtgcaaatcttattcagcatcaaaaaattcattccaatgagaaaccctttgtatgtagggaatgtgagatggcctttcgatatcattaccaacttattcaacattgccaaattcatactggtgggaaaccctttgaatgtaaagaatgtggaaaggcctttagtcttctgacacagcttgctcgacataagaacattcatactggtgagaaaccatttgaatgtaaagactgtgggaaggccttcaatcgtggctcgaaccttgttcaacatcagagtattcacactggtgagaagccctatgaatgtaaggagtgtgggaaggcttttagacttcacctacaactttctcaacatgagaaaactcatacaggtgagaaaccctttgaatgtaaggaatgtgggaaattctttcgtcgtggttcaaatcttaatcaacatcgaagtattcataccggaaagaaaccctttgaatgtaaggaatgtgggaaagcctttcgacttcatatgcaccttattcgacatcagaaatttcatactggtgagaagccctttgaatgtaaggaatgtggcaaggccttcagtcttcacacccagcttaatcaccataagaacattcacacaggtgagaagccatttaaatgtaaagaatgtgggaagtcctttaatcgtgtctcaaaccttgttcaacatcagagtattcatgctggtgtaaaaccatatgaatgtaaggagtgtgggaaaggctttagtcgtgtttcaaaccttattcagcatcagaaaactcattccagtgcgaaaccctttgtatgtaaggagtgtaggaagacctttagatatcattaccagcttactgaacattaccgaattcatactggtgagaaaccctttgaatgtaaagaatgcggaaaggcctttggtcttctgacacagcttgctcaacatcagatcattcatactggtgagaagccatttaaatgtaaggagtgtgggaaggcctttaatcgtggctcaaaccttgttcaacctcagagtattcatactggtgagaaaccctatgaatgtaaggagtgtgggaaggcttttagacttcacctacaactttctctgcatcaaaaacttgtacagaaaattcatacttgggtgaaaacctttgaatgtaaggaatgtgggaaggcctttcaatatcattaccaatttcatggacattatagatttcatattcgtgagaacccttatgaatgtcaaggatgtgggaaatgctttaccagtggtagaaaccttagagtacatcagagaattcatactggtgagaaaccatatcaatgtgaagaatgtgggaaagcctttagtcatagttcaaacctgttaaacatgttaaaattcatactgatgagaaaccctatgaatgtaaggaatgtgaaaaggcctttagcagtaattatgatcttactgtacatctga

SEQ ID NO: 126637 - DNA, 1152 bp, Homo sapiens
atgggagactttaacaccccactgtcaacattagacagatcaacgagacagaaagtcaacaaggatacccaggaattgaactcagctctgcaccaagcggacctaatagacatctacagaagtctccacgccaaatcaacagaatatacatttttttcagcaccacaccacacctattccaaaattgaccacatacttggaagtaaagctctcctcagcaaatgtaaaagaacagagattataacaaactatctctcagaccacagtgcaatcaaactagaactcagaattaagaatctcactcaaaaccgctcaactacatggaaactgaacaacctgctcctgaatgactactggatacatgacgaaatgaaggcagaaataaagatgttctttgaaaccaacgagaacaaagacacaacataccagaatctctgggatgcattcaaagcaaccgctagcaagactaataaagaaaaagagaagaatcaaatagacacaataaaaaatgataaaggggatatcaccaccgatcccacagaaatacaaactaccatcagagaatactacaaacacctctatgcaaataaactagaaaatctagaagaaatggataaattcctcgacacatacactctcccaagactaaaccaggaagaagttgaatctctgaatagaccaataacaggagctgaaattgtggcaataatcaatagtttaccaaccaaaaagagtccaggaccagatggattcacagccgaattctaccagaggtacaaggaggagctgatagggtggcttagagaaagtgtgtcaaaaatatgtctaaaatttgatcaccaggttcaggtgatcactggccgcctgataatccgcttccagatcgccttcggcaccgttgtgctctgccagctcacgcgccatatcgacgtgtttgtaggcaagcggcttgcgaatgcacgatttgcgccatcgctgggtggtgcgcccgacctgttcactctcaaaccatgttttgtggcagtggaaactcagggcgatttacctcaagccacgacggtggttgatatcgacggttgcctgggcaagccagccaatgtacaggtggcattggatctggatgtgaaaggcttccagcagtgggtggctgag

SEQ ID NO: 126638 - DNA, 2031 bp, Homo sapiens
atggtaaagggatcaattcaacaagaagagctaactatcctaaatatatatgcactcaatacaggagcacccagattcataaagcaagtcctgagcgacctacagagagacttagactcccacacattaataatgggagactttaacaccccactgtcaacattagacagatcaatgagacagaaagtcaacaaggatacccaggaattgaactcagctctgcaccaagcggacctaatagacatctacggaactctccacccccaatcaacagaatatacatttttttcagcaccataccacacctattccaaaattgaccacatacttggaagtaaagctctcctcagcaaatgtaaaagaagagaaattataataaactatctctcagaccacagtgcaatcaaactagaactcaggattaagaatctcactcaaaacctctcaactacatggaaactgaacaacctgctcctgaatgactacttggtacataacgaaatgaaggcagaaataaagatgttctttgaaaccaacgagaacaaagacacaacataccagaatctctgggacacattcaaagcagtgtgtggagggaaatttatagcactaaatgcccacaagagaaagcaggaaagatccaaaattgacaccctaacatcacaattaaaagaactagaaaagcaagagcaaacacattcaaaagctagcagaaggcaagaaataactaaaatcagagcagaactgaaggaaatagagacacaaaaaacccttcaaaaaatgaatccaggagctgaaatacaaactaccatcagagaatactacaaacacctctacacaaataaactagaaaatctagaagaaatggataaattcctcgacacatacactctcccaagactaaaccaggaagaagttgaatctctgaatagaccaataacaggatctgaaattgtggcaataatcaatagcttaccaaccaaaaagagtccaggaccagatggattcacagccgaattctaccagaggtacaaggaggaactgggtactccaacagacctgcagctgagggtcctattagaaggaaaattaacaaacagaaaggacatccacaccaaaaacccatctgtacatcaccatcatcaaagaccaaaagtagataaaaccacaaagatggggaaaaaacagagcagaaaaactggaaactctaaaaatcagagcgcctctcctcctccaaaggaatgcaattcctcaccagcaacaaaacaaagctggaccgaaaatgactttgaggagctgagagaggaaggcttcagacgatcaaattactctgagctatgggaggacattcaaaccaatggcaaagaagttaaaaactttgaaaaaaatttagaagaatggataactagaataaccaaggcagagaagtgcttaaaggacctgatggagctgaaagccaaggctccagaactacgtgacaaatgcagaagcctcaggagccgatgcgatcaactggaagaaagggtatcagcgatggaagacaaaatgaatgaaatgaagcgagaagagaagtttagagaaaaaagaataaaaagaaacgaacaaagcctccaagaaatatgggactatgtgaaaagaccaaatctacgtctgattggtgtacctgaaagtgatggggagaatggaaccaagttggaaaacactctgcaggatattatccaggagaatttccccaatctagcaaggcaggccaatgttcagattcaggaaatacagagaacgccacaaagatcctcctcgagaagagcaactccaagacacataattgtcagattcaccaaagttgaaatgaaggaaaaaatgttaagggcagccagagagaaaggtcgggttaccctcaaagggaagcccatcagactaacagcggatctcttggcagaaactctacaagccagaagagagtgggggccaatattcaacattcttaaagaaaagattttcaacccagaatttcatatccaaccaaactaa

SEQ ID NO: 126639 - DNA, 2266 bp, Homo sapiens; identical to SEQ ID NO: 124539

SEQ ID NO: 126640 - DNA, 2133 bp, Homo sapiens; identical to SEQ ID NO: 117579

SEQ ID NO: 126641 - DNA, 2902 bp, Homo sapiens
atggagaatgactttgacgagttgagagaagaaggcttcagacaatcaaattactctgagctacgggaggacattcaaaccaaaggcaaagaagttgaaaactttgaaaaaaatttagaagaatgtataactagaataaccaatacagagaagtgcttaaaggagctgatggagctgaaaaccaaggctcaagaactacgtgaagaatggagaagcctcaggagccgatgcgatcaactggaagaaagggtatcagcgatggaagatgaaatgaatgaaatgaagggagaagggaagtttagagaaaaaagaataaaaagaaatgagcaaagcctccaagaaatatgggattatgtgaaaagaccaaatctatgtctgattggtgtacctgaaagggatgggcagaatggaaccaagttggaaaacacgttgcaggatgttatccaggagaacttccccaatctagcaaggcaggccaacgttcagattcaggaaatacagagaacgccacaaagatactcctcgagaagagcaactccaagacacataattgtcagattcaccaaagttgaaatgaaggaaaaaatgttaagggcagccagagagaaagaaatacaaactaccatcagtgaatactacaaacacctctacacaaataaactagaaaatctagaagaaatggataaattccttgacacatacactctcccaacactaaaccaggaagaagttgaatctctgaatagaccaataacaggagctgaaattgtggcaataatcaatagcttaccaacgaaaaagagtccaggaccagatggattcacagccgaattctaccagaggtacaaggaggaactggtaccattccttctgaaactattccaatcaatagaaaaagagggaatcctccctaactcattttatgaggccagcatcattctgataccaaagtcaggcagagacacaacaaaaaaagagaattttagaccaatatccttgatgaacattgatgcaaaaatcctcaataaaatactggcaaaccgaatccagcagcacatcaaaaagcttatccaccatgatcaagtgggcttcattcctgggatgcaaggctggttcaatatacgcaaatcaataaatataatccagcatataaacagagccaaagacaaaaaccacatgattatctcaatagatgcagaaaaagcctttgacaaaattcaacaacccttcatgctaaaaactctcaataaattagcccaaaatctccttaagttgataagcaacttcatcaaagtctcagtatacaaaatcaatgtacaaaaatcacaagcattcttatacaccaacaacagacaaacagagagccaaatcatgagtgaactcccattcacaattgcttcaaagagaataaaatacctaggaatccaacttacaagggatgtgaaggacctcttcaaggagaactacaaaccactgctcaaggaaataaaagaggatacaaacaaatggaagaacattccatgctcacgggtagaaagaatcaatatcgtgaaaatggccatactgcccaaggtaatttatagattcaatgccatccccatcaagctaccaatgactttcttcacagaattggaaaaaactactttaaagttcatatggaaccaaaaaagagcccgcatcgccaagtcaatcctaaaccaaaagaacaaagatggaggcatcacgctacctgacttcaaactatactacaaggctacagtgaccaaaacagcatggtactggtaccaaaacatgtgctatagatcaatggaacagaacagagccctcagttattatgtcgcatatctacaaccatctgatctttgacaaacctgagaaaaacaagcaatggggaaaggattccctatttaataaatggtgctgggaaaactggctagccatatgtagaaagctgaaactggatcccttccttacaccttatacaaaaatcaattcaagatggattaaagacttaaatgttggacctaacaccataaaaaccctagaagaaaacctaggcattaccattcaggacataggcacgggcaaggacttcatgtctaaaacaccaaaagcaatggcaacaaaagccaaaattgacaaacgggatctaattaaactaaacagcttctgcacagcaaaagaaactaccatcagagtgaacaggcaacctacaaaatgggagaaaattttcacaacctactcatctgacaaagggctaatatccagaatctacaatgaactcaaacaaatctacaagaaaaaaacaaacaaccccatcaaaaagtgggcgaaggacatgaacagacacttctcaaaagaacacatttatgcagccaaaaaacacatgaaaaaatgctcaccatcactggccatcagagaaatgcaaatcaaaaccacaatgagataccatctcacaccagttagaatggcaatcattaaaaagtcaggaaacaacaggtcctcaaacctggctgtccaaaaaggacgccgcaaagtcctgcagagcccccaaaagacacaagcgcggacagaaaagcatcccccgagagacagcgaagccacacaccctctccgggccagctaccagggcgggcaacttcacccctcgaagcaaacgaaagcccctgttctccaagcaaaggaaaaggggatggcaaacagaaataaacaggaaccgctctcagccttcatcttccgcgccctcccccagcaaactccaggaaacagtttctccatctgtgcgatgattgaggtgctcttcgttttttctttcattcaaaaacatactgaactaggtgatggtgaacaagatggacataaggccttcctcagtggcaaggatctcaagatcccttcttga

SEQ ID NO: 126642 - DNA, 2748 bp, Homo sapiens; identical to SEQ ID NO: 116383

SEQ ID NO: 126643 - DNA, 3288 bp, Homo sapiens; identical to SEQ ID NO: 123249

SEQ ID NO: 126644 - DNA, 2529 bp, Homo sapiens
ttatttctgaggggtctgttctgttccattggtctctatctctgtttggtaccagtacatggctgttgtggttactgtagccttgtagtatagtttgaagtcaggtagcgtgatgcctccacctttcttcttttggcttaggattgacttggcaatgcgggctcttttttggttccgtatgaactttaaagtagctttttccaattctctgaagaaagtcactggtagcttgatgcggatggcactgaatctataaattgcccggggcagaatggcaatgttcacgatattgattcttcctatccatgagcatggaatgttcttccatttgtttgtgtcctcttttatttcattgagcagtggtttgtagttctccttgaagaggtccttcacatcccttgtaagttggattcctaggtattttattctttgatcatggtggataagctttttgatgtactgctggattcggtttgtcagtattttattgaggatttttgcatcgatgctcatcagggatattggtctaaaattatctttttttgttgtggctctgcccggctttggtgtcaggatgatgctggcctcataaaatgagttagggaggattccctctttttctattgattggaatagtttcagaaggaatggtaccagctcctccttgtacctcaggtagaattcggctgtgaatccatctggtcctggactgtttttggttggtaagctattaattattgcctcaatttcagagcctgttattggtctattcagagaatcaacttcttcctggtttagtcttgggaggacgtatgtgtcaaggaatttatccatttctactagagtttctagtttatttgtgtagaggtgtttatagtattctctgatggtagtttgtatttcttttgtctttgatgatggtgacgtacggatggggttttggtgtggatgtcctttctgtttgttagttttccctttaacattctggaccctcagctgcaggtctgttggagtttgttggaggtccactccagaccctatttgcctgggtatcagcagtggaggctgcagaacagtgaatgttgctgaacagcgaatattgctgatcagcaaatgttgctgtctgatcgttcctctggaagttccgtcccttgcacttcctgggtggggcgatgcctcgccctgcttcggctcacgctcagtgcgctgcacccactgtcttgcacccactgtctggcactccctaaaatacaaactaccatcagagaatactacaaacacctctacacaaataaactagaaaatctagaagaaatggatacattcctcgacacatacactctcccaagactaaaccaggaagaagttgaatctctgaatagaccaataacaggagctgaaattgtggcaataatcaatagtttaccaaccaaaaagagtccaggaccagatggattcacagccgaattctaccagaggtacaaggaggaactggtaccattccttctgaaactattccaatcaatagaaaaacagggaatcctccctaactcattttatgaggccagcatcatcctgataccaaagcctggcagagacacaaccaaaaaagagaattttagaccaatatccttgatgaacattgatgcaaaaatcctcaataaaatactggcaaaacgaatccagcagcacatcaaaaagcttatccaccatgatcaagtgggcttcatccctgggatgcaaggctggttcaatatacacaaatcaataaatgtaatccagcatataaacagaactaaagacaaaaaccacatgattatctcaatagatgcagaaaaggcctttgacaaaattcaacaacccttcatgctaaaaactctcaataaattagaattggaaaaaactactttaaagttcatatggaaccaaaaaagagcccgcatcgccaagtcaatcctaagccaaaagaacaaagctggaggcatcacactacctgacttcaaactatactacaaggctacagtaaccaaaacagcatgtttcctcacctgtaaactagggatgtatgaaaacttcaagcaccttctgcaggcaccactggatgatgctcaagaaattctgcaagcacgcttcccgatgccacgttacatcaacacggagcatggaggcagtcaggagttttctcctcaaatacacaaattgtcttgcatcaacttcatttacatggaccagtttcctggcccccagaagcctcagaccctgaacattgcactgcgctctgcccctagctctccagtaggtggcgatggcaagtttggggcctacatgcaggtgcacattcagaatgatgggcctgtgaccatagagctggaatcgccagctcccggcactgctacctctgacccaaagcagcaccctccgggatcctcgagaggcggccggcgggtctgcgatgacatgatggccggcgggggccccggcgcgggccgcgggcggcagggcggcctgagtcgtcagccgattgtgtag

SEQ ID NO: 126645 - DNA, 3446 bp, Homo sapiens
atgtaccaagcaaatggaaaacaaaaaaaggcaggggttgcaatcctagtctctgataaaacagactttaaaccaacaaagatcaaaagagacaaagaaggccattacataatggtaaagggatcaattcaacaagaagagctaactatcctaaatatatatgcacccaatacaggagcacccacattcatacagcaagtcctgagtgatctacaaagagacttagactcccacacattaataataggagactttaacaccccactgtcaacatcagacagatcaacgagacagaaagtcaacaaggatacccaggaattgaactcagctctgcaccaagcagacctaatagacatctacagaaccctccaccccaaatcaacagaatatacatttttttcagcaccacaccacacctattccaaaattgaccacatacttggaagtaaagcactcctcagcaaatgtaaaagaacagaaattataacaaactatctctcagaccacagtgcaatcaaactagaactcatgattaagaatctcactcaaaaccactcaaccatatggaaactgaacaacctgctcctgaatgactactgggtacataaggaaatgaaggcagaaataaagatgttctttgaaaccaacgagaacaaagacacaacataccagaatctctgggacacattcaaagcagtgtgtagagggaaatttatagcactaaatgcccacaagagaaagcaggaaagatccaaaattgacaccctaacatcacaattaaaagaactagaaaagcaagagcaaacactttcaaaagctagcagaaggcaagaaataactaaaatcagagcagaactgaaggaaatagagacacaaaaaacccttcaaaaaattaacgaatccaggagcaggttttttgaaaggatcaacaaaattgatagcctgctagcaagactaataaagaaaaaaagagagaagaatcaaatagatgcaataaaaaatgataaaggggatatcaccaccaatcccacagaaatacaaactaccatcagagaatactacaaacacctctacgcaaataaactagaaaatctagaagaaatggataaattcctcgacacatacactctcccaagactaaaccaggaagaagttgaatctctgaatagaccaataacgggagctgaaattgtggcaataatcaatagcttaccaaccaaaaagagtccaggaccagatggattcacagccgaattctaccagaggtacaaggaggaacaggtaccattccttctgaaactattccaatcaatagaaaaagagggaatcctccctaactcattttatgtgtccagcatcatcctgataccaaagccgggcagagacacaaccaaaagagagaattttagaccaatatccttgatgaacattgatgcaaaaatcctcaataaaatactggcaaaccgaatccagcagcacatcaaaaagcttatccaccatgatcaagtgggcttcatccctgggatgcaaggctggttcaatatatgcaaatcaataaatgtaatccagcatataaacagaaccaaagacaaaaaccacatgattatctcaatagatgcagaaaaggcctttgacaaaattcaacaacctttcatgctaaaaactctcaataaattagatattgatgggttggaagttctggccagggcaatcaggcaggagaaggaaataaagggcattcaatcaggaaaagaggaagtcaaattgtccctgtttgcagatgacatgattgcatatctagaaaaccccatcgtctcagcccaaaatctccttaagctgataagcaacttcaacaaagtctcaggatacaaaatcaatgtgcaaaaatcacaagcattcttatgcaccaataacagacaaacagaaagccaaatcatgagtgaactcccattcacaattgcttcaaagagaataaaatacctaggaatccaacttacaagggatgtgaaggacctcttcaaggagagctacaaaccactgctcaatgaaataaaagaggatacaaacaaatggaagaacattccatgctcatgggtaggaagaatcaatatcgtgaaaatggccatactgcccaaggtaatttatagattcaatgccatccccatcaagctaccaatgactttcttcacagaattggaaaaaactaccttaaagttcatatggaaccaaaaaagagcccgcattgccaagtcaatcctaagccaaaagaacaaagctggaggcatcatgctacctgacttcaaactatactacaaggctgcagtaaccaaaacagcatggtactggtaccaaaacagagatatagatcaatggaacagaacagagccctcagaaataacgccgcatatctacaactacctgatctttgacaaacctgagaaaaacaagcaatggggaaaggattccctatttaataaatgtcttgatatgacgaatcatcgccgctgtgggacgactttagaggaccccaggatgaacccaagtgatagaccactagcaagactaataaagaaaaaaagagagatgaatcaaatagacgcaataaaaaatgataaaggggatatcaccaccgatcccacagaaatacaaactaccatcagagaatactacaaacacctctacgcaaataaactagaaaatctagaagaaatggataaattcctcgacacatacactctcccaagactaaaccaggaagaagttgaatctctgaatagaccaataacaggagctgaaattgtggcaataatcaatagcttaccaaccaaaaagagtccgggaccagatggattcacagccgaattctaccagaggtacaaggaggaactggtaccattccttctgaaactattccaatcaatagaaaaagaggaaatcctccctaactcattttatgaggccagcatcattctgataccaaagcctggcagagacacaatcaaaaaagagaattttagaccaatatccttgatgaacactgatgcaaaaatcctcaataaaatactggcaaaacgaatccagcagcacatcaaaaagcttatccaccatgatcaagtgggcttcatccctggggatgcaaggctggttcaatatacgcaaattaataaatgtaatccagcatataaacagagccaaagacaaaaaccacatgattatctcaatagatgcaggaaaggcctttgacaaaattcaacaacccttcatgctaaaaactctcaataaattagatacaaaaagtgaacttttagatataaacaacctttatcaagcagcctctgatgaaataagagcgattgtagctttcctgttatctggaaatgctacagaaccagattgggttgaccacgatgttcgcgcctacatagcagcgatggaaatgaaagtgg

SEQ ID NO: 126646 - DNA, 8979 bp, Homo sapiens
atggctactctgatccccctactgtttcacaagcatcctcatctcacacaaagatatcaattcaacgtcagaggtggctgcccgacgagcaccagtgccattgctactctggatcctagaactgcagtgtttccactcatgtctgtttttcagacctcagctccatggccattttggggtttcactcatcagacaccagtgccacagccactgaaagtgaaaatccacagttctgcagacaccgctgctgatatccaggcaaacagggtctggagtggacctccagcaaactccaagagacctgcagctgaggaaggaaaactaacaaacagaaaggacatccacaccaaaaacccatctgtacgtcaccatcatcaaagaccaaaagtagataaaaccacaaagacggggaaaaaacagaggagaaaaactggaaactctaaaaagcagagcgcctgtcctcctccaaaggaacgcagttcctcaacagcaacggaacaaagctggacggagaatgactttgacaagttgagagaaggcttcagacgatcaaactactccaagctacaggacgaaattcaaaccaaaggcaaagaagttgaaaacttggaaaaaagtttagacgaatgtataactagaataaccaatacagagaagggcttaaagaagctcgagaactacgtgaagaatgaagaaacctcaggagccaatgcgatcaactggaagaaagggatcaacaaaattgatagaccactagcaagactaataaagagaaaaagagagaagaatcaaatagacgcaataaaaattgataaaggggatatcaccaccgatcccacagaaatacaaactaccatcagagaatactacaaacacctctatgcaaataaactagaaaatctagaagaaatggataaattcctcgacacatacactctcccaagactaaaccaggaagaagttgaatctctgaatagaccaataacaggagctgaaattgtggcaataatcaatagcttaccaaccaaaaagagtccaggaccagatggattcacagctgaattctaccagaggtacaaggaggaactggtaccattccttctgaaactattccaatcaatagaaaaagagggaatcctccctaactcattttatgaggccagcatcatcctgataccaaagctgggcagagacacaaccaaaaaagagaattttagaccaatatccttgaggaacattgatgcaaaaatcctcaataaaatactggcaaaccgaatccagcagcacatcaaaaagcttatccatcatgatcgagtgggcttcatccctgggatgcaaggctggttcaacatacgcaaatcaataaatgtaatccagcatataaacagaaccaaagacaaaaaccacatgattatctcaatagatgcagaaaaggcctttgacaacattcaacaacccttcatgctaaaaactctcaataaattaggaatggatgggacatatctcaaaataagaagagctatctatgacaaacccacagccaatatcatactgaatgggcaaaaactggaagcattccctttgataactggcacaagacagggatgccctctctcaccactgctatacaacatagtgttggaagttctggccagggcaattaggcagaagaaggaaataaagggtattcaattaggaaaagaggaagtcaaattgtccctgtttgcagacgacatgactgtatatctagaaaaccccatcatatcagcccaaaatctccttcagctgataagcaacttcagcaaagtctcaggatataaaatcaatgtacaaaaatcacaagcattcttatacaccaataacagacaaacagagagccaaatcaagagggaactcccattcacaattgcttcaaagagaataaaatacttaggaatccaacttacaagggatgtgaaggacctcttcaaggaaaactacaaaccactgctcaatgaaataaaagaggatacaaacaaatggaagaacattccatgctcatgggtaggaagaatcaatattgtgaaaatggccatactgcccaaggtaatttatagattcaatgccatccccatcaagctaccaatgactttcttcacagaattggaaaaaactactttaacgctcatatggaaccaaaaaagagcccacatcgtcaagtcaatcctaagccaaaagaacaaagctggaggcatcacgctaccagacttcaaactatactacaaggctacagtaaccaaaacagcatggtactggtaccaaaacagagatatagatcagtggaacagaacagagccctcagaaataatgccacatatctacaactatctgatctttgacaaacctgagaaaaacgagcaatggggaaaagattccctatttaataaatggtgctgggaaaactggctagccatatgtagaaagctcaaactggatcccttccttacaccttatacaaaaattaattcaagatggattaaaggcttaaatgttagacctgaaaccataaaaaccctagaagaaaacctaggcattaccattcaggacataggcatgggcaaggacttcatgtctaaaacaccaaaaacaatggcaacaaaagccaaaattgacagatgggatctcattaaactaaagaacttctgcacagcaaaagaaactaccatcagagtgaacaggcaaactacaaaatgggagaaaattttcacaacctactcatctgaaaaagggctaatatccagaatctacaatgaactcaaacaaatttacaagaagaaacaaacaaccccaacaaaaagaggtattccaaaagaaagcattattgtaataggagatgacagctccatgcatgttaatgcccctgaaggccttccagtgggacaagatttggaggttgaagatggtgatattgattatcctgattctgatggcagctcctcaccagctatggaacaaagctggacagagaaggactttgatgaattgacagaagtaggcttcagaagaataaacagtgtggagaagatgttaaatgacctgatggagctgaaaaccatggcacaagaactttgtgacacatgcacaagtttcagtagcagatttgatcaagtggaagaaaggatatcagtgattgaatatcaaattaatgaaataaagcaagaggaggagtttagagaaaaaagagtaaagagagacaaacaaagcctccaagaaatatgggacaatgtgaaaagaccaaatctatgtttgattggtatacctgaaagtgatggggagaatggaaccaagttggaaaacacttttcaggatattatccaggagaacttccccaacctagcaaggcaggccaacattcaaattcaggaaatacagaaaataccacaaagatactccttgagaagagcaaccccaagacacataattgtcagattcactaaggttgaaatgaaggaaaaaatgttaaaagcagccagagagaaaggtcaggttacccacaaagggaatcccatcagactaacagtggatctctcagcagaaaccttagaagccagaagagagtggggaccaatattcaacattcttaaagaaaagaattttccacccggaatctcatatccagccaaactaagcttcataagcaaaggagaaataaaatactttacagacaagcaaatactgagagattttgtcaccaccaggcctgccttacaagacctcctgaaggaagcactaaacacggaaagtaacaactggtaccagccactgcaaaatcatgccaaaatgtaaagaccatcgagactaggaagaaactgcatcaactaacgagcaaaatcaccagctaacatcataatgacaggatcaaattcacacataacaatattaactttaaatgtaaatggactaaattctccaattaaaagacacagactggcaagttggataaagagtcaagacccatcagtgtgctgtattcaggaaacccatctcatgtgcagagacacacataggctcaaaataaaaggatggaggaagatctaccaagcaaatggaaaacaaaaaaaggcaggggttgcaatcctagtctctgataaaacagactttaaaccaacaaagatcaaaagagacaaagaaggccattacatgatggtaaagggatcaattcaacaagaggagctaactatcctaaatatgtatgcacccaatacaggagcacccagattcataaagcaagtcctgagtgacctacaaagagacttagactcccacacattaataatgggagactttaacaccccactgtcaacattagacagatcaacgagacagaaagtcaacaaggatacccaggaattgaactcagctctgcaccaagcagacctaatagacatctacagaactctccaccccaaatcaacagaatatacatttttttcagcaccacaccacagctattccaaaattgaccacatacttggaagtgaagctctcctcagcaaatgtaaaagaacagaaattataacaaactatctctcagaccacagtgcaatcaaactagaactcaggattaagaatctcactcaaagccgctcaactacatggaaactgaacaacctgctcctgaatgactactgggtacataacgaaatgaaggcagaaataaagatgttctttgaaaccaacgagaacaaagacacaacataccagaatctctaggacgcattcaaagcagtgtgtagagggaaatttatagcactaaatgcccacaagagaaagcaggaaaagatccaaaattgacactctaacatcacaattaaaagaactagaaaagcaagagcaaacacattcaaaagctagcagaaggcaagaaataactaaaatcagagcagaactgaaggaaatagagacaacaaaaaaaaaaacccttcaaaaaattaacgaatccaggagctggtttttttgaaaggatcaacaaaattgatagaccgctagcaagactaacaaagagaaaaagagagaagaatcaaatacacgcaataaaaaatgataaaggggatatcaccaccaccgatccccacagaaatacaaactacccatccagagattactacaaacacctctacgccaaataaacttgaaaatctaggagaaataaggattaattcctcgacacatacactctcccaagactaaaccaggaagaagttgaatctctgaacagaccaataacaggagctgaaattgtggcaataatcaatagcttaccaaccaaaaagagtccaggaccagatggattcacagccgaattctaccagaggtacaaggaggaactggtaccattccttctgaaactattccaatcaatagaaaaagagggaatcctccctaactcatttgatgagacgagcatcatcctgataccaaagccgagcagagacacaaccaaaagagagaattttagaccaaggtgcgttgatgaacattgatgcaaaaatcctcaataaaatactggcaaaacgaatccagcagcacatcaaaaaagcttattcaccatgatcaagtgggcttcatccctgggatgcaaggttggttcaacatacgaaaatcaatgaatgtaatccagcatataaacagaaccaaagacaaaaaccacatgattatctcaatagatgcagaaaaaggcctttgacaaaattcaacaacccttcatgctaaaaactctcaataaattaggtattgatgggacgtgtttcaaaataataagagctatctatgacaaacccacagccaatatcatactgaatgggcaaaaactggaagcattccctttgaaaactggcacaagacagggatgccctctttcaccacatactaccattaacatagtattctgccccatagtgttctggccagggcaatcaggcaagagaaggaaataaagggtattcaattaggaaaagaggaagtcaaattgtccctgtttgcagatgacatgattgtatatctagaaaaccccattgtctcagcccaaaatctccttaagctgataagcaacttcagcaaagtctcaggatacaaaatcaatgtacaaaaaatcacaagcattcttatacaccaacaacagacaaacagagaaccaaatcatgagtgaactcccattcacaattgcttcaaagagaataaaatatctaggaatccaatttacaagggatgtgaaggacctcttcaaggagaactacaaaccactgctcaacgaaataaaagaggatacaaacaaatggaagaacattccatgctcatgggtaggaagaatcaatatcgtgaaaatggccatactgcccaaggtaatttatagattcaatgccatccccatcaagctaccaatgactttcttcacagaattggataaaactactttaaagttcatatggaaccaaaaaagagccctcattgccaagtcaatcctaagccaaaagaacaaagctggaggcatcacgctacctgacttcaaactatactacaaggctacagtaaccaaaacagcatggtactttttaccaaaacagagatatagatcaatggaacacaacagagccctcagaaataacaccgcatatctacaactatctgatctttgacaaatctgacaaaaacaataaatggggaaaggattccctatttaatgaatggtgctgggaaaactggctagccatatggagaaagccgaaactagatcccttccttacaccttatacaaaaatcaattcaagatggattaaagacttaaatgttagacctaaaaccataaaaaccctagaagaaaacctaggcattaccattcaggacataggcgtgggcaaggacttcatgtccaaaacaccaaaagcaatggcaacaaaagccaaaattgacaaatgggatctaattaaactaaagagcttctgcacagcaaaagaaactaccatcagagtgaacaggcaacctacaacatgggagacaattttcacaacctactcatctgacaaagggctaatatccagaatctacaatgaactcaaacaaatttacaagaaaaaaacaaacaaccccatcaaaaagtgggcgaaggacatgaacagacacttctcaaaagaagacatttatgcagccaaaaaacacatgaaaaaatgctcatcatcactggccatcagagaaatgcaaatcaaaaccactatgagatatcatctcacaccagttagaatggcaatcattaaaaagtcaggaaacaacagaaccaatgacaaaaaccaagtgattatctcaatagatgcagcaaaggccttcgagaaaattcaacaccccttcatgccaaaaatactcaaaaaactaggtattgatggaacgtatctcaaaataataagagctatttatgacgaacccacagccaatatcatactgaatcggcaaaagctgaaagcattccctttgaaaaccagcacaagacaaggatgccttctcttaccactcctattcagcatagtattggaagttctgaccagggcaatcaggcaagagaaagaaataaagggaattcaaataggaagaaaagaagtcaaatcatctctgtttgcagatgatatgattgtatacctagaaaaccctaaagcctcatccaaaaagcttccagaactaaacaaagacacaatataccagaatctctgggatgcattcaaagcagtatgtagagggaaatttacagcactaaatgcccacaagagaaagcaggaaagatccaaaattgacaccctaacatcacaattaaaagaactagaaaagcaagagcaaacacattcaaaagctatcagaagacaagaaataactaaaatcagagcagaactgaaggaaatagagacacaaaaaacccttcaaaaaattaatgaatccaggagctggttttttgaaaggatcaacaaaattgatagaccgctagcaagactaataaagaagaaaagagagaagaatcaaatagacacaataaaaaatgataaaggggatatcaccaccaatcccacagaaatacaaaccaccatcagagaatactacaaacacctctacgcaaataaactagaaaatctagaagaaatggatacattcctggacacatacactctcccaagactaaaccaggaagaagttgaatctctgaatagaccaataacaggagctgaaattgtggcaataatcaatagcttaccaaccaaaaagagtccaggaccagatggatccatagctgaattctaccagaggtacaaggaggaactgctgataagcaacttcagcaaagtctcagcatacaaaatcaatgtacaaaaatcacaagcattcttatacaccaacaacagacaaacagagagccaaatcatgagtgaactcccattcacaattgcttcaaagagaataaaatacctaggaatccaacttacaagggatgtgaaggacttcttccaggagaattacaaaccactgctcaaggaaataaaagaggatacaaacaaacggaagaacattccatgctcatgggtaggaagaatcaatatcgtgaaaatggccatactgcccaaggtaatttttagattcaatgccatccccatcaagctaccaatgcctttcttcacagaattggaaaaaactactttaaagttcatatggaaccaaaaaagagcccgcatcgccaagtcaatcctaagccaaaagaacaaagctggaggcatcacactacctgacttcaaactatactacaaggctacagtaaccaaaacagcatggtactggtaccaaaacagggatatagatcaatggaacagaacagagccctcagaaataatgccgcatatctacaactatctgatctttgacaaacctgagaaaaacaagcaatggggaaaggattccctttttaattaa

SEQ ID NO: 126647 - DNA, 2614 bp, Homo sapiens
  misc_feature (1)...(2614): n = a,t,c or g
atggacaaattccttgaaaaatacaccctcctaagactaaaccaggaagaagttgaatctctgaacagaccaatagcaggagctgaaattgtggcaataatcaatagcttactaaccaaaaagagttcaggatcagatggattcacagccgaattctaccagagaattggaaaaactactttaaagttcatacggaaccaaaaaagagcccacatcgccaagtcaatcctaagccaaaagaacactgctggaggcatcacgctacctgacttcaaactatactacaaggctacagtaaccaaaagagcatggctcagcgctgaagcccgagaggactgcggctggaaagcggccgagcacatggacgagctcctggcgcgcctgctgcagggtctgggttctcaggccgggggccgcgggcgtcctcggagcctcggcgggacgtgggggctcgggtgtactggccgggccgatgcaggaaagcgggagcgcgtaattcttcggcctgtggtggacacagatgtgtgcagggagatctttctccatatcagtaatggcagaaccctgggagtcacccttcagactcagtcacttaagagccctgtcaaagttatcttcaaagtgcttctgtcccatccactgccttctccactgtccttctgtccttgccacacccttgtcaccattacccctcccctggcccctctggccctctgccaaatgattcgctacacatcagaacacttaaggagttccgtgatcgaccgaaaggacttaataatcaaaaggattaagcccaaaccccagcaaggagatgacatcacagtggtagacgtagagaagcagattgaggccttccgcagccgcctgatccagatgctgggggagcctcttgtcccccaactccaagacaaagtgcacttgttgaagctcctgctcttctatgctgcggacttgaaccctgatgcagagccctttcaaaagggctggagcggctcctgagggcctgccaagcactgaatgccaagaatacctcctgaactctctctccaactgctcagaagctctaaaagcatgaaaagtggttaaaatcttacaggaccaaacctgcattatttaatcagtaggttgtaatttctaaactctagtaaatatctttttttaaaataatcctatcatagcctgttctcaaatatggcttaaatatacaaggtatatatattttttaataaattatttatctatacttttttgaaacaggttaatactctgtgcatcacatgtttaacattttcattcaagatgtggaaaaaatccctctgactgaacctagtctatacaccaatattatgtcattcaaggtaccgacaacctgtttcaggagagagacgttcatttttccctaatgaaatgcaagcattctgttagacctattatattgcctgttaatttgactgtaatgaatagggggtagaaacaaaaggatcaagtgtgttataaaacatttgatgttaaaaggagacaataaaaaggcaatggtttttcaaaataccaagttcagtgtgactctgggtgggcagagtggaataactattgttaaaaggacaaaaaaatagccacatttgagaatagttgtaaggattgggagttgtcaaaactgagatcataatagaagactacaaataaattaattgttctccataaattttagactccagggcctctctatggaaaggcccagcttcttatacagacaaggtactatccaaaaaaaaaagcaggtatttggagacagtgttcaagacaaccaagtgaacttgtaacacagtgaagagaaaataaaaaggtggctttccgtatttccctccctcaagtaaggtttatgtgttgccataaaggggatgaggcctcattttttggtggaaaaatgctttccataccaggaaaatttttgaattggagtgacctcccccgcacagggcgttcccgggggncctgaccctggaaccaaggaaatccaaagtaaggttaacacccactgggctttcaccatggaacctcaagactataatcctaacgggtatcctacccatctcctttactttaaaaaaagtttaatgtccatttacctatacccaattcagtagacttaattttctcttttagaaagtttttaaccaaattacagctaaagttaatctcactttaaagtgcaagaaaggctctgctagagtagtgtttgttctgtggcatagaaagaggagcatgccgtcctccggcacctgcctaagaggccccgacatgaagaactagctgcaagacagtgatccattaggtctgccaaaaagcagggggactcaaggttcagcctagaaagaggggtccctgccaagtctggcttttacctgtacccaggtcccaaacaaaccttgggtcccctaactgataaggctggagcacagcaccagtcatcaacagggccaaagtcgtcttagcgagtcagtgagcacctctaagccatgatttgtcaatgctcacatggatagtggtaaaggaataaagaagcctgggttttggaacagtacaaacattctttacctagtaagcagtgatc

SEQ ID NO: 126648 - DNA, 1380 bp, Homo sapiens
atgaataatgctaaagaaaactttcttggaaggttccaagatggccgaataggaacagctccagtctacagcccccagcatcagcgacgcagaagacgggtgatttctgcattaccaactgagcctccactggtgatacccaggcaaacagggtttggagtggacctccagcaaactccaacagacctgcagctgagggtcctgactgtgagaaggaaaactaccaaacaggaaggacattccaccaaaaccccatctgtacgttaccatcatcaaagaccaaaggaagataaaaccacaaagatggggagaaaccagagcagaaaagctgaaaattctaaaaatgagagcgcctcttctcctccaaaggaatgcagctcctcgccagcaacagaacaaagctggatggagaatgactttgacaagtacacagaagtaggcttcagacaactggtaataacaaacttctctgagctaaaggaagatgttcaaacccatcacaaagaagctaaaaatcttgaaaaaagattagacgaatggctaactagaataaacagcatagagaataccttaattgatctgatggagctgaaaaccatggcacgagaactacgtgactcatgcacaagcttcagtagacaattcgatcaagtggaggaaagggtatcagtgattgaagatcaaatgaacgaaatgaagcgagaagagaagtttagagaaaaaaagatgctggaagttctgcccagggcaatcaggcaggagaaagaaataaagggtattcaattaggaaaagaggaagtcaaattgtccctgtttgcagataacatgactgtatatttagaaaaccccatcatctcagcccaaaatctccctaagctgataagcaacttcagcaaagtctcaggatataaaatcaatgtgcaaaaatcacaagcattcctatacaccaataacagacaaacagagagccaaatcatgagtgaactctcattcacaattgcttcaaagagaataaaatacctaggaatccaacttaaaagggatgtgaaggaactcttcaagaactacaaaccactgctgaaggaaataaaggaagacacaaacaaatggaagaacatcccatgttcatgggtaggaagaaccaatatcgtgaaaatggccatactgcccaagataatttatagattcaatgctatccccatcaagccaccaatgactttctttacagaattggaaaaaactactttaaagttcataaggaaccaaaaaagagcccacattgccaagacaatcctaagcaaaaagaacaaagctggaggcatcatgctacctgacttcaaactatactacaaggctacagtaacaaaaacagcatggtaa

SEQ ID NO: 126649 - DNA, 2212 bp, Homo sapiens; identical to SEQ ID NO: 118969

SEQ ID NO: 126650 - DNA, 1444 bp, Homo sapiens
ttaagaagcatgacaatgcttcagacttgatgactttgaaatctgttgttcttcatggtgcactggcgcttggctgtctcgcttaatcattgtggcattaatgatgccactagtggcttgaggctttaactgggtactcagacccagtctgatggtagtttcttttgctgtgcagaagctctttagtttaatcagatcccatttgtcaattttggcttctgttgccattgcttttggtgttttagacatgaagtccttgcccatgcctatgtcctgaatggtattgcctaggttttcttctaggatttttatggttttaggtctaacatttaagtctttaatccatcttgaattaatttttgtataaagtgtaaggaggggatccagtttcagctttctccatatggctagccagttttccaagcaccatttattaaatagggaatcctttccccatttcttgtttttgtcaggtttgtcagagatcagatggttgtagatatgcagcattatttctgagggctctgttctgttccattgctctgtatctctgttttggtaccagtaccatgctgttttggttactgtagccttgtagtatagtttgaagtcaggtagagtgatgcctccagctttgttcttttggcttaggattttcttggcaatgcggtctcttttttggttccatatgaactttaaagtagttttttccaattctgtgaagaaagtcattggtagcttgatggggatggcattgaatctgtaaatttccttgggctgtatggccattttcacagtactgattcttcctacccatgagcatggaatgttcttccatttctttgtatcctcttttatttccttgagcagtggtttgtagttctccttgaagaggtccttcacgtcccttgtaagttggattcctaggtattttattctctttgaagcagttgtgaatgggagttcactcatgatttggctctctgtttgtctgctattggtgtataagaatgcttgtgatttttgcacattgattttgtatcctgagactttgctgaagttgcctatcagcttaaggagattttgggctgagactatggggtttcctacatatataatcatgtcatctgcaaacagggacactttgacttcatcttttcctaattgaataccctttatttccttctcctgcctgattgccctggccagaacttccaacacaatgttgaataggagtggtgagagagggcatccctgtcttgtgccagttttcaaagggaatgcttccaggttttgccattcagtatgatattggctctggtagaattcggctgtgaatccatctggtcctggactttttttgattggtcggctattaattattgcctcaatttcagagcctcttattggtctattcagggattcaacttcttcctggtttagt

SEQ ID NO: 126651 - DNA, 1413 bp, Homo sapiens
atggggagaaaccagagcagaaaagcggaaaattctaaaaaccagagcacctcttctcctccaaaggattgcaactcctcgccagcaacagaacaaaggtggatggagaatgactttgatgagctgacagaagtaggcttcagaagaaccaatgaaaaaaaccacatgattatattaatagttgcagaaaaggcctttgacaaaattcaacagcccttcatgctaaaaactctcaacaaactacgtattgatggaatgtacgtcaaaataataacagctatttatgacaaacccacagccaatatcatcctgaatgggcaaaaactggaaagattccctttgaaaactggcacaagacagggacaccctctctcaccactcctattcaacatagtgtcggaagttctggccagggcaatcaggcaagagaaagaaataaaggacaaacagagtcaaattatgagtgaactcccattcacaattgctacaaagagaataaaatacctaggaatccaacttatgagggatgtgaacgacctcttcaaggagaactacaaaccactgctcaacgaaataaaagaggacacaaacaaatggaggaacattctatgctcacggttaggaggaatcaatatcgtgaaaatggccatactgcccaagaattggaaaaaaactactttaaagtttatctggaaccaaaaaagagcccgcattgccaagacactcctaagcaaaaagaacaaagctggaagcatcatgctacctgacttcaaactatactacaaggctacagtaatcaaaacagcatgttactggtaccaaaacagatatatcaaccaatggaacagaatggaggcctcagaaataacaccacatatctacaaccatctgatctttgacaaacctgacaaaaacaagaaatggggaaaggattccctatttaataaatggtactggggaaactggctagccatgtgtagaaagctgaaactggatcccttccttacacctcatataaaaattaattcaagatggattaaagacttaaatattagacctaaaaccataaaaaccttagaagaaaacctaggcaataccattcaggacataggcatgggcaaggacttcatgactaaaacaccaaaatcaatggcagcaaaagccaaaattgataaatgggatctaattaaactaaagagcttcggcacagcaaaagaatctaccatcagagtgaacaggctacctacagaatgggagaaaatttttgcaatctactcatctgacaaagggctaatatccagaatctacaatgaattcaaacaaatttacgagaaaaaaatcaaacaaccccatcaaaaagtgggcaaaggatatgaacagacacttctcaaaagaagacatttatgcagctga

SEQ ID NO: 126652 - DNA, 1464 bp, Homo sapiens; identical to SEQ ID NO: 123064

SEQ ID NO: 126653 - DNA, 1917 bp, Homo sapiens
atggataaattcttggacaaatccacccttccaagactaaaccaggaagaagatgaatctctgaatagacaagtaacaggctctgaaattgaggcaataattaatagcctaccaaccaaaaagagtccaggaccagatggattcacagacaaattctgccagaggtacaaagaggagctggtaccattccttctgaaactattccaatcaacagaaaaagagggaatcctccttaactcattttatgaggccggcatcatcttgataccaaagcctggcagagacacaacaaaaaaagagaattttagaccaatatccctgatgagcatcaatgcaaaaatcctcaataaaatactggcaaaccgaatcctgcagcacatcaaaaagcttatccatcacgatcaagtcggcttcatccttgggatgcaaggctggttcaacatatgcaaatcaataaacataatccattgcataaacagaaccaatgacaaaaaccacatgattatctcaatagatgcagaaaaggccttcaacaaaattcaacagcccttcatgctaaaaactctcaataaactggtgttggaagttctggccaaggcaatcaggcaagagaaagaaataaagggtattcaattaggaaaagaggaagtgaaattgtctctgtttgcagatgacatcattgtatatttagaaaaccccatcgtctcagccccaaatctccttaagctgataagcaacttcagaaaagtctcaggatacaaaatcaatgtgcaaaaatcacaagcattcctatacaccaataacagacaaacagagagccaaatcatgagtgaactcccattcacaattgctacaaagagaataaaataccaaggaatccaacttacaagggatgtgaaggacctcttccaggagaattacaaaccagtgctcaacgaaataaaagaggacacaaacaaatggaagaacattccgtgctcatggttaggaagaatgaacatcgtgaaaatggccatactgcccaaggtaatttatagattcaatgccatccccatcaagctatcaatgactttcctcacagaattggaaaaaactactttaaagttcgtatggaaacaaaaaggagcccacattgccaagacaatcctaagcaaaaacaacaaagctggaggcatcatgctacctgacttcaaactatactacaaggctacagtaaccaaaacagcatggtactggtaccaaaacagagagatagaccaatggaacagaacagagccctcagaaataataccacacatctacaaccatctgatctttgacaaacctgacaaaaacaagaaatggggaaaggattccctatttaataaatggtgctgggaacactggctagccatatgtagaaagctgaaactagatcccttccttacaccttatacaaaaattaattcaagatggattaaagacttaaatgttagacctaaaaccataaaaactctagcaggacacctaggcaataccattcgggacataggcttgggcaaggacttcatgactaaaacaccaaaagcaatggcaacaaaagccaaaatagacaaatgggatctaattaaactaaagagcttctgcacagcaaaagaaacggccatcagagtgaataggcaacctacagaatgggagaaaatttttacaatctacccatctgacacagggctaatacccagaatctacaaagaacttaaacaaatttacaagagaaaacaaacagcccatcaagaactgggcaaaggatatgaacagatgtttctcaaaagaagacatttatgcagccaacagacacatgaaaaaatgctcatcatcactggccatcagagaaatgcaaatcaaaaccacaatgagataccagctcacaccagttag

SEQ ID NO: 126654 - DNA, 1899 bp, Homo sapiens; identical to SEQ ID NO: 117580

SEQ ID NO: 126655 - DNA, 1719 bp, Homo sapiens
atggataaattcctcgacacatacaccctcccaagactaaaccaggaagaagttgaatccctgaatagaccaataacaggctctgaaattgaggcaataattaacagcctaccaacccagaaaagttcaggaccagatggattcacagccgaattctaccagaggtacaaggaggagctggtaccattccttctgaaactattccaatcaatagaaaaagagggaatcctccctaactcattttatgaggccagcatcatcctgataccaaagcctggcagatacacacacaaaaaaaacaattttagaccaatatccctgatgaacatcgatgcaaaaatcctcaataaaatactggcaaaccgaatccagcagcacatcaaaaagcttatccaccaggatcaagtgggcatcatccctgggatgcaaagctggttcaacatacacaaatcaataaatgtaatccagcatataaacagaaccaaagacaaaaaccacatgattatctcaatagatgcagaaaaggcctttgacaaaattcaacaaccattcatgctaaaaactctcaataaattagagaataaaatacctaagaatccaacttacaagggatgtgaaggacctcttcaaggagaactacaaatcactgctcaacgaaataaaggaagacacaaacaaatggaagaacatcccatgctcatggataggaagaatgaatatcataaaaatggccatactcccaaggtaatttatagattcaatgtcatccccatcaaactaccaatgactttcttctcagaattggaaaaatctacgttaaagttcatatggaaccaaaaaagagcccgcattgccaagacaatcctaagccaaaagaacaaagctggaggcatcatgctacctgacttcaaactatactacaaggctacagtaaccaaaacagcatggtactggtaccaaaacagagatatagaccaatggaacagaacagagccctcagaaatgacaccacacatctacaaccatctgatctttgacaaacctgacaaaaacaagcaatggggaaaggattccctatttaataaatggtgctgggaaaactggctagccataggtagacagctgaagctggatcccttccttacaccttatacaaaaattaattcaaggtggattaaagacttaaatgttagacctaaaaccatcaaaaccctagaggaaaacctaggcaataccattcaggacataagcatgggcaaggacttcatgtctaaaacaccaaaagcaatggcaacaaaagccaaaatggacaaatgggatctaattaaactaaagagcttctgcacagcaaaagaaactaccatcagacaaagttggcccgagatgaccaaattcacattctcaagcaacaccgacgtaaagaactggaaacacggcaaaaacaatatcgggagacataagacatcagtcaatacatgtaagatggacagtggtttggttttggaaagatggatggagtggaaccctggcttccccttgagcatcgatgccaaatgccacaaggatttaccccgtgatatccagtttgatagtgaaaaaggagtggactttgttctgaattactccaaagcgaatatgcgttgggcagggtctatgtttctcgtacctccaccccgtggtgaagatgaggaataccacactgtcttccacaatggttga

SEQ ID NO: 126656 - DNA, 1827 bp, Homo sapiens
atgaaggcagaaatcaagatgttctttgaaaccaacgagaacaaagacacaacatgtcagaatctctgggacgcattcaaagcagtgtgtagagggaaatttatagcactaaatgcacacaagagaaagcaggaaagatccaaaattgacaccctaacatcacaattaaaagaactagaaaagcaagagcaaacacattcaaaagctagcagaaggcaagaaataactaaaatcagagcagaactgaaggaaatagagacacaaaaaacccttcaaaaaattaatgaatccaggagctggttttttgaaaggatcaacaaaattgatagaacgccagcaagactaataaagaaaaaaagggagaagaatcaaatagacgcagtcaaaaatgataaaggggatatcaccaccaatcccacagaaatacaaagtaccatcagagaatactacaaacacctctatgcaaataaactagaaaatctagaagaaatggataaattcctcgacacatacactctcccaagactaaaccaggaagaaattgaatctctgaatagaccaattacaggatctgaaattgtggcaataatcaatagcttaccaaccaaaaagagtccaggaccagatggattcacagccgaattctatcagaggtacaaggaggaactggtaccattccttctgaaactattccaatcagtagaaaaagagggaatcctccctaactcattttatgaggccagcatcattctgataccaaagccgggcagagacacaaccaaaaaagagaattttagaccaatatccttgatgaacattgatgcagaaatcctcaataaaatactggcaaaacaaatccagcagcacatcaaaaagcttacccaccataatcagagaataaaatacctaggaatccaacttacaagggatgtgaaggacctcttcgaggagaactacaaaccactgctcaaggaaataaaagaggatacaaacaaatggaagaacattccatgctcatgggtaggaagaatcaatatcgtgaaaatggccctactgcccaaggtaatttacagattcaatgccatccccatcaagctagcaatggctttcttcacagaattggaaaaaactactttaaagttcatatggaaccaaaaaagagcccacattgccaagtcaatcctaagccaaaagaacaaagctggaggcatcacgctacctgacttcaaactacactacaaggctacagtaaccaaaacagcatggtactggtaccaaaacagagatatagatcaatggaacagaacagagccctcagaaataacaccgcatatctacaactatctgatctttgacaaacctgagaaaaacaagcaatggggaaaggattccctctttaataaatggtgctgggaaaactggctagccatatgtagaaagctgaaactggatcccttccttacaccttatacaaaaattaattcaagatggattaaagacttaaacgttagacctaaaaccataaaaaccctagaagaaaacctaggcattaccattcaggacataggcatgggcaaggacttcatgtctaaaacaccaaaagcaatggcaacaaaagccaaaattgacaaatgggatctaattaaactcaagagcttctgcacagcaaaagaaactaccatcagagtgaacaggcaacctacaaaatgggagaaaattttcacaacctactcatctgacaaagggctaatatccagaatctacaatgaactcaaacaaatttacaagaaaaaaacaaccccatcaaaaagtgggcggaggacatga

SEQ ID NO: 126657 - DNA, 1377 bp, Homo sapiens
cctctgctgctgatgcccaggcaaacaggatctggagtggacctccagcaaactccaacagacctgcagctgagggtcctgattcttagaaggaaaactaacaaacagaaaggacatccacaccaaaaccccatctgtacgtcaccttcatcaaagaccaaagtgttggaagttctggccagggcaatcaggcaggagaaggaaataaagggtattcaattaggaaaagaggaagtcaaattgtccctgtttgcagatgacatgattgtatatctagaaaaccccatcatctcagcccaaaatctccttaagctgataagcaacttcagcaaagtctcaggatacaaaatcaatgtgcaaaaatcacaagcattcttatactccaataacagacaaacagagagccaaatcatgagtgaactcccattcacaattgcttcaaagagaataaaatacctagcaatccaacttacaagggatgtgaaggacctcttcaaggagaactacaaaccactgctcaatgaaataaaagaggatacgaacaaatggaagaacattccatgctcatgggtaggaagaatcaatatcatgaaaatggatatactgcccaaggtaatttatagattcaatgccatccccatcaagctaccaatgactttcttcacagaattggaaaaaactactttaaagttcatatggaaccaaaaaagagcccgcattgccaagacaatcctaagccaaaagaacaaagccggaggcatcacgctacctgacttcaaactatactacaaggctacagtaaccaaaacagcatggtactggtaccaaaacagcgatatagaccattggaacagaacagagccctcagaaataatgccacacatctacaactatctgatctttgacaaatctgacaaaagcaggaaatggggaaaggatttcctatttaataaatggtgctgggaaaactggctagccgtatgtagaaagctgaaactggatctcttccttacaccttgtagaaaaattaattcaagatggattaaaaacttaaatgttagacctaaaaccataaaaaccctagaagaaaacctaggcaataccattcaggacataggcatgggaaaggacttcatgtctaaaacaccaaaagcaatggcaacaaaagccaaaattgacaaatgggatctaattaaactaaagagcttctgcacagcaaaagaaactaccgtcagagtgaataggcaacctacagaatgggagaacatttttgcaatctacttatctgacaaagggctaatatccagaatctacaaagaactcaaacaaatttacaagaacaaaacaaccccatcaacaagtggacaaaggatatga

SEQ ID NO: 126658 - DNA, 1542 bp, Homo sapiens; identical to SEQ ID NO: 117584

SEQ ID NO: 126659 - DNA, 1869 bp, Homo sapiens
atggataaattcctggacaaatacaccctcccaagactaaaccaggaagaagttgaatctctgaatagaacaataacaggctccgaaattgaggcaataattaatagcctatcaaccaaaaaaagtccaggaccagacggattcacagccgaattctaccagaggtacaaagaagagctggtaccattccttctgaaacttttccaatcaatagaaaaagagggaatcttccctaacttattttatgaggccaacatcatcctgataccaaagcctggcagagacacaacaaaaaaagagaattttagaccaatatccctgatgaacgtcaatgcaaaaatcctcaataaattactggcaaaccaaatccagcagcacatcaaaaagcttatccaccacaatcaagttggcttcatccctgggatgcaaggctggttcaacatatgcaaatcaataaacgtaatccagcatataaacagaaccaaagacaaaaaccacaggagtatctcaatagatgcagaaaaggccttcaacaaaattcaacagccatttatgctaaaaactctcaataagctagatgacatgattgtatatttagaaaatcccatcgtctcagccaaaaatctccttaaactgataagcaacttcagcaaagtctcaggatacaaaatcaatgtgcaaaaatcacaagcattcttatacaccaataacagacaagcagagagccaaatcatgagtgcagtctcattcacaattgcttcaaagagaataaaatacctaggaatccaacttacaagggatgtgaaggacctcttcaaggagaactacaaaccagtgctcaacaaaataaaagaggacacaaacaaatggaagaacattccaagcttatggatagggagagtcaatatcatgaaaatggccatactgcccaaggtaatttatagattcaatgccatccccatcaagctaccaatgactttcttcacagaattggaaaaaactactttaaagttcatatggaaccaaaaaagagcccacattgccaagacaatcctaagcaaaaagaacaaagctggaggcatcacactacctgactttaaactatactacaaggctacagtaaccaaaacagcatggcactggtaccaaaacagagatatagaccaatggaacagaacagagccctcagaaataataccacacatctacaaccacctgatctttgacaaactggacaaaaacaagacattgggaaaggattacctatttaataaacggtgctgggaaaactggctagccatatgtagaaagctgaaactggatcccttccttacacgttatacaaaaattaattcaagatggattaaagacttaaatattagacctaaaaccataaaaaccctagaagaaaacctaggcgataccattcaggacataggcatgggcaaggacttcataactaaaacaccaaaagcaatggcaacaaaagccaaaattgacaaatgggatctaattaaactaaagagcttctgcacagcaaaagaaactaccatcagagtgaacaggcaacctacagaatgggagaacatttttgcaatctacccatctgacaaagggctcatatccagaatctacaaagaacttaaacaaatttacaagaaaaaatcaaacaaccccatcaaaaagtgggcgaaggatatgaacagatatttctcaaaagaagacatttatgcagccaacagacacatgaaaaaatgctcatcatcactggccctcagagaaatgcaaatcaaaaccacaatgagataccatctcataccagtaagaatggcgatcattaaaaagtcaggaaacaacaggtgctggtga

SEQ ID NO: 126660 - DNA, 1578 bp, Homo sapiens
tcatttcttgtttttgtcaggtttgtcaaagatcagatagttgtagatatgcggcattatttctgagggctctgttgtgttccattgatctatatctctgttttggtaccagtaccatgctgttttggttactgtagccttgtagtatagtttgaagtcaggtagcatgatgcctccagctttgttcttttggcttaggattgacttggcgatgtgggctcttttttggttccatatgaactttaaagtaattttttccaattctgtgaagaaagtcattggtagcttgatggggatggcattgaatccataaattatcttgggcagtagggccattttcaagatattgattcttcctacccatgagcatggaatgttcttccatttgtttgcatcctcttttatttcactgagcagtggtttgtagttctccttgaagaggtccttcacgtccctcgtaagttggattcctaggtattttattctctttgaagcaattgtgaatgggagttcactcatgatttggctctctgtttgtctgttactggtgtataagaatgcttgtgatttttgtgcattgattttgtatcctgagattttgctaaggttgcttatcagcttaaggagattttgggcttttatttccttctcctgtctaattgccctggccagaacttccaacactatgttgaataggagtggtgagagagggcatccctgtcttgtgccagttttcaaagggaatgcttccagtttttgcccattcagtatgatattggctgtgggtttgtcatagatagttcttattattttgagatacgtcccattaatacctaatttattgagagtttttagcatgaagcattgttgaattttgtcaaaggccttttctgcatctattgagataatcatgtggtttttgtctttggttctgtttatatgctggattacatttattgatttgtgtattttgaaccagccttgcatcccagggatgaagcccacttgattttggtggataaactttttgatgtgctgctggattcggtttgccagtattttactgaggatttttgcatcaatgttggtcaaggagattggtctaaaattctctttttttgttgtgtctctgccaggctttggtatctggacgatactggcctcataaaatgagttagggaggtttccctctttttctattgattggaatagtttcagaaggaatggtaccagctcctccttgtacctctggtagaattctgctgtgaatccatctggtcctggactctttttggttggtatgctattgattattgccacaatttcagagcctgttattggtctattcagagattcaacttcttcctggtttagtcttgggagggtgtatgtgtccaggaatctatccatttcttctagattttcccgtttatttgcgtagaggtttttgtagtattctctgatggtagtttgtatatctttgaacattcggcatatctttgcaaataacagctgcttttggttatgttggtggccactgctgttctttttctggctgggaaaggtttcagtcaacat

SEQ ID NO: 126661 - DNA, 1692 bp, Homo sapiens
ttatttcttgtaaatttgtttaagttctttgtatattctggatattagccctttgtcagatggacagattacaaaaattttctcccattctgtaggtttcctgttcactctgatgatagtttcttttgctgtgcagaagctctttagtttaattagatcccatttgtcaattttggcttttgttgccattgcttttggtgttttaatcatgaagtctttacccatgcctatgtcttgaatgctattgcctaggttttcttctagggtttttatggttttaggtcttacatttaagtctttaatccatcttgagttaatttttgtataaggtgtaaggaaggggtccaatttcagctttctgcatatggctatccagttttccgaagaccattcatgaaatagggaatcctttccccatagctcgtttttgtcaggtttgtcaaagatcagatggttgtagacgtgtggtgttattttgcaggcctctgttctgttccattggtctatatatctgttttggtaccagtaccatgctgttttggttactgtagccttgtagtatagtttgaagtcaggtagtatgatgcctccagctttgttctttttgcttcggcttttcttggctatgtgggctcttttttggttccatataaaatttaaagtagtcttttccaattctgtgaagaaagtcaatggtagcttgatgtggatagcattgaatctataaattactttgggcagtacggccattttcatgatattgattcttcctatccatgagcatggaatgtttttccatttgtttatgtcctctcttatttcgttgagtagtggtttgtagttctccttgaagaggtccttcacatcccttgtaagttggattcctaggtattttattctctttgtagcaactgtgaatgggagttcactcatgatttggatctctgtctcttgtctattattggtgtataggaatgcttgtgatttttgcacattgattttgtatcctgagactttgctgaagttgcttatcagcgtaaggagatttggggctgagacaatggggttttctaaatatacaatcatgtcatctgcaaacaaagacaatttgactttctctctgcctatttgaatacgctttattgctttctcttgcctgattgacctggccaggacttccaacgctatgttgaataggagtggtgagagagggcatccttgtcttgtgccggttttcaaagggagtgcttcctggttttgcccattcagtataatattggctctgggtttgttgtaaatagctcttattattttgagataccttccatcgatacctagtttttgggagtttttagcataaaaggctgttgaattttgtcgaaggccttttctgcattttatttcattgagttgatcttcaatctctgatagcctttcttctgcttggtcaattcggctattgatacctctgcatacttcatgaagttctcgtgctgtgtttttcagcttcatcaggtcatttatgttcttctctacactggttattcttctgaagcctacttctgtcaattcatcaaactcattctttgtccagttttgttcccttgctggagaggagttgtgatcctttgcgggagaggaggcgttctggtttttggaattttcagcctttttgcgctggtttctccccat

SEQ ID NO: 126662 - DNA, 1551 bp, Homo sapiens
ctaactggtgtgagatagtatctcattgtggttttgatttgcatttctctgatgaccagtgatgatgagcattttttcatgtgtctgttgactgcataaatgtcttcttttgagaagtgtctgttcatatccttcacccactttttgatggggttgtttttttttcttgtaaatttgtttgagttctttgtagattctggatattagccctttgtcagatgagtagattgcaaaaattttctccaattctgtaggttgcctgtttactccgatggtagtttcttttgctgtgcagaagctctttagtttaattagatcccatttgtcaattttggcttttgttgcgattgcttttggtgttttagacatgaagtccttgcccatgcctatgtcctgaatggtaatgcctaggttttcttctagggtttttatgggtttaggtctaacatttaagtctttaatccatcttgaattaatttttgtgtaaggtgtaaggaagggatccagtttcagctttctacatatggctagccagttttcccaacaccatttattaaatagggaatcctttccccatttcttgtttttgtcaggtttgtcaaacatcagatggttgtagatgtgtggtattatttctgagggctctgttctgttgcattggtctgtatatctgttttggtaccagtaccatgctgttttggttactgtagccttgtagtatagtttgaagtgaggtagcatgatgcctccagctttgttctttttgcttaggattgacttggcaatgtggactcccttttggttccatatgaactttaaagtagttttttccaattctgtgaagaaagtcattggtagcttgatgtggatggcattgaatctataaattaccttgggcaatatggccattttcacaatattgattcttcctatccatgagcatggaatgttcttccatttgtttgtgtcctcttttattttgttcagcagtggtttgtagttctccttgaagaggtccttcacatcccttgtaagttggattcctaggtattttattgtctttgaggcaattgtgaatgggagttcactcatgatttggctctctgtttgtttgttattggtgtataagaatgcttgtgatttttgcacattgattttgtatcctgagactctgctgaagttgcttattagcttaaggagattttgggctgagacggtggggttttctaaatatacaatcatgtcatctgcaaacagggacaatttgacttcttcttttcctaattgaataccctttatttctttctcctgcctgattgccctggccagaacttccaacactgagtcaacaccaacgacagcaacactgtgcacacagtcactagcaggggctctccacccacaccgcagctgcattacctctgccttgtatctaccctcatcaactatttttgccagatctgggtaacttgctacagctcctccatcagcacttgctgcttcactgggctcttttatgttatgaagatggattttttccttaaatctcat

SEQ ID NO: 126663 - DNA, 1995 bp, Homo sapiens
tcatgtgtcttttgagaagtgtctgttcatatcctttgcccactttttgatggggttgtttgtttttttcttgtaaattagtttgagttctttgtagattctggatattagccttttgtcagatgagtagattgcaaaaattttctcccattctgtaggttgcctgttcactctgacagtagtttcttttgctgtgcagaagctctttagtttaattagatcccatttgtcaattttggctttggttaccattgcttttggtgttttacacatgaagtccttgcccatgcctatgtcctgaatggtattgcctaggttttcttctagggtttttatggttttaggtctaacgtttaagtctttaatccatcttgaattaatttttgtgtaaggtgtaaggaagggatccagtttcagttttctacatatggctagccagttttcccagcaccatttattaaataggaaatcctttccccatttcttgtttttgtcaggtttgtcaaagatcagatggctgtagatgtgtggtattgtttctgagggctctgttctgttccattggtctatatctctgttttggtaccagtaccatgctgctttggttactgtagccttgtagtatagtttgaagtcaggtagcatgatgcctccagctttgttcttttggcttaggattgacttggcaatgcaggctcttttttggttccatatgaactttaaagtagttttttccaattctgtgaagaaaatcattggtagcttgatggggatggcactgagtctataaattaccttgggcagtatggccattttcacgatattgattcttcctatccatgaccatggaatgttcttccatttgcttgtgtcctcttttatttccttgagcattagtttgtagttctccttgaagagaggtccttcacatcccttgtaagttggattcctaggtattttattctctaatttattgagagtttttagaatgaagggctgttgaattttgtagaaggccttttctgcatctattgagataatcatgtggtttttgtctttggttctgtttatatgctggattacatttattgatttgcgtatgttgaaccagcattgcatcccaggaatgaagccagcttgatcatggcggataaggtttttgatgttctgctgcatttggtttgccagtattttattgaggatttttgcatcgatgttcatcagggatattggtctaaaattctctttttttgttgtgtctctgcccagctttggtatcaggatgatgctggcctcataaaatgagttagggaggattccctctttttctattgattggaatagtttcagaaggaatggtaccagctcctccttgtacctctggtagaattcggctgtgaatccgtctggtcttggactttttttggttggtaagctattaattattgcctcaatttcagagcctgttattggtctattcagagattcaacttcttcctggtttagtcttgggagggtgtatgtgtcgaggaatttatccatttcttctagattttctagtttatttgcatagaggtgtttataatattctctgatggtagtttgtatttctttggtgaatctgacaattatgtgtcttggagttgctcttctcgaggagtatctttgtggcattctctgtatttcctgaatctgaatgttggcttgccttcctaggttggggaagtccttctggataatatcctgcagagtgtcttccaacttgattccattctccccgtcactttcaggtacaccaatcagacatagatttggtctttccatatagtcccatatttcttggaggctttgttcacttctttttattcctttttctctaaacttctcttcttgcttcatttcattcatttgatcttcaatcactgataccctttcttccagttgatggaattggctactgaagcttgtgcattcgtcacgtagttctcgtgccat

SEQ ID NO: 126664 - DNA, 3033 bp, Homo sapiens; identical to SEQ ID NO: 121975

SEQ ID NO: 126665 - DNA, 3750 bp, Homo sapiens; identical to SEQ ID NO: 118974

SEQ ID NO: 126666 - DNA, 2485 bp, Homo sapiens
ggggaagtactacaagctgtcctcaggtactgcccctacgtgtgtttccctgggatggggccttgctagaggtgattctgctgccccagcattgggaagcaggaccagtgcatgtgccccatgcagccacggtacatggaagctgtcacttgagccatcagaccggctcagcccatgtgaccggagctctgaagaggcacacacgcatgccccgcacaggctgttagcacttgtcgcctcgctgccctggtccagactacccttgcttgccccacagagccactcagaggctgaagccacttcacagcccactggtgttgagaatcatcatcagaaaaccagatatgtcaaggcaggtggtccagtcatctgccggagtctgcctgagtccagggggtttttatgggcttcagaggggaggaagtgcatgctgattggttcgtgggcagccatgggcaggctcagaaaaagcaccataagttctcgttttgggccccagactctagctggaactggcagacctcaggccatccctgtcttgaagaaacacagtgatgcagtcctgcttggggtgtgcttcctgaagctactgcaccagcatcaccaggaacttggtgaaaatgcagattctcagaccctaccccagacccactgggagtttatattgtcagaagattataacaagatgactcctgtgaaaaactatcaagtgttggaagttctggccagggcaatgaggcaggagaagcaaataaagagtattcaattaggaaaagaggaagtcaaattgtctgtgtttgcggatgacatgattgtgtatctagaaaaccccattgtctcagcccaaaatctccttaagctgataagcaacttcagcaaagtctcaggatacaaaataaatgtgcaaaaatcacaagcattcctatacaccaataacagacaaacagagagccaaatcataagtgaactcccattcacaattccttcaaagagaataaaatacctaggaatccaacttacaagggatgtgaaggacctcttcaaggagaactacaaaccactgctcaacgaaataaaagaggacacaaacaaatggaaaaacattccatgctcatgggtaggaagaatcaatatcatgaaaatggccatactgcccagggtaatttatatattcaatgccatctccatcaagctaccaatgactttcttcacagaattggaaaaaactactttaaagttcatatggaaccaaaaaagagcccgcattgccaagacaatcctaagccaaaagaacaaagctggaggcatcacgctacctgacttcaaactatactacaaggctacagtaaccaaaacagcatggtactggtaccaaaacagaggtgtagatcaatggaatagaatagagccctcggaaataataccacacatccacaaccatctgatctttgacaaacctgacaaaaacaagaaatggggaaaggattccctatttaccaaatggtgctgggaaaactggctagccatatgtagaaaactgaaactggatccgttccttacaccttatacaaaaattaattcaacatggattaaagacttaaacgttagacctaaaaccataaaaaccctagaagaaaacctaggcattaccattcaggacataggcatgggcaaggacttcatgtctaaaacaccaaaagcaatggcaacaaaagccaaaattgacaaatgggatctaattaaactaaagagcttctgcacagcaaaagaaactaccatcagagtgaacaggcaacctacagaatgggagaagatttttacaatctacccatctgacaaagggctaatacccagaatctacaaagaacttaaacaaaatttacaagaaaaaatcaaacaaccccatcaaaaagtgggcaaaggatataaacagacatttctcaaaagaagacatttatgcagccaacagacacatgaaaaaatgttcatcatcactggtcatcagagaaatgcaaaacaaaatcacaataagatacatctcacaccagttagaatggcgatcattaaaaagtcaggaaacaacagggacatggatgaagctggaaaccatcattctgagcaaactattgcaaggacagaaaaccaagcaccgtatcttctcactcataggtgggaattgaacaatgagaacacttggacacaggttgaggaacatcacacgctggggcctatcgtgggtgtgatctgtagaaaagtattccctggaaattcagggccttcaaaacccagtgggcttcacttctcccagcccctaccccaagttacttcagttgtggcaaaaataacaattgtcccctgggaaatgaagctcattgctatgggtgttcaagatgaactcaacattgccttccacaaaaatcacttactgatgaatgacaccaccattcatatgacaccctacatccagccagcccccaagtcctga

SEQ ID NO: 126667 - DNA, 2227 bp, Homo sapiens
gacgacctgtctcgccgagcgcacgcttgccgccgccccgcagaaatgcttcggttacccacagtctttcgccagatgagaccggtgtccagggtactggctcctcatctcactcgggcttatgccaaagatgtaaaatttggtgcagatgcccgagccttaatgcttcaaggtgtagaccttttagccgatgctgtggccgttacaatggggccaaagggaagaacagtgattattgagcagagttggggaagtcccaaagtaacaaaagatggtgtgactgttgcaaagtcaattgacttaaaagataaatacaagaacattggagctaaacttgttcaagatgttgccaataacacaaatgaagaagctggggatggcactaccactgctactgtactggcacgctctatagccaaggaaggcttcgagaagattagcaaaggtgctaatccagtggaaatcaggagaggtgtgatgttagctgttgatgctgtaattgctgaacttaaaaagcagtctaaacctgtgaccacccctgaagaaattgcacaggttgctacgatttctgcaaacggagacaaagaaattggcaatatcatctctgatgcaatgaaaaaagttggaagaaagggtgtcatcacagtaaaggatggaaaaacactgaatgatgaattagaaattattgaaggcatgaagtttgatcgaggctatatttctccatactttattaatacatcaaaaggtcagaaatgtgaattccaggatgcctatgttctgttgagtgaaaagaaaatttctagtatccagtccattgtacctgctcttgaaattgccaatgctcaccgtaagcctttggtcataatcgctgaagatgttgatggagaagctctaagtacactcgtcttgaataggctaaaggttggtcttcaggttgtggcagtcaaggctccagggtttggtgacaatagaaagaaccagcttaaagatatggctattgctactggtggtgcagtgtttggagaagagggattgaccctgaatcttgaagacgttcagcctcatgacttaggaaaagttggagaggtcattgtgaccaaagacgatgccatgctcttaaaaggaaaaggtgacaaggctcaaattgaaaaacgtattcaagaaatcattgagcagttagatgtcacaactagtgaatatgaaaaggaaaaactgaatgaacggcttgcaaaactttcagatggagtggctgtgctgaaggttggtgggacaagtgatgttgaagtgaatgaaaagaaagacagagttacagatgcccttaatgctacaagagctgctgttgaagaaggcattgttttgggagggggttgtgccctccttcgatgcattccagccttggactcattgactccagctaatgaagatcaaaaaattggtatagaaattattaaaagaacactcaaaattccagcaatgaccattgctaagaatgcaggtgttgaaggatctttgatagttgagaaaattatgcaaagttcctcagaagttggttatgatgctatggctggagattttgtgaatatggtggaaaaaggaatcattgacccaacaaaggttgtgagaactgctttattggatgctgctggtgtggcctctctgttaactacagcagaagttgtagtcacagaaattcctaaagaagagaaggaccctggaatgggtgcaatgggtggaatgggaggtggtatgggaggtggcatgttctaactcctagactagtgctttacctttattaatgaactgtgacaggaagcccaaggcagtgttcctcaccaataacttcagagaagtcagttggagaaaatgaagaaaaaggctggctgaaaatcactataaccatcagttactggtttcagttgacaaaatatataatggtttactgctgtcattgtccatgcctacagataatttattttgtatttttgaataaaaaacatttgtacattcctgatactgggtacaagagccatgtaccagtgtactgctttcaacttaaatcactgaggcatttttactactattctgttaaaatcaggattttagtgcttgccaccaccagatgagaagttaagcagcctttctgtggagagtgagaataattgtgtacaaagtagagaagtatccaattatgtgacaacctttgtgtaataaaaatttgtttaaagtt

SEQ ID NO: 126668 - DNA, 2313 bp, Homo sapiens
atgccaggtgaagaaaagtgtgcttctgaactgaaacagtcagcacagagaggaggagacagactaaaccaggaggaaggtgaatctctgaatagaccaataacaggctctgaaattgaggcaataattaatagcttaccaaccaaaaagagtccaggaccagatggaatcacagccgaattctaccagaggtacaaggaggaactggtaccattccttgtaaaactattccaatcaacagaaaaagagggaatcctccctaactcattttatgaggccagcatcatcctgataccaaagcctggcagagacacaacaaaaaaagagaattttagaccaatatccctgatgaacatcgatgcaaaaatcctcaataaaatactggcaaaccgaatccagcagcacatcaaaaagcttatccacaatggtcaacatataaacagaaccaacgacaaaagccatataattatctcaatagatgcagaaaagacctttggcaaaattcaacagcccttcatgctaaaaactctcaataaattaggtattgatgggacatatctcaaaataataagagctatttatgacaaacccacagccaatatcatactgactgggcaaaaactggaagcattccctatgaaaactggcacaagagagggatgccctctctcaccactcttattcaacatagtgttggaagttctggccagggcaattaggcaggagaaagaaataaagggtattcaattaggaaaagaggaagtcaaattgtccctgtttgcagatgacatgattgtatacctagaaaaccccatcgtctcagcccaaaatctccttaggcttataagcacctttagcaaagtctctggatacaaaatcaatgtgcaaaaatcacaagcattcttatacaccaataacagacaaacagagagccaaatcctgagtgaactcccattcacaattgcttcaaagagaataaaatacctaggaatccaacttacaagggatgtgaaggacctcttcaaggagaactacaaagcactgctcaatgaaataaaagaggatataaacaaatggaaaaacattccatgctcatgggtaggaagaatcaatatcgtgaaaatggccatactgcccaaggtaatttatagattcaatgccatccccatcaagctaccaatgactttcttcacagaattggaaaaaactactttaaagtttatatggaaccaaaaaagtgcccgcatcgccaagtcaatcctaagccaaaagaacaaagctggaggcatcatgctacctgacttcaaactatactacaaggctacagtaaccaaaacagcatggtactggtaccaaaacagagatatagatcaatggaacacaacagagccctcagaaataatgttgcatatctacgaccacctgatctttgacaaacctgacaaaaacaagaaatggggaaacaattccctatttaataaatggtgctgggaaaactggctagccatatggagaaagctgaaactggatcccttccttacaccttatacaaaaattaattcaagatggattaaagacttacatgttagacctaaaatcataaaaaccctagaagaaaacctaggcaataccattcaggacatagtcatgggcaaggacttcatgtctaaaacaccaaaagcaatggcaacaaaagccaaaattgacaaatgggatctaattaaactaaagagcttctgcacagcaaaagaaactaccatcagagtgaacaggcaacctacaaaatgggagaaaatttttggtatctactcatctgacaaaggtctaatatcaagaatctacaatgaactccaacaaatttacaagaaaaaaacaaacaaccccatcaaaaagtgggtgaaggacatgaacagatacttctcaaaagaagacatttatgcagccaaaagacacatgaaaaaatgctcatcatcactggccatcagagaaatgcaaatcaaaaccacaatgagatactatctcacaccactcagaatggcgatcattaaaaagttcggaaacaacagacaggagacagtaagagaaatggcctgtctcctcagcggcacaatggactttagacatcgcgcctgttttgtactctccaagccggacttctctactcgctggcctggcgctgatgcccagaggccccctgtgcttgtggttgtggccttagacagttccctgccctttcctcaggcatcagggcagaggcctccgagcctggaggatgtggacggaggggccggtgccctcgtggctccctgctag

SEQ ID NO: 126669 - DNA, 3556 bp, Homo sapiens
atggagaatgagtttgatgaattgacggaagtacacttcagaaggtgggtaataacaaactcctctgagctaaaggagcatgttctaacccaatgcgaggaagctaaaaaccttgcaagaagaaataaactagaaaatctagaagaaatggataaattcctggccacatacacctttccaagtctaaaccaggaagaagttgaatccctgaatagaccaataacaagttctgaaattgaggcagcaattaatagcctaccaaccaaaaaacatccaggaccagatggattcacagccaaattctaccagaggtacaaagaggagctgcatataaacagagccaaagacaaaaaccacatgattatctcaatagatgcagaaaaggcctttgacaaaattcaacaccccgtcaaactaaaaattctcaataaattaggtattgatgggacgtatctcaaaataataagagctatctatgacaaacccacagccaatctcatactgaatgggcaaaaactggaagcattccctttgaaaactggcacaagacagggatgccctctctcaccactcctattcaacatagtgttggaagttctggccagggcaattaggcaggagaaggaaataaagggtattcaattaggaaaagaggaagtcaaattgtccctgtttgcagacgacatgattgtatatctagggaaccccattatctcagcccaaaatctccttaagctgataagcaacttcagcaaagtctcaggatacaaaatcaatgtacaaaaatcacaagcattcttatacaccaacaacagacaaacagagagccaaatcatgagtgaactcccattcacaattgcttccaagagaataaaatacctaggaatccaacttacaagggatgtgaaggacctcttcaaggagaactacaaaccactgctcaaggaaataaaagaagatacaaacaaatggaagaataatccatgttcatgggtaggaagaatcaatattgtgaaaatggccatactgcccaaggtaatttacagattcaatgccatccccatcaagctaccaatgcctttcttcacagaattggaaaaaaactactttaaagttcatatggaaccaaaaaagagcccgcattgccaagtcaatcctaagccaaaagaacaaagctggaggcatcacgctacctgacttcaaactatactacaaggctacagtaaccaaaacagcatggtactggtaccaaaacagagatatagatcaatggaacagaacagagccctcaaaaataacgccgcacatctacaactatctgatctttgacaaacctgagaaaaacaagcaatggggaaaggattccctatttaataaatggtgctgggaaaactggctagccatatggagaaagctgaaactggatcccttccttacaccttacacaaaaattaattcaagatggattaaagacttaaacgttagacctaaaaccataaaaaccctagaagaaaacctaggcattaccattcaggacataggcatgggcaaggacttcatgtctaaaacaccaaaagcaatggcaactaaagccaaaattgacaaatgggatctaattaaactaaagagcttctgcacagcaaaagaaactaccatcagagtgaacaggcaacctacaaaatgggagaaaatttttgcaacctactcatctgacaaagggctaatatccagaatctacaatgaactgaaacaaatttacaagaaaaaaacaaacaaccccatcagaaagtgggcaaaggacatgaacagacacttttcaaaagaagacatttatgcagccaaaaaatacatgaaaaaatgctcatcatcactggccatcagagaaatgcaaatcaaaaccacgatgagataccatctcacaccagttagaatggcgatcattaaaaagtcaggaaacaacagaaccaaagacaaaaaccacatgattatctcaatagatgcagaaaaggcctttgacaaaattcaacagcccttcatgctaaaaactctcaataaactaggtattgatgggatgtatctcaaaataataagaattattcatggcaaacccacagccaatatcatactgaatgggaaaaaactggaagcattccctttgaaaactggcacaagacagggatgccctctctcaccactcctattcaacatagtgttggaagttctggccagggcaatcaggcagaaaaaagaaataaaaggtattcaattaggaaaagaagaagtcaaattgtccctgtttgcagatgacatgattgtatatttggaaaaccccatcgtctcagcccaaaatctcctgatattgcaactgataagcaacttcagcaaagtctcaggatacaaaatcaatgtgcaaaaatcacaagcattcttatacaccaataacagacaaacagagagccaaatgaggagtgaactcccattcacagttgctacaaagagaataaaatacttaggaatccaacttacaagggatgtgaaggacctcttcaaggagaactacaaactactgctcaatgaaataaaagaggacacacacaaatggaagaacattccacgctcatggataggaagaatcaatatcgtgaaaatggccatactgcccaacgtaatttatagatacaatgccatacccatcgagctaccaatgactttcttcacagaattggaaaaaactactttaaagttcatatggaaccaaaaaagggcccgcattgccaagacaatcctaagcaaaaagaacaaagctggaggcatcatgctacctgacttcaaactatactacaaggctacagtaaccaaaacagcatggtactggtaccaaaacagagatatagaccaatggaacagaacagagccctcagaaataataccacacatctacaaccatctgatctttgacaaacctgagaaaaacaagcaatggggaaaggatttcctatttaataaatggtgctgggaaaactggctagccatatgtagaaagctgaaactggatcccttccttacaccttatacaaaaattaattcaagatggattaaagacttaaatgttagacctaaaaccataaaaaccctggaagaaaacctaggcaataccattcaggacataggcatgggcaaggtcttcatgactaaaacaccaaaaacaatggtaacaaaagacaaaattgacaaatgggatctaattcaactaaagagcttctgcacagcaaaagaaactaccatcagagtgaacaggcaacctacagaatgggagaaaatttttgcaatctacccatctgacaaagggctaatattcagaatgtatgaagaacttaaacaaatttacaagaaaaaatcaaacaaccccatcaaaaggtgggcaaaggatttaaacagacacttctcaaaagaagacattgatgcagccaacagacatgaaaaaatgctcatcatcattggccatcagagaaatgcaaatcaaaaccacaatgagataccacctcacaccagttag

SEQ ID NO: 126670 - DNA, 7804 bp, Homo sapiens
cctccggtctacagctcccagcgtgagcgacgcagaagacgggtgatttctgcatttccatctgaggtaccgggttcatctcactagggagtgccagacagtgggcgcaggccagtgggtgcgcgcaccgtgcggagccgaagcagggcgaggcattgcctcacctgggaagcgcaaggggtcagggagttccctttccgagtcaaagaaaggggtgacggacgcacctggaaaatcgggtcactcccacccgaatattgcgcttttcagaccggcttaaaaaacggcgcaccacgagactatatcccacacctggccttcggagggtcctacgcccacggaatctcgctgattgctagcacagcggtctgagatcaaactgcaaggccgcagcaaggctgggggaggggcgcccgccattgcccaggcttgcttaggtaaacaaagcagccggggaagctcgaactgggtgcagcccaccacagctcaaggaggcctgcctgcctctgtaggctccacctctgggggcagggcacagacaaacaaaaagacagcagtaacctctgcagacttaaatgtccctgtctgacagctttgaagagagcagtggttctcccagcacgcagctggagatctgagaacgggcagactgcctcctcaagtgggtccctgacccctgacccccgagcagcctaactgggaggcaccccccagcaggggcacactgacacctcacacggcagggtattccaacagacctgcagctgagggtcctgtctgttagaaggaaaactaacaaacagaaaggacatccacaccgaaaacgcatctgtacatcaccatcatcaaagaccaaaagtagataaaaccacaaagatggggaaaaaacagaacagaaaaactggaaactctaaaacgcagagcacctctcctcctccaaaggaacgcagttcctcaccagcaacggaccaaagctggatggagaatgattttgacgagctgagagaagaaggcttcagacgctcaaattactctgagctacgggaggacattcaaaccaaaggcaaagaagttgaaaactttgaaaaaaatttagaagaatgtataactagaataaccaatacagagaagtgcttaaaggagctgatggagctgaaaaccaaggctcgagaactacgtgaagaatgcagaagcctcaggagccaatgcgatcaactggaagaaagggtatcagcaatggaagatgaaatgaatgaaatgaagcaagaagggaagtttagagaaaaaagaataaaaagaaacgagcaaagcctccaagaaatatgggactatgtgaaaagaccaaatctacgtctgattggtgtacctgaaagtgatgcggagaatggaaccaagttggaaaacactctgcaggatattatccaggagactttccccaatctagcaaggcaggccaacgttcagattcaggaaatacagagaacgccacaaagatactcctcgagaagagcaactccaagacacataattgtcagattcaccaaagttgaaatgaaggaaaaaatgttaagggcagccagagagaaaggtcgagttaccctcaaagggaagcccatcagactaacagcggatctctcggcagaaaccctacaagccagaagagagtgggggccaatattgaacattcttaaagaaaagaattttcaacccagaatttcatatccagccaaactaagcttcataagtgaaggagaaataaaatactttacagacaagcaaatgctgaccgattttgtcaccagcaggcctgccctaaaagagctcctgaaggaagcgctaaacatggaaaggaacaaccggtaccagccactgcaaaatcatgccaaaatgtaaagaccatcgagactaggaagaaactgcatcaactaacgagcaaaatcaccagctaacatcataatgacaggatcaaattcacacataacaatattaactttaaatgtaaatggactaaattctccaattaaaagacacagactggcaagttggataaagagtcaagacccatcagtgtgctgtattcaggaaacccatctcatgtgcagagacacacataggctcaaaataaaaggatggaggaagatctaccaagcaaatggaaaacaaaaaaaggcaggggttgcaatcctagtctctgataaaacagactttaaaccaacaaagatcaaaagagacaaagaaggccattacatgatggtaaagggatcaattcaacaagaggagctaactatcctaaatatgtatgcacccaatacaggagcacccagattcataaagcaagtcctgagtgacctacaaagagacttagactcccacacattaataatgggagactttaacaccccactgtcaacattagacagatcaacgagacagaaagtcaacaaggatacccaggaattgaactcagctctgcaccaagcagacctaatagacatctacagaactctccaccccaaatcaacagaatatacatttttttcagcaccacaccacagctattccaaaattgaccacatacttggaagtgaagctctcctcagcaaatgtaaaagaacagaaattataacaaactatctctcagaccacagtgcaatcaaactagaactcaggattaagaatctcactcaaagccgctcaactacatggaaactgaacaacctgctcctgaatgactactgggtacataacgaaatgaaggcagaaataaagatgttctttgaaaccaacgagaacaaagacacaacataccagaatctctaggacgcattcaaagcagtgtgtagagggaaatttatagcactaaatgcccacaagagaaagcaggaaagatccaaaattgacaccctaacatcacaattaaaagaactagaaaagcaagagcaaacacattcaaaagctagcagaaggcaagaaataactaaaatcagagcagaactgaaggaaatagagacacaaaaaacccttcaaaaaatcaatgaatccaggagctggttttttgaaaggatcaacaaaattgatagaccgctagcaagactaataaagaaaaaaagagagaagaatcaaatagacacaataaaaaatgataaaggggatatcaccaccgatcccacagaaatacaaactaccatcagagaatactacaaacacctctacgcaaataaactagaaaatctagaagaaatggatacattccttgacacatacactctcccaagactaaaccaggaagaagttgaatctctgaatagaccaataacaggagctgaaattgtggcaataatcaatagtttatcaaccaaaaagagtccaggaccagatggattcacagccgaattctaccagaggtacaaggaggaactggtaccattctttctgaaactattccaatcaatagaaaaagagggaatcctccctaactcattttatgaggccagcatcattctgataccaaagccgggcagagacacaaccaaaaaagagaattttagaccaatatccttgatgaacattgatgcaaaaatcctcaataaaatactggcaaaccaaatccagcagcacatcaaaaagcttatccaccatgatcaagtgggcttcatccctgggatgcaaggctggttcaatatacgcaaatcaataaatgtaatccagcatataaacagagccaaagacaaaaaccacatgattgtctcaatagatgcagaaaaagcctttgacaaaattcaacaacccttcatgctaaaaactatcaataaaataggtattgatgggatgtatttcaaaataataagagctatctatgacaaaaccacagccaatatcatactgaatgggcaaaaactggaagcattccctttgaaaaccggcacaagacagggatgccctctctcaccgctcctattcaacatagtgttggaatttctggccagggcaatcaggcaggagaaggaaataaagggtattcaattaggaaaagaggaagtcaaattgtccctgtttgcagatgacatgattgttgatctagaaaaccccatcgtctcagcccaaaatctccttaagctgataagcaacttcagcaaagtcccaggatacaaaatatacaaaatcgatgtgcaaaaatcacaagcattcctatacaccaataatagacaaacagagagccaaatcatgagtgaactcccattcacaattgcttcaaagagaataaaatacccaggaatccaacttacaaggaatgtgaaggacctcttcaaggagaactacaaaccactgctcaatgaaataaaagaggacacaaacaaatggaagaacattccatgctcatggataggaagaatcaatattgtgaaaatggccatactgcccaaggtaatttatagattcaatgccatccccatcaagctaccaatgacttccttcacagaattggaaaaaactactttaaagttcatatggaaccaaaaaagagcccgcattgccaagacaatcctaagccaaaagaacaaagctggaggcatcacactacctgacttcaaactatactacaaggctacagtaaccaaaacagcatggtactgggtaccaaaacagatatatagaccaatggaacagaacagagacctcagaaataataccacacatctacaaccatctgatctttcacaaacccgacaaaaacaagcaacgaggaaaggattccctatttaataaatggtgctgggaaaactggctagccatatggagaaaaatgaaactggatccttatacaaaatttacaccttacacaaaaattaattcaagatggattaaaggcttaaatgttagacctaaaaccataaaaaccctagaagaaaacctaggcaataccattcaggacataggcatgggcaaggacttcatgactaaaacaccaaaagcaatggcaacaaaagccaaaattgacaaatgggatctaattaaactaaagagcttctgcacagcaaaagaaactaccatcagagtgaacacgcaacctacagaatggaagaaaatttttgcaatctactcatctgacaaagggctaatatccagaatctacaaagaactcaaacaaatttacaagaaaaaaacaaacaaccccctcatcaaaaagtgggcaaaggatatgaacagacacttctcaaaagaagacattttatgcagccaaaagacacatgaaaaaatgctcatcatcactggccatcagagaaatgcaaatcaaaaccacaatgagatagcatctcacaccagttagaatggcgatcattaaaaagtcaggaaacaacaggtgctggagaggatgtggagaaataggaacacttttacactgttggtgggactgtaaactagttcaaccatttgtggaagacagtgtggcaattcctcagggatctagaactagaaataccattttacccagccatcccattactgggtatatacccaaaggattataaaccatgccgctataaagacacatgcacacgtatgtttattgcggcactattcacaatagcaaagacttggaaccaacccaaatgtccaacaatgatagacgggattaagaaaatgtggcacatatacaccatggaatactatgcagccataaaaaaggatgagttcatgtcctttgtagggacatggatgaagctggaaaccatcattctcagcaaactatcgcaaggacagaaaaccaaacaccgcatgttctcactcatagtcaggaccctcagctgcaggtctgttggagtttactcgaagtccactccagaccctgtttgcctgagtatcagcagcagtggctgcagaacagcagatattagtgtatcacaaatgctactgcctgattgttcctctggaagttttgtctcagaggagtacccggccgtgtgaggtgtcagtctgcccctactggaagggatctccttcaaggcagggccatttctggtttcctccagctcccagggctccttcctgcaacagaaaatgttcctgccttcacaaagcttacattttatttcagagaaaatatccttataaacacaaatcagagacctctgtcagacttgacccatggtttctgagtgcaaatgaggattcccgattacggggagaactgcgaggaaacttcaagatgacatctttattctcacatctccaagaacatgcagaaagaagttactgctcttatactgaggaaatacaaactaccatcagagaatactacaaacacctctacgcaaataaactagaaaatctagaagaaatggataaattccttgacacatacaccctcccacgactaaaccaggaagaagttgaatctctgaatagaccaacaacaggctctgaaattgaggcaataatcaatagcttaccaaccaaaaagagtccaggaccagatggattcacagccaaattctaccagaggtacaaggaggaactggtaccattccttctgaaactattccaatcaatagaaaaagagggaatcctcactaactcattttatgaggccagcatcatcctgataccaaagccgggcagagacacaaccaaaaaagagaattttagaccaatatccttgatgaacattgatgcaaaaatcctcaataaaatactggcaaaccaaatccagcagcacatcaaaaagcttacccaccatgatcaagtgggcttcatccctgggatgcaaggctggttcaatatacgcaaatcaataaatgtaatccagcatataaacagaatcaaagacaaaaaccacatgattatctcaatagatgcagaaaaggcctttgacaaaattcaacaatgcttcatgctaaaaactctcaataaactagcccaaaatctccttaagctgataagcaacttcagcaaagtctcaggatacaaaatcaatgtgcaaaaatcacaagcattcttatacaccaataacagacaaacagagagccaaatcatgagtgaactcccattcacaattgtttcaaagagaataaaatacctaggaatccaacttacaagggacgtgaaagacctcttcaaggagaactacaaaccactgctcaatgaaataagagaggatacaaacaaatggaagaacattccatgctcatgggtaggaagaatcaatatcgtgaaaatggccatactgcccaaggtaatttatagattcaatgccatccacataaagctaccaatgactttcttcacagaattggaaaaaactactttaaagttcatatggaaccaaaaaagagcccacatcgccaagccaatcctaagccaaaagaacaaagctggaggcatcatgctacctgacttcaaactatactacaaggctacagtaaccaaaacagcatggtactggtaccaaaacagagagatagatcaatggaacagaacagtggcctcagaaataacaccacacaactacaaccatgtgatctttgacaaacctgacaaaaacaagaaatggggaaacgattccctatttaataaatggtgctgggaaaactggctagccatatatagaaagctgaaactggatcccttccttacaccttatacaaaaattaatttaagatggattaaagacttaaacattagacctaaaaccataaaaaccctagaagaaaacctaggcattaccattcaggacataggcatgggcaaggacttcatgtctaaaacaccaaaagcaatggcaacaaaagccaaaattgactaa

SEQ ID NO: 126671 - DNA, 652 bp, Homo sapiens
atgcagaaggaagactgtgtcattgttttggtgaagttggcagtagaaggaatggcaccaactcaacaaatccacctctttgtggccattacctttagtgggtggcctaggcaatgcacaggctcatcattcaaggctattgacctctttttggatccagattctgttatgcagcaaatttattctttccactttggtatcatgtgtaattttgacaatcatgccttccagaacttgatggcagtgattgacaatattaagcaggacagggacatggatgaagctggaagtcatcattctcagcaaaccaacacaggaacaggaaatcaaacaccacatgttctcactcataaatgggagttgagcaatgagaacacatggacccagggaggggaacatcatacaccagggccctgggttctttggtctcgctgacttcaagaatgaagtcgtggaccctcacggagtgaagccacagaccttcactgtgagtgttacagctcttaaagatgatgtgtctggaattcattcattcctcctggtgggttcctggtctgccaacttcaggaatgaagccgcagaacctagtgcactattcacaatagcaaagatatggatcaacctaagtattcatcaacagatgaatggataa

SEQ ID NO: 126672 - DNA, 731 bp, Homo sapiens
ccgcctcgcttggcacgagggacttgtcaggaagcaaaagaatgaattaaagaaaactccagagaatgagctgtctacctactccctgggtcagtggctctccatgcctacctgtggtctcttggacacccttgcagaagatgacttcctggggaactcttctgggagtgaatgttatcagcaaattcccaaaacaacaccccttagacaaaaagccctcctcaccctatgcattgcctagacccacccactaaaaggtgatggccacaaaagaggtggatttgttgagttggtgccattccttctacttgccagctttcaccaaaacaatgacacagtcttccttccgcatgggaggactcttctctttccctgtgttggcagtgggatgcctccgtgcagataagaaatgcttaactgagaaatgctcatgttgggatatcatcgatgagactttaatttgggcatggtgactgtttcccttgctgccacttgactcaatcccaggagcctcagtagaggatataatattacacaagatgctcaaaatggtggaattgctcagtgctcccataaatatacatttataattttcatttgccacacggtaaactgaaaaatacagactatattaaaaagaaactgcatgatttttttttcaaaaattcaaagcatatttaaataatatataaattaaatgccctcctctcttccaattctgtccctatagt

SEQ ID NO: 126673 - DNA, 743 bp, Homo sapiens
atggcttccgcaaagaagggtggccaaaagaaaaagggccgttctgctatcaacgaggtggtgacccaagaatacaccatcaacattcacaagcgcacccatggagtgcgcttcaagaagtgtgccccttgggcactcaaagagattcggaaatttgccatgaaggagatggtagctccagacattgctagccctgcaaggcctacgaccatgtcatgccagcataacctgatagctgtgatttgggccttcaactgtcaccttggcgctttcctgtggacactgacatgggacctgctcagcggccacacagtgcaacttgcaagtgctgcaggggaattcactccctgtgaggtaacactgaccaatgggacacaggaaccaaagaagaaggaggaggaggaggaagaggaagaggaagaagaagaagaagaagatagaagaaggacaaggaggagaggaggagaggagggggagggggaggaggaggagaaaagaagaaaaaagaaagaagaagaagaagaaaagtggccctacagcaaaattggccgctggatggtacatcccaaacctaagaatattcctacagctttccatcccccaagtcatcagacatgtggccacatttgcccaagagcctgaacaaacaagacctaaagatcaagccagacagcagtaacagaagccttgccctagagccctttatttcctttgggtcaaggaactacagggtctgggactaa

SEQ ID NO: 126674 - DNA, 455 bp, Homo sapiens
tttttttttttttgaaggcaattttataactttatttgatctgacgatcagcgattagttctcatccacattgactgtctgtagatttttgaaaaggggttaacaggtacataggtaaccaaagtatatagcttatttggtgaatcttcatcctcattacgttttctggtcagccgcactcggattcggtatggcacattccttattcctttggcccagtcagctttgttgagcctggtgtcaatgcgcacatctggagttcccatctccttcatggcaaatttccgaatctctttgagtgcccgaggtgctcgcttcttgaagcccactccatggatgcgcttgtgaatgttgatggtgtattctcgggttaccacttcgttgatggcagatcggccctttttcttctcgccacccttctttgcgggagccattctgcagcgtccaagtgaatt

SEQ ID NO: 126675 - DNA, 410 bp, Homo sapiens
tttcgtggagaggctccagacccgcacgccgcgcgcacagagctctcagcgccgctcccagccacagcctcccgcgcctcgctcagctccaacatggcaaaaatctccagccctacagagactgagcggtgcatcgagtccctgattgctgtcttccagaagtatgctggaaaggatggttataactacactctctccaagacagagttcctaagcttcatgaatacagaactagctgccttcacagaggtactggtccctgtctcccccacttccccaaactacccacaacatgaaacaagaccctggcagaatggccaggaatgaaggagcagcaactgacaccccacactcttgcttcattttaactcactctaagccaggagtttttccatttaggaagagagaac

SEQ ID NO: 126676 - DNA, 602 bp, Homo sapiens
  misc_feature (1)...(602): n = a,t,c or g
cccggttcgacccacgcgtccgcccacgcgtgcgagaggctccagacccgcacgcttcgcgcatttagctctcagcgccgcttcccagccacagcctcccgcgcctcgctcagctccaacatggcaaaaatctccagccctacagagactgagcggtgcatcgagtccctgattgctgtcttccagaagtatgctggaaaggatggttataactacactctctccaagacagagttcctaagcttcatgaatacagaactagctgccttcacaaagaaccagaaggaccctgggtgtccttgaccgcatgatggaaggaaactgggacaaccaacagtggatggtcagctagatttctcagaatttcttaatctgattggtgggccaagntatggcttgccatgactccttcctcaaggctgtcccttcccagaagcggacctgaggaccccttgggcctagccttcaaacccacccccttttcctttcagcctttctgtcatcatctccacagcccacccatcccctgagcacactaaccacctcaatgcaggccccacctgccaatagtaataaagcaatgtcacttttttaaaacatga

SEQ ID NO: 126677 - DNA, 6010 bp, Homo sapiens
ggtgaaggtacgctcgagcgtggtcattgaggacaagtcgacgagagatcccgagtacatctacagtcagccttacgaacaaggaacttcagatctaaaagattggaaaagaattggtaaggaactaaaacaagcaggtaggaagggtaatatcattccacttacagtatggaatgattgggccattattaaagcagctttagaaccatttcaaacagaagaagatagcatttcagtttctgatgcccctggaagctgtttaatagattgtaatgaaaacacaaggaaaaaatcccagaaagaaaccgaaagtttacattgcgaatatgtagcagagccggtaatggctcagtcaacgcaaaatgttgactataatcaattacaggaggtgatatatcctgaaacgttaaaattagaaggaaaaggtccagaattaatggggccatcagagtctaaaccacgaggcacaagtcctcttccagcaggtcaggtgctcgtaagattacaacctcaaaagcaggttaaagaaaataagacccaaccgcaagtagcctatcaatactggccgctggctgaacttcagtatcggccacccccagaaagtcagtatggatatccaggaatgcccccagcaccacagggcagggcgccataccatcagccgcccactaggagacttaatcctatggcaccacctagtagacagggtagtgaattacatgaaattattgataaatcaagaaaggaaggagatactgaggcatggcaattcccagtaacgttagaaccgatgccacctggagaaggagcccaagagggagagcctcccacagttgaggccagatacaagtctttttcgataaaaatgctaaaagatatgaaagagggagtaaaacagtatggacccaactccccttatatgaggacattattagattccattgcttatggacatagactcattccttatgattgggagattctggcaaaatcgtctctctcaccctctcaatttttacaatttaagacttggtggattgatggggtacaagaacaggtccgaagaaatagggctgccaatcctccagttaacatagatgcagatcaactattaggaataggtcaaaattggagtactattagtcaacaagcattaatgcaaaatgaggccattgagcaagttagagctatctgccttagagcctgggaaaaaatccaagacccaggaagtacctgcccctcatttaatacagtaagacaaggttcaaaagagccctaccctgattttgtggcaaggctccaagatgttgctcaaaagtcaattgccgatgaaaaagccggtaaggtcatagtggagttgatggcatatgaaaacgccaatcctgagtgtcaatcagccattaagccattaaaaggaaaggttcctgcaggatcagatgtaatctcagaatatgtaaaagcctgtgatggaatcggaggagctatgcataaagctatgcttatggctcaagcaataacaggagttgttttaggaggacaagttagaacatttggaggaaaatgttataattgtggtcaaattggtcacttaaaaaagaattgcccagtcttaaacaaacagaatataactattcaagcaactacaacagggttttcagggacaacaacccccactgtcccaagtgtttcagggaataagccagttaccacaatacaacaattgtccctcaccacaagcggcagtgcagcagtagatttatgtactatacaagcagtctctctgcttccaggggagcccccacaaaaaatccctacaggggtatatggcccactgcctgaggggactgtaggactaatcttgggaagatcaagtctaaatctaaaaggagttcaaattcatactagtgtggttgattcagactataaaggcgaaattcaattggttattagctcttcaattccttggagtgccagtccaagagacaggattgctcaattattactcctgccatatattaagggtggaaatagtgaaataaaaagaataggagggcttgtaagcactgatccaacaggaaaggctgcatattgggcaagtcaggtctcagagaacagacctgtgtgtaaggccattattcaaggaaaacagtttgaagggttggtagacactggagcagatgtctctattattgctttaaatcagtggccaaaaaactggcttaaacaaaaggctgttacaggacttgtcggcataggcacagcctcagaagtgtatcaaagtatggagattttacattgcttagggccagataatcaagaaagtactgttcagccaatgattacttcaattcctcttaatctgtggggtcgagatttattacaacaatgggaaaaaccggtgtgggtaaatcagtggccgctaccaaaacaaaaactggaggctttacatttattagcaaatgaacagttagaaaagggtcacattgagccttcgttctcaccttggaattctcctgtgtttgtaattcagaagaaatcaggcaaatggcatacgttaactgacttaagggctgtaaacgccgtaattcaacccatggggcctctccaacccgggttgccctctccggccatgatcccaaaagattggcctttaattataattgatctaaaggattgcttttttaccatccctctggcagagcaggattgtgaaaaatttgcctttactataccagccataaataataaagaaccagccaccaggtttcagtggaaagtgttacctcagggaatgcttaatagtccaactatttgtcagacttttgtaggtcgagctcttcaaccagtgagagaaaagttttcagactgttatattattcattatattgatgatattttatgtgctgcagaaacgaaagataaattaattgactgttatacatttctgcaagcagaggttgccaatgctggactggcaatagcatctgataagatccaaacctctactccttttcattatttagggatgcagatagaaaatagaaaaattaagccacaaaaaatagaaataagaaaagacacattaaaaacactaaatgattttcaaaaattactaggagatattaattggattcggccaactctaggcattcctacttatgccatgtcaaatttgttctctatcttaagaggagactcagacttaaatagtcaaagaatattaaccccagaggcaacaaaagaaattaaattagtggaagaaaaaattcagtcagcgcaaataaatagaatagatcccttagccccactccaacttttgatttttgccactgcacattctccaacaggcatcattattcaaaatactgatcttgtggagtggtcattccttcctcacagtacagttaagacttttacattgtacttggatcaaatagctacattaatcggtcagacaagattacgaataacaaaattatgtggaaatgacccagacaaaatagttgtccctttaaccaaggaacaagttagacaagcctttatcaattctggtgcatggcagattggtcttgctaattttgtgggacttattgataatcattacccaaaaacaaagatcttccagttcttaaaattgactacttggattctacctaaaattaccagacgtgaacctttagaaaatgctctaacagtatttactgatggttccagcaatggaaaagcagcttacacagggccgaaagaacgagtaatcaaaactccatatcaatcggctcaaagagcagagttggttgcagtcattacagtgttacaagattttgaccaacctatcaatattatatcagattctgcatatgtagtacaggctacaagggatgttgagacagctctaattaaatatagcatggatgatcagttaaaccagctattcaatttattacaacaaactgtaagaaaaagaaatttcccattttatattacttatattcgagcacacactaatttaccagggcctttgactaaagcaaatgaacaagctgacttactggtatcatctgcactcataaaagcacaagaacttcatgctttgactcatgtaaatgcagcaggattaaaaaacaaatttgatgtcacatggaaacaggcaaaagatattgtacaacattgcacccagtgtcaagtcttacacctgcccactcaagaggcaggagttaatcccagaggtctgtgtcctaatgcattatggcaaatggatgtcacgcatgtaccttcatttggaagattatcatatgttcatgtaacagttgatacttattcacatttcatatgggcaacttgccaaacaggagaaagtacttcccatgttaaaaaacatttattgtcttgttttgctgtaatgggagttccagaaaaaatcaaaactgacaatggaccaggatattgtagtaaagctttccaaaaattcttaagtcagtggaaaatttcacatacaacaggaattccttataattcccaaggacaggccatagttgaaagaactaatagaacactcaaaactcaattagttaaacaaaaagaagggggagacagtaaggagtgtaccactcctcagatgcaacttaatctagcactctatactttaaattttttaaacatttatagaaatcagactactacttctgcagaacaacatcttactggtaaaaagaacagcccacatgaaggaaaactaatttggtggaaagataataaaaataagacatgggaaatagggaaggtgataacgtgggggagaggttttgcttgtgtttcaccaggagaaaatcagcttcctgtttggttacccactagacatttgaagttctacaatgaacccatcggagatgcaaagaaaagggcctccacggagatggtaacaccagtcacatggatggataatcctatagaagtatatgttaatgatagtatatgggtacctggccccatagatgatcgctgccctgccaaacctgaggaagaagggatgatgataaatatttccattgggtatcgttatcctcctatttgcctagggagagcaccaggatgtttaatgcctgcagtccaaaattggttggtagaagtacctactgtcagtcccatcagtagattcacttatcacatggtaagcgggatgtcactcaggccacgggtaaattatttacaagacttttcttatcaaagatcattaaaatttagacctaaagggaaaccttgccccaaggaaattcccaaagaatcaaaaaatacagaagttttagtttgggaagaatgtgtggccaatatgattatgggattaattgcagtcacagctacggctgctgtagcaggagttgcattgcactcttctgttcagtcagtaaactttgttaatgattggcaaaagaattctacaagattgtggaattcacaatctagtattgatcaaaaattggcaaatcaaattaatgatcttagacaaactgtcatttggatgggagacagactcatgagcttagaacatcgtttccagttacaatgtgactggaatacgtcagatttttgtattacaccccaaatttataatgagtctgagcatcactgggacatggttagacgccatctacagggaagagaagataatctcactttagacatttccaaattaaaagaacaaattttcgaagcatcaaaagcccatttaaatttggtgccaggaactgaggcaattgcaggagttgctgatggcctcgcaaatcttaaccctgtcacttgggttaagaccattggaagtactacgattataaatctcatattaatccttgtgtgcctgttttgtctgttgttagtctgcaggtgtacccaacagctccgaagagacagcgaccatcgagaacgggccatgatgacgatggcggttttgtcgaaaagaaaagggggaaatgtggggaaaagcaagagagatcaaattgttactgtgtctgtgtag

SEQ ID NO: 126678 - DNA, 1680 bp, Homo sapiens
tcatctctcttgcttttccccacatttcccccttttcttttcgacaaaaccgccatcgtcatcatggcccgttctcgatgtcactgtctcttcggagctgttgggtacacttctgatggtcttaatccaagtgacagggttaagatttgcgaggccatcagcaactcctgcaattgcctcagttcctggcaccaaatttaaatgggcttttgatgcttcgaaaatttgttcttttaatttggaaatgtctaaagtgagattatcttctcttccctgtagatggcgtctaaccatgtcccagtgatgctcagactcattataaatttggggtgtaatacaaaaatctgacgtattccagtcacactgtaactggaaatgatgttctaaggtcatgagcctgtctcccatccaaatgacagtttgtctaagatcattaatttgacttgccaatttttgatcaatactagattgtgaattccacaatcttgtagaattcttttgccaataattaacaaagtttactgactgaacagaagagtgcaatgcaactcctgccacagcagccgtagctgtgactgcaattaatcccataatcactgcaattaaagtaaaaatgaatcttttggatctatttaaaatgccttttaatatttcagtcaaaatatggatggatggcgaggcctcccacggtcggtccgtggacacagggatccacatgccttctcttgctctcaccagcagaatacggtgctgccaattaaaagttgaatcaatgcaagtaaacaatctacaattttcacaggttatagtttgggaggctggtttaataactatatttcctacaactagcatataagggggctttatgcaactttgtaaaggaaccgttagaatggaatttaggtcgatagtataaaatggcttacgatatcttgtttctaaagtttgatttccagaccaaattctaatgtggtgtgaggccacagtaagcctccacaattctggatgttcaggaccagaaacaggacttattatttttggtcttggggtagagattcctttttcttcccattcccaaaggtagaaagactgtaattttttatgcttatgtttgtctagactttctgttaagtcgctatcaacagctggactcacttgtgcacttggacacgactgagtttgtcctgagcaattgtggtagaattgacctcgaggtgcccaatctataatagtttcgaattcattgttttgtaatatcaccacactattggccacacattcttcccaaactaaaacttctgtattctttgatcctttaggaatttccttggggcaagttttccctttaggtctaaattttaatgatctttgataagaaaagtcttgtaaataatttacccgtggcctgagtgacatcccgcttaccatgtgataagtgaatctactgttaggactgacagtaggtacttctaccaaccaattttggactgcaggcattaaacatcctggtgctctccctaggcaaataggaggataatgatacccaatggaaatatttatcatcatcccttcttcctcaggtttggcagggcagcgatcatctgtggggccaggtacccatacactatcattaacatatacttctataggattatccatccatgtgactggtgttaccat

SEQ ID NO: 126679 - DNA, 1083 bp, Homo sapiens
atggctgcccggggaacaggagacaaagtgaagcccgggtgtgaggaagctggggccgcctttgagctgcctccttcagtctacgctgctgccctgcacgagagccaccagcatcaaccctgtcctgcaggaggagcacgggcacagagagtgcctggtgggattgtgacggagcccctgacctgcacaccaccgaaggatatggtcttccttagtgatgatggtgatgatgatgatgatgatgataatgatgatggtggtggtgatgatgataatgatggtaatgataatgatggtgacaatgataatggtgatgatgatgatggtgatgataatgatgatgatggtggtgatgatgataatgatggtaatggtaatgatggtgacaatgataatgatgatggtgataatgatgatagtaatggtaatgatgatggtgatggtgatgatgatggtgttgatgatgatgatgacaatagtgatggtaatgatggtgatgatgatgatagtgatgacgatgatggtgatagtaatggttatgatgatgatggtgatggtaatgatgatgatgatggtgatagcgatgatgatgatagtgataatggtgatggtgataatggtgatggtgatgatgatggtggtggtggtgatgatgatgataatggtcatgatgatgatggtgatatgatgatgatgatagtgatgatggtgatggtgatgatggtggtgatgatggtgatggtgatgatggtggtggtggtgcaattgaggaagagagcagaggccagtgtttctgaagcaaagtgctcaattaatgtcagtgatgataatgatgatggtgatggtaatgatggtgatgatgatgatagtgatggtgatgatgacgatggtggtggtgatggtggtgatagtgaactcaccaatcaattcccgactaatcactcaggcatgaaggcttcaaagctccgaaaagacagtgaccatcgagaatgggccatgatgacgatggcggttttgtcgaaaagaaaagggggaaatgtggggaaaagaaagagagatcagattgttactgtgtctgtgtag

SEQ ID NO: 126680 - DNA, 380 bp, Homo sapiens
gtgaggagcgcctctgcctggccgctgtgcaatcttccaagtgtgaagtgacagcctttctgcaggtgtacccaacagctccgaagagacagcaaccatcgagaacgggccatgatgacgatggcggttttgtcgaaaagaaaagagggaagcgtggggaaaagaaagagagatcagattgttactgtgtctgtgtagaaagaagcccacacatggctgcccatggaacaatcagcaggcacttcctcacttctgagcccataaaaaccccagactcagccagactccaacaaatgggactaccagctgtgggaaaaagctacccacttcaggtctcctggactcatcaggatgacctgcccttagaaaggagctacccg

SEQ ID NO: 126681 - DNA, 768 bp, Homo sapiens; identical to SEQ ID NO: 121787

SEQ ID NO: 126682 - DNA, 2802 bp, Homo sapiens
atgaagccagaaataaagatgttctttgaaaccaacgagaacaaagacacaacataccagaatctctgggacacattcaaagcagtgtgtagagggaaatttatagcactaaatgcccacaagagaaagcaggaaagatctaaaatcaacaccctaacatcacaattcaaagaactagagaagcaagagcaaacaaattcaaaagctagcagaaggcaagaaataactaagatcagagcagaactgaaggaaatagagacacaaaaaccccttcaaaaaatcaatgaatccaggagctggttttttgaaaagatcaacaaaattgatagaccgctagcaagactaataaagaagaaaagagagaagaatcaaatagacgcaataaaaaatgacaaaggggatatcaccactgatcccacagaaatacaaactaccatcagagaatactataaacacctctacgcaaataaactagaaaatctagaagaaatggataaattcctggacatgtacactctcccaagactaaaccaggaagaagttgaatctctgaatagaccaataacaggctcagaaattgaggcaataattaacagcttaccaaccaaaaaaagtccaggaccagatggattcacagctgaattctaccagaggtacaaggaggagctggtatcattccttctgaaactattccaatcaataaaaaaagagggaatcctcctgaacttattttatgaggacagcatcatcctgaaaccaaagcctggcagagacacaacaaaaaaagagaattttagaccaatatccttgatgaacattgatgcaaaaatcctcattaaaatactggcaaaccgaatccagcaacacatcaaaaagcttatccaccatgatcaagtgggcttcatccctgggatgcaaggctggttcaacatacgaaaatcaataaatgtaatccagcatataaacagaaccaaagacaaaaaccacatgattatctcaatagatgcagaaaaggcctttgacaaaattcaacaacccttcatgttaaaaactctcaataaattaggtattcatgggacatatctcaaaataataagagctatctatgacaaacccacagccaatatcatactgaatgggcaaaaactgaaagcattccctttgaaaactggcacaagacagggatgccctctctcaccactcgtattcaacatagtgttggaagttctggcctgggcaatcaggcaggagaaggaaataaagggcatccaattaggaaaagaggaagtcaaattatccctgtttgcagatgacatgactgtatatctagaaaacccgatcatctcagcccaaaatctccttaagctgataagcaacttcagcaaagtctcaggatacaaaatcaatgtacaaaaatcacaagcattcttatacaccaataacggacaaacagagagcctaatcatgagtgaactcccattcacaattgcttcaaagagaataaaatacctaggaatccaacttacaagggatgtgaaggacctcttcaaggagaactacaaaccactgctcaatgaaataaaagaggattacaaacaaatggaagaacattccatgctcatgggtaggaagaatcaatatcgtgaaaatggccatactgcccaagtgaggagcgcctctgcccggccgcccatcgtctgggaagtgaggagcgcctctgcccggccgcccatcatctgggaagtgaggagcgcctctgcccggccgcccatcgtctgggaagtgaggagcgcctctgcccggccgccctgtctgggaagtgaggagcacctctgcccggccgctgtgcaatcttccaagtgtgaaggacagccattctgcaggtgtacccaacagctccaaagagacagcgaccatcgagaaggggccatgatgacgatggcggttttgtcgaaaagaaaagggggaaatgcaaagaagttgaaaactttgaaaaaaaatttagaagaatgtataactagaataaccaatacagagaagtgcttaaaggagctgatggagctgaaaaccaaggctcgagaactacgtgaagaatgcagaagcctcaggagccgatgcgatcaactggaagaaagggtatcagcgatggaagatgaaatgaatgaaatgaagcgagaagggaagtttagagaaaaaagaataaaaagaaatgagcaaagcctccaagaaatatgggactatgtgaaaagaccaaatctatgtctgattagtgtacctgaaagtgatggagagaatggaaccaagttggaaaacactctgcaggatattatccaggagaacttccccaatctaccaaggcaggccaatgttgagattcaggaaatacagagaacgccacaaagatactcctcgagaagagcaactccaagacacataattgtcagattcaccaaagttgaaatgaaggaaaaaatgttaagggcagccagagagaaaggtcgggttaccctcaaagggaagcccatcagactaactgcggatctctcggcagaaatcctacaagccagaagagagtgggggccgatattcaacattcttaaagacaagaattttcaacccagaatttcatatccagccaaactaagcttcataagcgaaggagaaataaaatcctttacagacaagcaaatgctgagagattttgtcaccaccaggcctgccctaaaagagctcctgaaggaagtgctaaacatggaaaggaacaactggtaccagccactgcaaaatcatgccaaaatgtaa

SEQ ID NO: 126683 - DNA, 1080 bp, Homo sapiens
agtatttattgttcattcttgggtgtttctcgtagatggggatgtggcagggtcacaggataatagtggagagaaggtcagcagataaacatgtgaacaaaggtctctggttttcctaggcagaggtccctgccagccttccacagtgtttgtgtcccctgggtacttgagattagggagtggtgatgactcttaacgagcatgctgccttcaagtatctgtttaacaaagcacatcttgcaccacccttaatccatttaaccctgagttgacacagcacacgtttcagagagcacggggttgggggtaaggttatagattaacagcatcccaaggcagaagaattttacttagtacagaacaaaatggagtctcctatgtctacttctttctacacagacacagtaacaatctgatctctctttcttttccccacatttcccccttttctttttgacaaaaccgccatcgtcatcatggcccgttctcgatggtcgctgtctcttcacagctgttggatacacctgcagaaaggctgtcacttcacacttggaagattgcacagcggccaggcagaggcactcctcacttcccagacggggcggtggccaggcagagacgcttccccagacggggcggccgggcagaggcactcctcacttcccagatggggcggcatcctcttttggttactgtagccttgtagcatagtttgaagtcaggtggtgtgatgcatccagctttgttcttttggcttacgattgtcttggcaatgcaggctcttttttggttccatatgaaatttaaagaagttttttctaattctgtgaagaaagtcaatggtatcttgatagggataccattgaatctataaattactttgggcagtatggccattttcacgatattgattcttcctatccatgagcctggaatgtttttccatttgtttgtgccctctcttatttccttgagcagtgctttgtagttctcctcgaagaggtccttcacatcccttgtaagttggattcctaggtattttattctctttgtagtaattgtgaatgggagttcactcat

SEQ ID NO: 126684 - DNA, 6800 bp, Homo sapiens
tatggggcaaactaaaagtaaaattaaaagtaaatatgcctcttatctcagctttattaaaattcttttaaaaagagggggagttaaagtatctacaaaaaatctaatcaagctatttcaaataatagaacaattttgcccatggtttccagaacaaggaacttcagatctaaaagattggaaaagaattggtaaggaactaaaacaagcaggtaggaagggtaatatcattccacttacagtatggaatgattgggccattattaaagcagctttagaaccatttcaaacagaagaagatagcatttcagtttctgatgcccctggaagctgtttaatagattgtaatgaaaacacaaggaaaaaatcccagaaagaaaccgaaagtttacattgcgaatatgtagcagagccggtaatggctcagtcaacgcaaaatgttgactataatcaattacaggaggtgatatatcctgaaacgttaaaattagaaggaaaaggtccagaattaatggggccatcagagtctaaaccacgaggcacaagtcctcttccagcaggtcaggtgctcgtaagattacaacctcaaaagcaggttaaagaaaataagacccaaccgcaagtagcctatcaatactggccgctggctgaacttcagtatcggccacccccagaaagtcagtatggatatccaggaatgcccccagcaccacagggcagggcgccataccatcagccgcccactaggagacttaatcctatggcaccacctagtagacagggtagtgaattacatgaaattattgataaatcaagaaaggaaggagatactgaggcatggcaattcccagtaacgttagaaccgatgccacctggagaaggagcccaagagggagagcctcccacagttgaggccagatacaagtctttttcgataaaaatgctaaaagatatgaaagagggagtaaaacagtatggacccaactccccttatatgaggacattattagattccattgcttatggacatagactcattccttatgattgggagattctggcaaaatcgtctctctcaccctctcaatttttacaatttaagacttggtggattgatggggtacaagaacaggtccgaagaaatagggctgccaatcctccagttaacatagatgcagatcaactattaggaataggtcaaaattggagtactattagtcaacaagcattaatgcaaaatgaggccattgagcaagttagagctatctgccttagagcctgggaaaaaatccaagacccaggaagtacctgcccctcatttaatacagtaagacaaggttcaaaagagccctaccctgattttgtggcaaggctccaagatgttgctcaaaagtcaattgccgatgaaaaagccggtaaggtcatagtggagttgatggcatatgaaaacgccaatcctgagtgtcaatcagccattaagccattaaaaggaaaggttcctgcaggatcagatgtaatctcagaatatgtaaaagcctgtgatggaatcggaggagctatgcataaagctatgcttatggctcaagcaataacaggagttgttttaggaggacaagttagaacatttggaggaaaatgttataattgtggtcaaattggtcacttaaaaaagaattgcccagtcttaaacaaacagaatataactattcaagcaactacaacaggtagagagccacctgacttatgtccaagatgtaaaaaaggaaaacattgggctagtcaatgtcgttctaaatttgataaaaatgggcaaccattgtcgggaaacgagcaaaggggccagcctcaggccccacaacaaactggggcattcccaattcagccatttgttcctcagggttttcagggacaacaacccccactgtcccaagtgtttcagggaataagccagttaccacaatacaacaattgtccctcaccacaagcggcagtgcagcaggtagatttatgtactatacaagcagtctctctgcttccaggggagcccccacaaaaaatccctacaggggtatatggcccactgcctgaggggactgtaggactaatcttgggaagatcaagtctaaatctaaaaggagttcaaattcaaattaagtgtgtttgatccagactataaaggcgaaattcagttggttattagcttttcaattccttggagtgtcagtccaggaagacaggagtgctcaatatttactcctgccatatataaagggtggaaatagtgaactaaaaaaaataggagggcttggaagcactgatccaccaggaaaggctgtcatattgggcaaatcaagtctcagaggacagacctgtgtgtaaggccattattcaaggaaaacagtttgaagggttggtagacactggagcagatgtctctattattgctttaaatcagtggccaaaaaactggcctaaacaaaaggctgttacaggacttgtcggcataggcacagcctcagaagtgtatcaaagtatggagattttacattgcttagggccagataatcaagaaagtactgttcagccaatgattacttcaattcctcttaatctgtggggtcgagatttattacaacaatggggtgcggaaatcaccatgcccgctccattatatagccccacgagtcaaaaaatcatgaccaagatgggatatataccaggaaagggactaggaataaaatgaagatggcattaaagttccagttgaggctaaaataaatcaagaaagagaaggaattagggtatccttttttaggggcggtcactgtagagcctcctaaacccataccactaacttggaaaacagaaaaaccggtgtgggtaaatcagtggccgctaccaaaacaaaaactggaggctttacatttattagcaaatgaacagttagaaaagggtcacattgagccttcgttctcaccttggaattctcctgtgtttgtaattcagaagaaatcaggcaaatggcatacgttaactgacttaagggctgtaaacgccgtaattcaacccatggggcctctccaacccgggttgccctctccggccatgatcccaaaagattggcctttaattataattgatctaaaggattgcttttttaccatccctctggcagagcaggattgtgaaaaatttgcctttactataccagccataaataataaagaaccagccaccaggtttcagtggaaagtgttacctcagggaatgcttaatagtccaactatttgtcagacttttgtaggtcgagctcttcaaccagtgagagaaaagttttcagactgttatattattcattatattgatgatattttatgtgctgcagaaacgaaagataaattaattgactgttatacatttctgcaagcagaggttgccaatgctggactggcaatagcatctgataagatccaaacctctactccttttcattatttagggatgcagatagaaaatagaaaaattaagccacaaaaaatagaaataagaaaagacacattaaaaacactaaatgattttcaaaaattactaggagatattaattggattcggccaactctaggcattcctacttatgccatgtcaaatttgttctctatcttaagaggagactcagacttaaatagtcaaagaatattaaccccagaggcaacaaaagaaattaaattagtggaagaaaaaattcagtcagcgcaaataaatagaatagatcccttagccccactccaacttttgatttttgccactgcacattctccaacaggcatcattattcaaaatactgatcttgtggagtggtcattccttcctcacagtacagttaagacttttacattgtacttggatcaaatagctacattaatcggtcagacaagattacgaataacaaaattatgtggaaatgacccagacaaaatagttgtccctttaaccaaggaacaagttagacaagcctttatcaattctggtgcatggcagattggtcttgctaattttgtgggacttattgataatcattacccaaaaacaaagatcttccagttcttaaaattgactacttggattctacctaaaattaccagacgtgaacctttagaaaatgctctaacagtatttactgatggttccagcaatggaaaagcagcttacacagggccgaaagaacgagtaatcaaaactccatatcaatcggctcaaagagcagagttggttgcagtcattacagtgttacaagattttgaccaacctatcaatattatatcagattctgcatatgtagtacaggctacaagggatgttgagacagctctaattaaatatagcatggatgatcagttaaaccagctattcaatttattacaacaaactgtaagaaaaagaaatttcccattttatattactcatattcgagcacacactaatttaccagggcctttgactaaagcaaatgaacaagctgacttactggtatcatctgcactcataaaagcacaagaacttcatgctttgactcatgtaaatgcagcaggattaaaaaacaaatttgatgtcacatggaaacaggcaaaagatattgtacaacattgcacccagtgtcaagtcttacacctgcccactcaagaggcaggagttaatcccagaggtctgtgtcctaatgcattatggcaaatggatgtcacgcatgtaccttcatttggaagattatcatatgttcatgtaacagttgatacttattcttattcacatttcatatgggcaacttgccaaacaggagaaagtacttcccatgttaaaaaacatttattgtcttgttttgctgtaatgggagttccagaaaaaatcaaaactgacaatggaccaggatattgtagtaaagctttccaaaaattcttaagtcagtggaaaatttcacatacaacaggaattccttataattcccaaggacaggccatagttgaaagaactaatagaacactcaaaactcaattagttaaacaaaaagaagggggagacagtaaggagtgtaccactcctcagatgcaacttaatctagcactctatactttaaattttttaaacatttatagaaatcagactactacttctgcagaacaacatcttactggtaaaaagaacagcccacatgaaggaaaactaatttggtggaaagataataaaaataagacatgggaaatagggaaggtgataacgtgggggagaggttttgcttgtgtttcaccaggagaaaatcagcttcctgtttggttacccactagacatttgaagttctacaatgaacccatcggagatgcaaagaaaagggcctccacggagatggtaacaccagtcacatggatggataatcctatagaagtatatgttaatgatagtatatgggtacctggccccatagatgatcgctgccctgccaaacctgaggaagaagggatgatgataaatatttccattgggtatcgttatcctcctatttgcctagggagagcaccaggatgtttaatgcctgcagtccaaaattggttggtagaagtacctactgtcagtcccatcagtagattcacttatcacatggtaagcgggatgtcactcaggccacgggtaaattatttacaagacttttcttatcaaagatcattaaaatttagacctaaagggaaaccttgccccaaggaaattcccaaagaatcaaaaaatacagaagttttagtttgggaagaatgtgtggccaatatgattatgggattaattgcagtcacagctacggctgctgtagcaggagttgcattgcactcttctgttcagtcagtaaactttgttaatgattggcaaaagaattctacaagattgtggaattcacaatctagtattgatcaaaaattggcaaatcaaattaatgatcttagacaaactgtcatttggatgggagacagactcatgagcttagaacatcgtttccagttacaatgtgactggaatacgtcagatttttgtattacaccccaaatttataatgagtctgagcatcactgggacatggttagacgccatctacagggaagagaagataatctcactttagacatttccaaattaaaagaacaaattttcgaagcatcaaaagcccatttaaatttggtgccaggaactgaggcaattgcaggagttgctgatggcctcgcaaatcttaaccctgtcacttgggttaagaccattggaagtactacgattataaatctcatattaatccttgtgtgcctgttttgtctgttgttagtctgcaggtgtacccaacagctccgaagagacagcgaccatcgagaacgggccatgatgacgatggcggttttgtcgaaaagaaaagggggaaatgtggggaaaagcaagagagatcaaattgttactgtgtctgtgtagaaagccaaaagcttcttaagctgataagccacttcatcaaagactcaggatacaaaataaacgtgcaaaagtccctaagattcctatataccaacaacagtcaagcagagagccaaatcatcaatgaacttccatttgcaattgccacaaagaagataatacctaggaatacagataacaaaccctggagacaagagcatatagtttgcattggaccatatgctagaatggaaatggggataaaagaatcagcaaccccattcaaagataaggagcaccagagactgatgactggggaatcactgtga

SEQ ID NO: 126685 - DNA, 462 bp, Homo sapiens; identical to SEQ ID NO: 125476

SEQ ID NO: 126686 - DNA, 645 bp, Homo sapiens; identical to SEQ ID NO: 125434

SEQ ID NO: 126687 - DNA, 587 bp, Homo sapiens; identical to SEQ ID NO: 125478

SEQ ID NO: 126688 - DNA, 441 bp, Homo sapiens; identical to SEQ ID NO: 125479

SEQ ID NO: 126689 - DNA, 1139 bp, Homo sapiens; identical to SEQ ID NO: 125480

SEQ ID NO: 126690 - DNA, 451 bp, Homo sapiens
  misc_feature (1)...(451): n = a,t,c or g
caatgagcaaacagttttaaacaaggcagtctactgttaaataatatgcttaccttatttttataggcttttgatgaattaccacattatgctttgttaaaagaactcttaattcaggtaaatatctttaaaattagctatccaaaatatacatgatatatcttggaataaggaactaacatacacttttttaactagatctttagtacaccacggtatcatcccaaaagccaaccatttgtggaccacgtgtttactttcaccattttggataataggatatggtttcggaactttcagatcatagaagaagatgctgctcttgtagaaataggacctcgttttgtcttaaatctcataaagattttccagggaagttttggaggaccaactttatatgaaaatcctcactaccagtcaccaaacatgcatcggcgtgtcataagatccn

SEQ ID NO: 126691 - DNA, 992 bp, Homo sapiens
ccaagaggacacgtagtgtaggctttgcaggtcaggctaagaagccataaataaacgaaatagatgcggagccgccagctaagcggcacgccacaacaaaggaggtggaggaagaatagagggaccggatcccaggccccgtttgcaagggaaagtggaaaaataaggaacggattctcatcttttcttccagaggaataaattttagaacaagacatttaatgcaggacttgagaatgttgatgcctcattctaaagcatgatactaatatggctcgcagcgataatctatctgtgataaacgagggttgtgaaatgaacaactggcttagatgcatctattttgaagctaagaaaaaacaggatctctatatgtggctttcaaattcacctgacggaccatctgctaaattccttgttcaaaatattcataccctcgctgaactgaagatgactggaaactgtttgaaaggttctcggccccttttgtcttttgaccctgcttttgatgaattaccacattatgctttgttaaaagaactcttaattcagatctttagtacaccacggtatcatcccaaaagccaaccatttgtggaccacgtgtttactttcaccattttggataataggatatggtttcggaactttcagatcatagaagaagatgctgctcttgtagaaataggacctcgttttgtcttaaatctcataaagattttccagggaagttttggaggaccaactttatatgaaaatcctcactaccagtcaccaaacatgcatcggcgtgtcataagatccatcacagctgcaaaatacagagagaaacagcaagtgaaagatgtgcaaaaactgagaaagaaagagccgaagactcttcttccacatgatcccgctgcagatgtttttgtaacaccagctgaggagaaaccaatagaaatacagtgggtaaaaccagagacaaaagttgatttgaaagcaagtgtatt

SEQ ID NO: 126692 - DNA, 345 bp, Homo sapiens
atgaggcaaagaaagtccaacgagggagagaggagacactcccggcaggccacaggcacggccgatcgcctgcagccacgagtccggaccaacctcggccacatgccaggccatgccggcaccgagcctgccggcccacctactcaaacggctgacgtgcgacgtcgcccgcaaccggcgcgccagccgccggcccgcccccaccccccccgcaggcaccccccacccacccccagtcagatgcagaagccatttgaagacgcctcgtttgcgctgcggacgggggagatgagcgggcccgtgttcacggattccggcatccacatcatcctccgcactgagtga

SEQ ID NO: 126693 - DNA, 1034 bp, Homo sapiens
  misc_feature (1)...(1034): n = a,t,c or g
cccggctgggagaagcgcatgagccgcagctcagagtaaacactcaggaagcgttacccactgctgccattcccanagatgcaaaagtccgagtgtactacttcaaccacatcactaacgccagccagtgggagcggcccatcggcaacagcagcagtggtggcaaaaacgggcagggggagcctgccagggtccgctgctcgcacctgctggtgaagcacagccagtcacggcggccctcgtcctggcggcaggagaagatcacccggaccaaggaggagggccctggagctgatcaacggctacatccagaagatcaagtcgggagaggaggactttgaagtctctggcctcacagttcagcgactgcagctcagccaaggccaaggggagacctgggttgccttcagcagaggtcagatgcagaagccattttgaagaacgcctcgttttgcgcttgcggacggggggagatgagcggggcccgtgtttcacggatttccggcatccacatcatccttccgcacttgagtgagggtgggaagcccaggcctggcctcggggcagggcagggcggctaggccggccagctcccccttgcccgccagccagtggccgaacccccccactccctgccaccgtcacacagtatttattgttcccacaatggctgggagggggcccttccagattgggggccctggggtccccactccctgtccatccccagttggggctgcgaccgccagattctcccttaaggaaattgacttcagcaggggtgggaggctcccagacccagggcagtgtggtgggaggggtgttccaaagagaaggcctggtcagcagagccgccccgtgtccccccaggtgctggaggcagactcgagggccgaattgtttctagttaggccacgctcctctgttcagtcgcaaaggtgaacactcatgcggcccagccatgggccctttgagcaactgtgcagcaccctttcacccccaattaaacccagatccaaataaaaaaaaaaaaa

SEQ ID NO: 126694 - DNA, 651 bp, Homo sapiens
atggatggatggatggatggatggatggatggatggatggatggacaggtggacgcaaagacaaatggatggatgaatggatggatggatgtactgatttctgccatgggaaatgatgctttctcatctggggatggccaggacaggtgctacaaggactccatgagccagagcttctggggccatctcacccatgtgcagagaaatccacctacagtgacgtggacgcagcagaaggcaggagctgacagcctgcggggcaaggtgttggctgcacctgttgagtgcctggatacacctgttgagtgcctggatgcagccgtgcctgaaggcatggctcctcctggacttttcactgactggagccagtacattccttcttcgctgaagttgcccctccaggaccagtgcttgagtggaggaggcctccctaaaggtcaaacggtccaggaggacacctgccaccacaacacagccctgggcctgcagtgtagcatcatcagtgaacacaccaccacgcacatcaccgtcacctcttgcaggcatctccgagccacagccacagcaatcgagactccctctcctctccgagctctctccgtacacctcgtctcactaacttcacacaaccctgggacatctgtgctctga

SEQ ID NO: 126695 - DNA, 462 bp, Homo sapiens
cctgaatggacaggaggaaacagctggggtcgtgtccaccaacctaatccttaatggagactggaccttccagatcgtggtgatgctggaaatgaccccccagcagggagacgtttacatatcccaagtggagcacaccagcctggacagtcctgtcaccgtggagtggaaggcacaggaggagcaagaaagttcaacgaggatctgcataaacagggttcctgacctcaccgaaaagactaatgtgccttagaacaagcatttgctgtgttttgttagcacctggttccaggacagaccctcagcttcccaagaggatactcctcccaagaagttgctctgaagtcagtttcgatcgttctgctgtttgattcaaagcactgtttctctcactgggcctccaaccatgttcccttgttcttagcaccacaaataatcaaaacccaaaaaaaaaaaaaaaaa

SEQ ID NO: 126696 - DNA, 743 bp, Homo sapiens
cagaagactatctggagagaaagcggcaggcccgacagaatgtcagacccactcgaagctgggcgggcccatgaccctcaagcgcgaagtcaagcctaggttgatgtttccccttccaagaaggggccccttgcagcaccacaccctgctttgtctgccacgtgcggattttctacccaggcagcattcaagtcgatggttcctgaatggcaggaagaaaacagctggggtcgtgtcacccaacctgatccgtaatggagactggaccttcagatcctggtgatgctggaaatgacccccagcagggagatgtctacacctgccaagtggagcacaccagcctggatagtcctgtcaccgtggagtggaaggcacagtctgattctgcccggagtaagacattgacgggagctgggggcttcgtgctggggctcatcatctgtggagtgggcatcttcatgcacaggaggagcaagaaagttcaacgaggatctgcataaacagggttcctgagctcactgaaaagactattgtgccttaggaaaagcatttgctgtgtttcgttagcatctggctccaggacagaccttcaacttccaaattggatactgctgccaagaagttgctctgaagtcagtttctatcattctgctctttgattcaaagcactgtttctctcactgggcctccaaccatgttcccttcttcttagcaccacaaataatcaaaacccaacaaaaaaa

SEQ ID NO: 126697 - DNA, 366 bp, Homo sapiens
atgctggaaatgaccccccagcagggagacgtctacatctgccaagtggagcacaccagcctggacagtcctgtcaccgtggagtggaaggcacagtctgattctgcccggagtaagacattgacgggagctgggggcttcgtgctggggctcatcatctgtggagtgggcaccttcatgcacaggaggagcaagaaaggtgagaaagcctgcaagttcaacgaggatctgcataaacaggaactggaagctttatttctggtcctcaaagggcaaagtgacaagcgacattcaatagctcatggcctgaggcttcctgatgcccagggtcttacactcgtagccaggactgatgtgttgtcatag

SEQ ID NO: 126698 - DNA, 1568 bp, Homo sapiens
agctccctttagcgagtccttcttttcctgactgcagctcttttcattttgccatccttttccagcaccatgatggttctgcaggtttctgcggccccccggacagtggctctgacggcgttactgatggtgctgctcacatctgtggtccagggcagggccactccagagaattaccttttccagggacggcaggaatgctacgcgtttaatgggacacagcgcttcctggagagatacatctacaaccgggaggagttcgcgcgcttcgacagcgacgtgggggagttccgggcggtgacggagctggggcggcctgctgcggagtactggaacagccagaaggacatcctggaggagaagcgggcagtgccggacaggatgtgcagacacaactacgagctgggcgggcccatgaccctcgaagcgcgaagtcccagcctagggtgaatgtttccccctccaaagaaggggccctttcaagcacacatacctgcttggtctgccacgtgacaagatttctacccaggcagccatccaagtccgatggttcctgaatggacaggaggaaacagctgggggtcgtgtccaccaacctgatccgtaaatggagactggaccttccagaatcctggttgatgctggaaaatgacccccccagcaagggagatgtctaaacctgcccaagtggagcacacccagccctggataagtcctgtcacccgtgggagtggacaggcacagtctgattctgcccggagtaagacattgacgggagctggggggcttcgtgctggggctcaatcatctgtggagtgggcatcttcatgcacaggaggagcaagaaaggtgagaaagcctgcaagttcaacgaggatctgcataaacaggggttcctgagcttccttgaaaaagcctattgtgccttagaacaagcatttgctgtgttttgttagcacctggttccaggacagaccctcaagcttcccaaagaggatactgctgcccaagaagttgcccctgaagtcagtttctatcgttctgctcctttgatttcaaaagcacttgtttctcctcactgggggcctccaaaccatgttcccttcttcttaagcaccacaaataatcaaaacccaacataagtgtttgttttcctttaaaaaatatgcatcaaatcgtctctcattacttttctctgagggttttagtaaacagtaggagttaataaagaagttcattttggtttacacgtaggaaagaagagaagcatcaaagtggagatatgttaactattgtataatgtggcctgttatacatgacactcttctgaattgactgtatttcagtgagctgcccccaaatcaagtttagtgccctcatccatttatgtctcagaccgctattcttaactattcaatggtgagcagactgcaaatctgcctgataggacccatattcccacagcactaattcaacatatatcttactgagagcatgttttatcattaccattaagaagttaaatgaacatcagaatttaaaatcataaatataatctaatacacttt

SEQ ID NO: 126699 - DNA, 577 bp, Homo sapiens
atgagcccgcccggttcctctctgtgcacctcatgcctggggctccgtcccgtcctgggtgggttttcacctgcaccgctggcccctcccccgggagcgttggtggagccggctttctcagccaggagcctgttgcggggtcagcggctggagctcaaggtcggctcaggggactttctcgtgctggaggttggctgcggagcagcctgcatttctcggaaaacagggcccagggcctgctccacgccgctgtccacgtcttcaccatcccctcgttgcaggttcgaggccgagctcagacctgtggagcagaagctgagtgcgctgcagtccccgctggcccagaggcccttcttcgaggtgccctcacccctgggcgccgtggacctgtacgagtatgcatgcggggatgaggacctggagccactgtgacgccacccatgagaacgccgctgcggggccgctccacacgtgccacggccaccactgggacaccgccgcttgtgtaaaaactgttgtcttttgtggaaaatgagtgtgtttgcatggaatgataaatttttatttattcacaaaa

SEQ ID NO: 126700 - DNA, 1387 bp, Homo sapiens
atggatgacatgggcctggtggccaaggcctgcggctgccccctctactggaaggggccgctcttctatggcgccggcggggagcgcacgggctccgtgtccgtccacaagttcgtcgccatgtggagaaaaatcctccagaactgccacgacgacgcggccaagttcgtccatctgctcatgagccccggctgcaactacctggtgcaggaggactttgtccccttcttgcaggacgtggtgaacacgcacccggggctgtcgttcctgaaggaggcgtccgagttccactcgcgctacatcaccacggtcatccagcggatcttctacgccgtgaaccggtcctggtccggcaggatcacctgcgccgagctgcggaggagctccttcctgcagaatgtggcgctgctggaggaggaggcggacatcaaccagctgaccgaattcttctcgtacgagcatttctacgtcatctactgcaagttctgggagctggacacggaccacgacctgctcatcgacgcggacgacctggcgcggcacaatgaccacgccctttctaccaagatgatagacaggatcttctcaggagcagtcacacgaggcagaaaagtgcagaaggaagggaagatcagctatgccgactttgtctggtttttgatctctgaggaagacaaaaaaacaccgaccagcatcgagtactggttccgctgcatggacctggacggggacggcgccctgtccatgttcgagctcgagtacttctacgaggagcagtgccgaaggctggacagcatggccatcgaggccctgcccttccaggactgcctctgccagatgctggacctggtcaagccgaggactgaagggaagatcacgctgccagaacttgaagcgctgcaagctggccaacgtcttcttcgacaccttcttcaacatcgagaagtacctcgaccacgagcagaaagagcagatctccctgctcagggacggtgacagcggcggccccgagctctcggactgggagaagtacgcggccgaggagtacgacatcctggtggccgaggagaccgcgggagagccctgggaggacgggttcgaggccgagctcagccctgtggagcagaagctgagtgcgctgcggttccccgctggcccagaggcccttcttcgaggcgccctcaccgctgggcgccgtggacctgtacgagtacgcgtgcggggacgaggacctggagccgctgtgacgccacccgcgagaacgccgccgcggggccgccccccacgtgccaccaaccggggccaaccgcggctcgtgtaaaaaacttgtttgttgaaaatgagtgcgtttgtacggaatgataaacttttaatttaattcacagaa

SEQ ID NO: 126701 - DNA, 446 bp, Homo sapiens
ccgggttggaattaccgggccgagataaacagactgtggcttatcggctgcttttgggggcccttgctctggcttatggggagaagaatttgacctttgaaggaccactgcctgaaaagataaaactcttggctcacaaggggctgctcaatctcacatattaccagcaaatccaggtgcagaaaaaggacaacaagatatttgagatctcctgttgcagcgaccatcgatgcaagtggcttccagcttctatgaacaccgtctgcacccagtccctgaccctggcgatcgattcttgtcatggcactgtggttgctctccgctatgcttggaccacatggccttgtgaatataagcagtgtcccctataccaccccagtagtgccctgccagcccctcccttcattgctttcattacagaccagggtcctggaaaaaaaaaaaaa

SEQ ID NO: 126702 - DNA, 420 bp, Homo sapiens
atgagagggactgttgcagctgtctttggagagacactgccacaacacatccaccctcgagataaacagactgtggcttatcggctgcatttgggggcccgtgctctggcttatggtgagaagaatttgacctttgaaggaccactgcctgagaagatagaactcttggctcacaaggggctgctcaatctcacatattaccagcaaatccaggtgcagaaaaaggacaacaagatatttgaggctcagagaataggggtccttagaggagacttcaaggctggaagtggagagtggcacaatcttccaatgcctgttggtatcacgttgcttcttcctcattcccaagcagcaattcagtccaggaacagtggaatccagtgtcccagcacttgcgttcggcctcatcatgctccctga

SEQ ID NO: 126703 - DNA, 595 bp, Homo sapiens
tgtttatcaatactctggttctgactaaagtgaattttgacatggacatgtcatgtcatgtcatacccacacaagggtctaggtctaatgctaagcctttgctctgtaaagcattccaccttgagagacgttttcactctgtaatgtttggcacaacttttgtaaaaatattagctgtgaaatttttctgtgatcgctttttattttctcctcagtaagcataatatttatccttctaaaaaagtatccaaagctccttaggatggttcacctttctctttctctctagtcctggtgttactttgcatccaacactttttcctctcaataatacaggtgcttccactggaagaccacaccccagcaagcgactggctcttgaatgacacctggattctatggcctttccctccactttgggaagctctttagttagacaggtactgtaagcggcaggagaaaaaaagctaattattacttgctggagtcttgtctcaggcatgctgcggggctgtgcaagattcgctgctctgctgctgtcgtcattatgatgctacaattacagagaggcgggtcagcacccagccgatcggtg

SEQ ID NO: 126704 - DNA, 1387 bp, Homo sapiens
cactgccatctggctgccttgccaggcacttcccacgagaggggactaggtagcttacagggaaagggaagaagagagatgaaatgtctggggctttctaagggttttttcaaaaatgttaaataaactcctgttttcacacagcacaccgttccggaaggcaaaagccttgtatgcctgcaaagctgaacatgactcagaactttcgttcacagcaggcacggtcttcgataacgctggtgcttgcaggccccagcagactgcaggtgcagtgggtctgctgaaggctgtccaaagccatttcactgcctcatgccttcttcatgttctcaagcaaggtcggcaaactatgacctgcccgtcaaatccaacctgccacctgtcacctaacaattctgtaactgctcccacatacaacatggtcgtcatcataaatcctataggtattgttgagagcaggaggaaagtttggttgagaaactttagggcagatgaggagaatgaattggttatcagagtggaagaccatggcccaggatccctgagctttcccagtagcctccagtttccttttacctgtctaactaaagagcttcccaaagtggagggaaaggccatagaatccaggtgtcattcagagccagtccttgctgaaatgtggtcttccagtggaagcacctgtattattgagaggaaaaagtgttggatgcaaagtaacaccaggactagagagaaagagaaagtggggagtaactggccatggcccattgagagcaatcaccctcgattttttatgtttccattcagccatcagttattgaccacctcttccatgccggagctgctacaaccaggaagttctcaggtattcatttacagcagtgcaagaattaatacaacacccaagccagaggccatcaaaatgccagtggtctggcttaaacacatgatgcaggccaatcagatttttgctcctctcccgcctctggctcctctgcatgttaagagcaaagtcgccccaaagcaggaaatgggattactctcctatcgtgatgaagcctgtgttgcctctcccagtgactcagggatggagtgtggactcttgagttgccatagcccatggactgaaactgtgtccagagattctagaaccttcctgaggcttgagcacagtgtttggagcagcactgagaggataagagatatggcagtcatggacaggaaaggaggaaattaccataggaaagttggagattctgttgccgtcatcccattgggcggtcggaagctggggtcagtccagaagcctctggataaacctgggggtagtcccagccagaaatcctcagttgccccaggacttcttccaaccccaagtgatggctaa

SEQ ID NO: 126705 - DNA, 1200 bp, Homo sapiens
atgaacccattggagtgtgtggacagatcatcccagccctggggaaatcctacttggaccagctctgggatgaggtctgtcaccttcctcgtaggattcaaacttacttttcttgcccttgcccagactctcaacgctgcagcttcactgacaggacaagagctgcttgctggctttcctcccggggtcatcaatattttgccaggatatgggccaacggctggggcagcaatagcttctcacattggcatagacaagattgcattcacagggtctactgagaaggaggcagagcttcacagctggatcaagggactcacctgcatctccattgagcctgacttccagaagagcctgaaggacgggattatcttatgcatactcatgaacaagctgcagccggcctcattccccaagatcaaccactccatgcagaagtggcaccagctggaaaacctctccaacttcatcaaggctgtagtcagctatgacatgaaccccatggacctgttcaaggccaacaacctgtttgagagtgggaacatgaggcacatgcaggtgtctctttttgccctagcagggaaggtcaagactaagaggccgcagagcggggtggacattggcatcaaatactcagagaagcaggagcagaacttcagtgacgccgccatgaaggctggccagtgcgtcatcgggctgcaaatgggcaccaacaaatgtaccagccagttgggcatgaccgtgtatggcatgggtacaaataactgtgccagccaggtgagcatgacagctcctgggacgcggcagcacatctgtgacaccaagctgggaaccgacaagtgtggtaattcctccatgtccctgcagatgggctacacccaggtgctgccaatcaaccgagggtctgtgagtggcaacgtggaatcaggcagcagggctttcttcccccttgccttggtccttcgcaggaatgagccaccaggctgtggaggagaaggggtcaaggccatatcccaatatgtgtatggtgagggtccctgctggcacgtccaggctgccagcagagctgtgccggggagaagagacctgggcttggagggaaccagtacccggaggtttccagttgccttgcctcttcccacttttgtcagccgatcagtttgtggtttctatacccgcaaaagtttcaggatgcattaa

SEQ ID NO: 126706 - DNA, 1329 bp, Homo sapiens
atgaacccattggagtgtgtggacagatcatcccagccctggggaaatcctacttggaccagctctgggatgaggtctgtcaccttcctcgtaggattcaaacttacttttcttgcccttgcccagactctcaacgctgcagcttcactgacaggacaagagctgctttggaacttccccctgctgatgtttgcctggaaaatagctccagctttgtgctgtggcaatacagtagttattaagccagcagagcaaacaccactcagtgcactctacatgggagccctcatcaaggaggctggctttcctcccggggtcatcaatattttgccaggatatgggccaacggctggggcagcaatagcttctcacattggcatagacaagattgcattcacagggtctactgagaaggaggcagagcttcacagctggatcaagggactcacctgcatctccattgagcctgacttccagaagagcctgaaggacgggattatcttatgcatactcatgaacaagctgcagccggcctcattccccaagatcaaccactccatgcagaagtggcaccagctggaaaacctctccaacttcatcaaggctgtagtcagctatgacatgaaccccatggacctgttcaaggccaacaacctgtttgagagtgggaacatgaggcacatgcaggtgtctctttttgccctagcagggaaggtcaagactaagaggccgcagagcggggtggacattggcatcaaatactcagagaagcaggagcagaacttcagtgacgccgccatgaaggctggccagtgcgtcatcgggctgcaaatgggcaccaacaaatgtaccagccagttgggcatgaccgtgtatggcatgggtacaaataactgtgccagccaggtgagcatgacagctcctgggacgcggcagcacatctgtgacaccaagctgggaaccgacaagtgtggtaattcctccatgtccctgcagatgggctacacccaggtgctgccaatcaaccgagggtctgtgagtggcaacgtggaatcaggcagcagggctttcttcccccttgccttggtccttcgcaggaatgagccaccaggctgtggaggagaaggggtcaaggccatatcccaatatgtgtatggtgagggtccctgctggcacgtccaggctgccagcagagctgtgccggggagaagagacctgggcttggagggaaccagtacccggaggtttccagttgccttgcctcttcccacttttgtcagccgatcagtttgtggtttctatacccgcaaaagtttcaggatgcattaa

SEQ ID NO: 126707 - DNA, 732 bp, Homo sapiens
atgaacaagctgcagccggcctcattccccaagatcaaccactccatgcagaagtggcaccagctggaaaacctctccaacttcatcaaggctgtagtcagctatgacatgaaccccatggacctgttcaaggccaacaacctgtttgagagtgggaacatgaggcacatgcaggtgtctctttttgccctagcagggaaggtcaagactaagaggccgcagagcggggtggacattggcatcaaatactcagagaagcaggagcagaacttcagtgacgccgccatgaaggctggccagtgcgtcatcgggctgcaaatgggcaccaacaaatgtaccagccagttgggcatgaccgtgtatggcatgggtacaaataactgtgccagccaggtgagcatgacagctcctgggacgcggcagcacatctgtgacaccaagctgggaaccgacaagtgtggtaattcctccatgtccctgcagatgggctacacccagggaatgagccaccaggctgtggaggagaaggggtcaaggccatatcccaatatgtgtatggtgagggtccctgctggcacgtccaggctgccagcagagctgtggccggggagaagagacctgggcttggagggaaccagtacccggaggtttccagttgccttgcctcttcccacttttgtcagccgatcagtttgtggtttctatacccgcaaaagtttcaggatgcattaa

SEQ ID NO: 126708 - DNA, 417 bp, Homo sapiens
gctctccactctccaccccttttctttaaaaaaaaaaaaaaagctacaggaagtgggattggcacgttttcttttcaataatttataactgtttttctaccttctaaggtcatggcgaatacgtaatagagtcttttaagggttacttgattcaaatatgtcttaagtaactgcttcctttacatttacagtgttctcgcagtctttgccttataaaactcatgcattcaatgaagagcggctgcaagagtgagctaatccttttgttcggcgaactttgaagtttttcgccttactgcacagcagtgatttgttaggtagcatgccctctctcacatcttttaaggttaggtgtaaagtttcccaaaaagcaccaagagagttaacttctaagggtgaaacgaaatccgattcagt

SEQ ID NO: 126709 - DNA, 770 bp, Homo sapiens
  misc_feature (1)...(770): n = a,t,c or g
acgcacgaccccctgcctcttcttccagaagccaatgggcacagaagcaccaattctcccacaataggttcacctgctattgtttcccccacccaggacagtcggcccaatatgtcaagactctctgatcactagatcccctgcatctccactgaacaaccaaggcatccctactccagcacaactcacaaaatccaatgcgcctgtccacattgatgtgggcggccacatgtacaccagcagcctggccaccctcaccaaataccctgaatccagaatcggaagactttttgatggtacagagcccattgttttggacagtctcaaacagcactatttcattgacagagatggacagatgttcagatatatcttgaattttctacgaacatccaaactcctcattcctgatgatttcaaggactacactttgttatatgaagaggcaaaatattttcagcttcagcccatgttgttggagatggaaagatggaagcaggacagagaaactggtcgattttcaaggccctgtgagtgcctcgtcgtgcgtgtggccccagacctcggagaaaggatcacgctaagcggtgacaaatccttgatagaagaagtatttccagagatcggcgacgtgatgtgtaactctgtcaatgcaggctggaatcacgactcgacgcacgtcatcaggtttccactaaatggctactgtcacctcaactcagtccaggtcctctagaggttgcagcanagaggatttgaaatcgtgggct

SEQ ID NO: 126710 - DNA, 828 bp, Homo sapiens
atgaaacgatactcctatggttctgttttatttactgcattcgatcttggttatttagaccctgatgaggttcagcagggacacgaaatcggaagactttttgatggtacagagcccattgttttggacagtctcaaacagcactatttcattgacagagatggacagatgttcagatatatcttgaattttctacgaacatccaaactcctcattcctgatgatttcaagagaactttggtgtttatattaccactcgcagcccctttctcagttggccttgaggcttgcccattagctggtaaacgtttgaaagggtcagtgtgtccagaactggaatttccactttggaaaaagcacagagtgttctcgcagtctttgccttataaaactcatgcattcaatgaagagcggctgcaagataacaaatcctacattcactcagttcttcaggagccaagagaagatactgatcctgagggggctggagcagctccagaccacagatcaacatacaagcttctgtctcccgcattatccctcaaccttggagaaaaaaataagtggttgcgacgctatattgaacttttaatttctgaaagggagatggcagctgcaggtagcagcatcccatcctggacttcagtgtccatccaggtgaagttgagaaagtgtcagctccagctactggccaaggaagaggttgccacaattgtgttagatgaaacatctggagtcaatgggatacatattgagcatcaacttcagtgtctaatacaagtgcccaaactctcagccccaaatatcgcccccccaaccccagcctaa

SEQ ID NO: 126711 - DNA, 470 bp, Homo sapiens
aatggccaaatcctgtgctgctgaagcaaccagaagaatgcaatttgaatttgcctgtctgggatcctcgggtaaatccatcagataggtatcatctcatgcccataatcacccctgcctacccacaacagaattctacgtataatgtgtccacatcaactcgaacagtaatggtagaagaatttaaacaaggtcttgcagtcacagatgaaattcttcaaggaaagtcagattggtccaaactacttgagccaccgaatttctttcaaaagtatagacattatatagtattgactgccagcgcatcaacagaagaaaaccatctagagtgggttggattagcagaatctaaaatccgtgtacttgttggaaacttggaacggaatgaatctattactcttgcccatgtgaatccccagtcattcccagggaataaggaacatcataaagacaacaattacgtatcaatg

SEQ ID NO: 126712 - DNA, 1686 bp, Homo sapiens
atgctgctcaacaggaatgtggcagaggaaagaagccagagccaaaactggccaggtgtgagtgtgggctgtggggggagggggaagatcgaggactgtgtctgggtgctgctgaaagtgcctctaggtggtggggggacagggctgtcttcgggagggaaggaaggcaacaggaatggcccacacctccacacctctgaaaccaacccgattcatcttgctgcaatcaaacctgtaccagtgtttctcaaccctggctggggagctcttaaaaatgcctgtgcccaggtgtctctccaggccaatctaatcacaccctctgtggatgggtcccgggcatccagactctgtgaagcagaactcgggcctctagcgtctgctagtctagatctaaaggtgtttcctgagggacagtttggcctggcatgcaggtacctctgcagaccacaacagtgcaccgaaaacaccccctcccagcacgcacacaagtctggctcctcagccaaacatcaaacaccaacactgctgcccatgccagatgccaaggaatggccaaatcctgtgctgctgaagcaaccagaagaaagcaatttgaatttgcctgtctgggatcctcgggtaaatccatcagataggtatcatctcatgcccataatcacccctgcctacccacaacagaattctacgtataatgtgtccacatcaactcgaacagtaatggtagaagaatttaaacaaggtcttgcagtcacagatgaaattcttcaaggaaagtcagattggtccaaactacttgagccaccgaatttctttcaaaagtatagggttggattagtagaatctaaaatccgtgtacttgttggaaacttggaacggaatgaatttattactcttgcccatgtgaatccccagtcattcccagggaataaggaacatcataaagaacaggcaaacaatataaatatgctaaaggagggaatgaaaattgaagcaactcatgtaaagaaaaaacaacttcaccactaccttcctgcagaaattcttcaaaagaagaaaaagcaaagtctctctgatgtcaatcgaagctcgggcggacttcaatccaaaagattgtctctggatagcagttgtctggatagctccagagacactgataatggaacaccttttaattctccagcgtccaagtctgatagcccttctgtaggagaaacagaaaggaatagtgctgagcctgctgctgtaattgtggagaagccactgagtgtaccaccagcccaaggactttccattccagtgattggcgcaaaagttgactctacagtaaaaactgtatcaccccccactgtgtgtaccattcctaccgtagtaggacgaaatgtcattcctagaatcacaacacctcacaaccctgcccagggacaaccgcatctgaatggaatgtcaaatataactaagactgttacacctaagagatcccattccccatccatagatgggactcctaagaggttgaaagacgtagaaaaggatgccattggaggagaatctatgcctattccaactattgatacatcacgcaaaaagagactacccagtaaagaactaccagattcatcatctccagttccagcaaacaacatccgtgtcatcaaaaattccattcgactgacccttaatcggtaa

SEQ ID NO: 126713 - DNA, 1985 bp, Homo sapiens
atgaacaaaccgtatatcagaaacctcagcgagaacgccgcccccttggacctagaaggtatcttgaaggacgccaagatccccgtgtcgggacccttcctggtgaagattggctacgcgttcgtggactgcccagacgagatctgggccctcaaggccattgaggcgctttcaggtaaaatagaactgcacgggaaacccatagaagttgagcactcggtcccaaaaaggcaaaggattcggaaacttcagatacgaaatatccctcctcacttacagtgggaggtgctggatagttgactagtccagtatggagtggtggagagctgtcagcaagtgaacactgactcggaaactgcagttgtaaatgtaacctattccagtaaggaccaagctagacaagcgctagacaagcactagacaaactgaatggatttcagttagagaatttcaccttgaaagtagcctatatccctgatgaaatggccacccagcaaaacccctttctgcagccccgaggtcgccgggggcttgggcagaggggctcctcaaggcaggggtctccaggatccgtgtccaagcagaaaccatgtgatttgcctctgtgcctgctggttcccacccaatttgttggagccattataggaaaagaaggtgccaccattcggaacatcaccaaacagacccagtctaaaatcgatgtccaccgtaaagaaaatgcaggggctgctgagaagtcgattactatcctctctactcctgaaggcacctctgcggcttgtaagtctattctggagattatgcgtaaggaaactcaagatgtaaaattcacagaagagatccccttgaagattttagctcaaaataactttgttggccgtcttattggtaaagaaggaagaaatcttaaaaaaattgagcaagacacagacactaaaatcacgatatctccattgcaggaactgatgcagtataatccagaacacaccattacagctaaaggcaatgttgagacatgtgccaaagctgaggaagagatcatgaagaaaatcagggagcgttaggaaaatgatatcacttctatgatttcaagcacatttaattcctggattaaatctgaacgccttgggtctgttcccacccacttcagggatgccacctcccacctcagggcccccttcagccatgactcctccctccccgcagtctgagcaatcagaatccgagactgttcatctgtttatcccggctctatcagtcagagccctcatcagcaagcagggccagcacatcaagcagctttctcgctttgctggagcttcaagtaagattgctccagtggaagcaccagatgctaaggtgaggatggtgatgatcgctggatcaccagaggctcggttcaaggctcagggaagaatttatggaaaaattaaagaagaaaactttgttagtcctaaagaagaggtgaaacttgaagctcatatcagagtgccatcctttgctgctggcagagttattggaaaaggaggcaaaacggtgaatgaacttcagaatttbtcaagtgcagaagttgttgtccctcgtgaccagacacctgatgagaatgaccaagtggttgtcaaaataactggtcacttctatgcttgccaggttgcccagagaaaaattcaggaaattctgactcaggtaaagcagcaccaacaacagaaggctctgcaaagtggaccacctcagtcaagacggaagtaaaggctcaggaaacagcccaccacagaggcagatgccaaaccaaagacagattgcttaaccaacagatgggcgctgaccccctatccagaatcacatgcacaagtttttacctagccagttgtttctgaggaccaggcaacttttgaactccctgtctctgtgagaatgtatactttatgctctctgaaatgtatgacacccagctttaaaacaaacgaacaaacaaacaaaaaaag

SEQ ID NO: 126714 - DNA, 1998 bp, Homo sapiens
gtatcttgaaggacgccaagatccccgtgtcgggacccttcctggtgaagattggctacgcgttcgtggactgcccagacgagatctgggccctcaaggccattgaggcgctttcaggtaaaatagaactgcacgggaaacccatagaagttgagcactcggtcccaaaaaggcaccaccgtaaagaaaatgcaggggctgctgagaagtcgattactatcctctctactcctgaaggcacctctgcggcttgtaagtctattctggagattatgcgtaaggaaactcaagatgtaaaattcacagaagatgttcatctgtttatcccggctctatcagtcagagccctcatcagcaagcagggccagcacatcaagcagctttctcgctttgctggagcttcaagtaagattgctccagtggaagcaccagatgctaaggtgaggatggtgatgatcgctggtgttgtcccttgtgaccagacacctgatgagaatgaccaagtggttgtcaaaataactggtcacttctatgcttgccaggttgcccagagaaaaattcaggaaattctgactcaggtaaagcagcagcaacaacagaaggctctgcaaagtggaccacctcagtcaagacggagtttcgtggaagacaatgtttccgtggaagaggggggagtgcagggagggaaaatgtttggggatgaagctgttccacctcagatcatcagccattggattctcataaggagtgtgcaacctggattcccgcatgcgcagttcacagtagggttccagctcctatgagaatctagtgctcctgtgagaatctagtgctcctatgattggaagaccgtgaatggagagatgggtgaacagaaagagactacagagtcttctaaacaatatgggatgttcccagcaagttcacctaaaggaggagaagtgccagccaggccgtccaactcccgctcctctgtggcccaggtgagtgcttcaacaggaaataaagcagccggttcctgtgttggtcaagtgatctgccggtgtcagaggacgcctggagttccgacgcgtgtcttcgagctcatagagggagttcttctccctttgaagaatcccgagaactgtgtaaagctgtttggcaccttgagacataattctagccacgcaggtggctcagactgtctgatcttgtgatagacacttgatgggaatcctgttgcctttctatgggttcatgtggacatgaaggtgtggaaagagggctcccaggctgcccccatgcggggtttctgttgtttggctaaccgagttaaaagcagtgatgtagataccatggagatagaggcacagacccagcttagccggggagcaaggcagcaaggaggtggtaggagatgtggtgggagaaagggcaccaagtacctggctgtgtgaacccagcttgaaaaagtgggcaccagcaagatttactacaaagagcaaaaaaacaaaccttccacaacgtggaaggggaccagagcaggtaggtctcctggctggggcggcctgcttttattcccttatctggccccacccacatcctcactggcactgccgagggactttgcggcacctagtccaggtactcctgcagcccagagggagctcgtcccccatcaagcccagcaggcgctggccaaccgcgctgagtgcggggcttgccgagccgcgctcacctggaacccgcgccagccagtgagcaccactcgcaaccccagctcccgcccgcgccgctccctccacacctccccaccagcagagagagccggctccggcctcggccagccccagagatgggcccccacagcacagcagcgggctgaagggctcctcgagcgcggccagatcgaggagcgccgccaggttgaggaggtgccgagagcgagccagggctgctagcacgttgttacctctcactttcacgttcaagctctttttggctatgtcctacacatta

SEQ ID NO: 126715 - DNA, 371 bp, Homo sapiens
atggacaaactggaaatcataacacagtgtgacaaattccagggagcagaggactcccagaaaggactgacaggctccaactacccgggactcagtattagccttcgcctcactggctcctctgcacaagaggaggcttccggagtagccctcggtgaagccccagaccacagctatgagtcccttcgtgtgacgtctgcgcagaaacatgttctgcatgtccagctcaaccggcccaacaagaggaatgccatgaacaaggtcttctggaggtctgacctgcagatcctggaggcctgcctgcggggggaggcggggctgcgggactgggtgaaagtggaacgttgtgggaagatggacatgagggcagg

SEQ ID NO: 126716 - DNA, 547 bp, Homo sapiens
  misc_feature (1)...(547): n = a,t,c or g
tcaacactctgattgcctttcaacctggctacttcatttcattgctactaactacctcatcttcagtcaaaagcctgaatttcaggatctttcagtggaagaacgcagttttgttgaaaagcacagatggccgtcgaatatgtacttgaagccagcttgcggaattncagggaggtatattcactcccggaaatgtcgttgcttagtaatgtaaccctggagcttttatacactacattttcttttttattatttatgaagaatgggatacctccaggttccagtaaaattcttctgaccgaaaccaatgtgggtgttagaaaaattacccatatagcttaatatgtttattagttctctttggaaaaaaactaccactgtggtcttaaaagggagcaaaatataccataggctaaaactaaggctttcactctagaatgcaaagctgttttgcagctgttttcccttaaaagatgtcctgttgctttagtgatatttagacccctctcgagttaagaaatgcttaggttaaaaaaaaaaaaaaaaa

SEQ ID NO: 126717 - DNA, 561 bp, Homo sapiens
atggacaaactggaaatcataacacagtgtgacaaattccagggagcagaggactcccagaaaggtgaacttgttttaacattgctcaccatcatctactacacagatacaggtgcagttattgaagtccgtggcttcagattaaaagctcaaattaaatcttcaagaacctcagatgcagccatgcattgcttaaagacgtttggccactccggcagccgtagattgttattcgctgttggcctggcttcttccgagaatgtacttttaacgttatttgctaatagtgctccctcatcctgtctgctgtcacagtatactgaaagctgcatcagtttcaccactctgattgcctttcaacctggctacttcatttcattgctactaactacctcatcttcagtcaaaagcctgaatttcaggatctttcgagtagtttcaagggtacatcgaacggttcgtctagttttcaaagcaatttcaggcagtgaaagcaacctgaggccctcacaaggagcagatgttggcaccatgcttcttatacagcccacagaaccatga

SEQ ID NO: 126718 - DNA, 894 bp, Homo sapiens
aaagccagctgttttcaacccacagataaggggattcttttgttcctggctcagtatcaaaggatgtctaaaaaggtgaatcttcagaagaaaggattgtctgaaattattaaatgttatgaggcactgccagctgtaatttctccctctcttcttcccacagactttcagaaagttttggtatcctacattggattaaagggtctttacttcacgggatatttgctgtttggcctggggacgggatttattgggctcttcccgaatgtctactccaccctggtcctgtgcagcctgtttggtgtaatgtccagcaccctgtacactgtgccctttaacctcattactgagtaccaccgcgaggaagaaaaggagaggtacaatgaaccccccaccaaacatgaaggtgcctctgacccttccaagtccaataaactgctgactgttaggcttaaaagaataaaacaacaacaacaaattgtccaccagaacgcttccaatgcttcctacaataacatgagttcagaaattcataaagagaagcagccagctgtggtcagtgagacaggacaggaaaaaggtgtatcccgttatccttccctggtgatgcttgattgttgccgttggcactacactgaccggtttacctggttctacctgggggaaataggccacctgcgatacccggaaggtgtgccgcgggtaaacactcaaaacagcacaccacaaaacacaatacacccaaacatgaacgccacacaacttaagacgccaccacacgcgaacacagtattcttaacccctctgcgttccgggttcaacacccccgtggccgcgactacccgactgatacttcggcttggtattgccgctcagattgttagggttgtatga

SEQ ID NO: 126719 - DNA, 1869 bp, Homo sapiens
atgttcacgtccaagtccaactcggtgtcgccctcgccgtccctggagcaggctgactcggacgccctggatatcagcaccaaagtgcagctctacggcgtgctgtggaagaggcctttcggcaggccgtcggccaagtggtcccggcggtttttcatcatcaaagagagctttctgctttactactctgagagcgaaaaaaagagctttgaaaccaataaatacttcaatatacatcctaagggcgtcatccctctggggggctgcctggtggagcccaaggaagagcctagcatgccctatgccatgaagatctcccaccaggacttccatgggaacatcttgcttgctgctgagtcggagtttgagcagacccagtggctggagatgctgcaggagtctgggaaggtgacctggaagaatgcccagctgggagaagccatgatcaaaagcctggaggcccaggggctgcagttggctaaggaaaagcaggagtatttagacaaactgatggaagagaccgaagaactctgccttcagagggagcagagagaggagcttgagcgccttaaccaggtgctggaggccgagaagcagcagttcgaggaggtggtgcaggagctgagaatggagcaggagcagatcaagagggagctggaactgactgcaagatgccttaagggtgtagaacaagagaaaaaggaactgaggcacctcacggagtccttgcagcagacactggaggaactctccatagagaagaagaaaaccctggaaatgctggaggagaacgagaaccacctgcagacactggccaatcagagtgagcagccccctcccagtgggggcctccatagcaacctccggcagatcgaggagaagatgcagcagctcttagaggagaagctcctggcagagaagcggatgaaggagaacgaggagcgctcacgggccctggaggaggagcgtgagttctactccagccagtcccaggcactgcagaactcgctgcaggagctgacggcagagaagcagcaggctgagcgggagctcaaggctgaggtgaaggtccgcatggacctggagaggcgtctccgggaggcagaaggggccttgcgaagcctggaacaggggctgaattccaaggtgcggaataaggagaaggaggagaggatgcgggctgatgtgagccatctgaaaaggttctttgaggagtgcatccggaatgccgagctggaggccaagatgcctgtgatcatgaagaactccgtgtacatccataaggcagccactcgccgcatcaagagctgccgcttccaccgacgccggtccagcacctcctggaatgacatgaagccgtcccagtccttcatgacctcccagctggatgccaacaacatggaggagctaaaggaggtggccaagcggctcagcagggaccagcgcttccgggaatccatctaccacatcatggccacccagcctggagccccctcggcactctcccggggtggaaattgcaagatgttcagccatcacatcggcactgatggcaggaagaagtggctgctgctgtctgcgcccgaggacctcatctcctcgcagaggctggctccccgcgccccgcatcccacgctgggacacgcgtgtggccttgccagggtgggcgagacacggccgccttccttcacatccaacgccgcacagacaaagccttgcgggctccacgggataatcaacagcgagaacgcccccagggacctccggaaagagacaccattggttgcaggcctccaggttctcgtctgcctgtgccccactgatgacaccattctgccagtgacgcctggatctcccatggcatcgtag

SEQ ID NO: 126720 - DNA, 372 bp, Homo sapiens
  misc_feature (1)...(372): n = a,t,c or g
gaaaaactttgaggaaagtcgagatggtcgtgtggacagctggcgaaacttccaagccaatacgaaggggaagaaagagaagaaaaatcggaccttcctgagaccaccgaaagtaaaaatggagcaacgtgagtgaccgcccaaggtcacaggcacagaacctttcccctgctatctcccttcctgcttcgaaggactcattctttccaaagagctagccgtcctccacccagtaccatgtcctagcctgtctgcatttgttagtggtaatattctttatgtataataaatttttatacccnnnnnnnnnnnnnnnnnnnnntttttttaaaggggccggaacttttttccttttagggggggttattttat

SEQ ID NO: 126721 - DNA, 470 bp, Homo sapiens
  misc_feature (1)...(470): n = a,t,c or g
gaggaattcggcacgagctgngccgnggaaatggcggcttcaggagagagcgggacttcaggcggcggaggcagcaccgaggaagcatttatgaccttctacagtgagagctggaaattaaaaggaaagagagagaagccaaagagatgcatgaaaggaaacgacaaagggaagaagagattgaagctcaagaaaaagccaaacgggaaagagagtggcagaaaaactttgaggaaagtcgagatggtcgtgtggacagctggcgaaacttccaagccaatacgaaggggaagaaagagaagaaaaatcggaccttcctgagaccaccgaaagtaaaaatggagcaacgtgagtgaccgcccaaggtcacaggcacagaacctttcccctgctatctcccttcctgcttcgaaggactcattctttccttccacttccaccccaacatagagtagtatttgctttttagg

SEQ ID NO: 126722 - DNA, 1522 bp, Homo sapiens
attcggcatgagggggtcacgtggtggctgggccggggaaatggcggcttcaggagagagcgggacttcaggcggcggaggcagcaccgaggaagcatttatgaccttctacagtgaggtgaaacaaatagagaagagagactcggttctaacttcgaaaaatcagattgaaagactgacccgtcctggttcctcttacttcaatttgaacccatttgaggttcttcagatagatcctgaagttacagatgaagaaataaaaaagaggtttcggcagttatccatcttggtgcatcctgacaaaaatcaagatgatgctgacagagcgcgaaaaggcttttgaagctgtggacaaagcttacaagttgctactggatcaggagcaaaagaagagggccctggatgtaattcaggcaggaaaagaatacgtggaacacactgtgaaagagcgaaaaaaacaattaaagaaggaaggaaaacctacaattgtagaggaggatgatcctgagctgttcaaacaagctgtatataaacagacaatgaaactctttgcagagctggaaattaaaaggaaagagagagaagccaaagagatgcatgaaaggaaacgacaaagggaagaagagattgaagctcaagaaaaagccaaacgcgggaaagagagtggcagaaaaactttgaggaaagtccgagatggtcgtgtggacagctggcgaaacttcccaagcccaattccgaagggggaagaaagagaagaaaaatcggaccttcctgagaccacccgaaagtaaaaatgggagcaacgttgagtgacccgcccaaggtcaccaggcacagaaccttttcccctgctatctcccttcctgcttcgaaggacttcattctttcctcccactttccaccccaacatagggttagtatttgctttttagtccattttgttttcaatacgatttaatatcgatcagagtaattctttttgtacatttgaaatgaggggcttggttttaaaaaaagacctttccctctccctgcccctaggaacaaccagtattaggaaggtgccaccattgggggctggcctttctctttcccaaaggcctggtaactcagtgtttttgtactttcactggatttgtgatggttagaaacttcgtggatagtttgtggaaatcatccaattaaacatactgcttaaaacagtgttgctgtgacttcagagacaagcctggaaggggcaccttaggaagccccttcgcttcagttgctcgcttctgggtgtgctcccttcgaaggcccagataagacagggaacacttgtgagcacacagagcagcatctgatgccctgtggtgtttggcatgtgccccctgtctactgaccaatcagtgtggcatgaggcccacgccacccaaacctttcactttccaaagagctagccgtcctccacccagtaccatgtcctagcctgtctgcatttgttagtggtaatattctttatgtataataaatttttataccc

SEQ ID NO: 126723 - DNA, 1404 bp, Homo sapiens
atggactgggaaggcagccttcccttggtgtttaattattgcagggatgcctctctgattattcacccacgtttcaaaggtgtcagaccacgcagggacgcctgccttggtccttcacccttagcggcaagtcccgcttttctgggaaaggggcaaaccatcacggacgccgagcttcgggtaactctcacagtggaggactcagcccgcctgcacccaggtgaaataaacagccatgttgctcacacaaagcctgtttggtggtctcttcacacggatgcacgtgaaaccacacacctgcaacgaactcattttcaacaaagctggctagtagtatcaggcccagaatccagcaaagtccacagtcagctcagtcaggacccagacataggctccactaccatagccattcatgtgatgggcacaactaggacagaggtggttgccaatacctcttctccaaaaccctcgctggccaacacacaagcagctgatcatccagaggagcacgctggcagaagagcacaccgacaggcacgggcacgctggcaggccatccaccggtgggatgaggcggagatttccagggcagtcggaggagagccggggctgccaagcacgggggtggcccgactccaggtgaaaaccatctcccctctggcttccccatcttctgagagctacttccactcaataaaaccttgcactcattctccaagcccacgtgtgatcggattctcccagtacaccaaggcaagaaaccctgagatacagaaagcctttctgtccttgcgacaagctattggcagaaaaagtaccagcaaggccacatttggatttggaaaaataaataaaccttcagaaatcttagtgcaagctttggcagctcaaataacatctgcatttaacttcagcaattctggcatcacagtacccgttggttggacatacaggatgtctaatcctgtctctgtaggttttggaacaggagggcagctctttcagttgaagaaacctccaactggaaacaaaacaagaaaaatgatggcctgccagtgtctgcgaatgtctgctggtgtattcttccgctggtgtgttcttccgctgggagacttcaggaagcttacactcatggtggaaggtgaagagggagcaggcacattccatgatgaaagaagcaatgggtggaatgtagtcagtttgaatgagtggagttcactcttacaggcgaaggagtggccagctgattctggccttcacacactccagtttccaccttgttcgttcatgcaccacctcccacaaagagttgagagctgcggactgagtaagccaggcacccctgttgtgagtcccacgagagggtcagggaaatatcctgcttcactgatacagcaggattaa

SEQ ID NO: 126724 - DNA, 654 bp, Homo sapiens
gatcaggggacctccctcgggagatcaatcccctgtcctcctgctctttactccatgagagagatccacctacgacctcgggtcctcagaccaaccagcccaaggaacatctcaccaattttaaatcgggtatacatccagatggcctgaagtaactgaagaatcacaaaagaagtgaaaatggcctgttcctgccttagctgatgacattaccttgtaaaattccttctcctggctcatcctggctcaaaatctcccccattgagcaccttatgacccccacccctgccagccagagaacaaccccctttgactgtaattttccattacctacccaaatcctataaaatggccccacccctatctcccttcactgactctcttttcggactcagcccgcctgcacccaggtgaaataaacagccatgttgctcacacaaagcctgtttggtggtctcttcacacggatgcacgtgaaaccacacacctgcaacgaactcattttcaacaaagctggctagtagtatcaggcccagaatccagcaaagtccacagtcagctcagtcaggacccagacataggctccactaccatagccattcatgtgatgggcacaactaggacagaggtggttgccaatacctcttctccaaa

SEQ ID NO: 126725 - DNA, 4275 bp, Homo sapiens
ctgcagtggatggtaaagtcacgggtcattagcgagctacaggaggcctgctgggacatggtatctgccatggcggcgactgcggcaaagcgagagcctcggagacgccgctgccgccagcacagccggagatctgagccgacactgggggcagtccgcgagccccgcactctctcgatgagtcggagaagtcccgttgtatcagagtaagatggacggtagctttgattgtgattgtggtgagctggagccacctgatcactaacaaaagacatcttctgttaaccaacagccgccaggcttcctgttgaaataaatatatagcaacaaaggaaaaaaagaagcaaaacggaaatagtgcttaccagcaccttagaatgatgctgctcaggaccagtccaacactgaatgtatctgcactgtgaggagaatgttcatagaagcctgttgtgtgcatatttattcacatttttgttaaatgttaaatcgtttagcacggtaatctgagtgcacagtatgtcatttcattccgtttgagtttcttgttttcgttaaatgtctgcagagttgctgcccctttcttgaactatgagtactgcaatctttttaattctcaatatgaatagagctttttgagctttaaatctaaggggaactcgacaggcctgtttggcatatgcaatgaacatcaagaaaccatcttgctgtggaagcataattatttttcttctccctttttgaaagatctttccttttgatgccagttttcttccttgtttacacaagttcaatttgaaaggaaaaggcaatagtaagggtttcaaaatggcagagaaatttgaaagtctcatgaacattcatggttttgatctgggttctaggtatatggacttaaaaccattgggttgtggaggcaatggcttggttttttctgctgtagacaatgactgtgacaaaagagtagccatcaagaaaattgtccttactgatccccagagtgtcaaacatgctctacgtgaaatcaaaattattagaagacttgaccatgataacattgtgaaagtgtttgagattcttggtcccagtggaagccaattaacagacgatgtgggctctcttacggaactgaacagtgtttacattgttcaggagtacatggagacagacttggctaatgtgctggagcagggccctttactggaagagcatgccaggcttttcatgtatcagctgctacgggggctcaagtatattcactctgcaaatgtactgcacagagatctcaaaccagctaatcttttcattaatacggaagacttggtgctgaagataggtgactttggtcttgcacggatcatggatcctcattattcccataagggtcatctttctgaaggattggttactaaatggtacagatctccacgtcttttactttctcctaataattatactaaagccattgacatgtgggctgcaggctgcatctttgctgaaatgctgactggtaaaaccctttttgcaggtgcacatgaacttgaacagatgcagctgattttagaatctattcctgttgtacatgaggaagatcgtcaggagcttctcagcgtaattccagtttacattagaaatgacatgactgagccacacaaacctttaactcagctgcttccaggaattagtcgagaagcactggatttcctggaacaaattttgacatttagccccatggatcggttaacagcagaagaagcactctcccatccttacatgagcatatattcttttccaatggatgagccaatttcaagccatccttttcatattgaagatgaagttgatgatattttgcttatggatgaaactcacagtcacatttataactgggaaaggtatcatgattgtcagttttcagagcatgattggcctgtacataacaactttgatattgatgaagttcagcttgatccaagagctctgtccgatgtcactgatgaagaagaagtacaagttgatccccgaaaatatttggatggagatcgggaaaagtatctggaggatcctgcttttgataccaattactctactgagccttgttggcaatactcagatcatcatgaaaacaaatattgtgatctggagtgtagccatacttgtaactacaaaacgaggtcatcatcatatttagataacttagtttggagagagagtgaagttaaccattactatgaacccaagcttattatagatctttccaattggaaagaacaaagcaaagaaaaatctgataagaaaggcaaatcaaaatgtgaaaggaatggattggttaaagcccagatagcgctagaggaagcatcacagcaactggctggaaaagaaagggaaaagaatcagggatttgattttgattcctttattgcaggaactattcatcttatgttcccagcatgagcctactgatgttggggagtaaattaaatgacttgaatagctcagtgtcccaactagaattgaaaagtttgatatcaaagtcagtaagccaagaaaaacaggaaaaaggaatggcaaatctggctcaattagaagccttgtaccagtcttcttgggacagccagtttgtgagtggtggggaggactgttttttcataaatcagttttgtgaggtaaggaaggatgaacaagttgagaaggaaaacacttacactagttacttggacaagttctttagcaggaaagaagatactgaaatgctagaaacttgagccagtagaggatgggaagcttggggagagaggacatgaggaaggatttctgaacaacagtggggagttcctctttaacaagcagctcgagtccataggcatcccacagtttcacagtccagttgggtcaccacttaagtcaatacaggccacattaacaccttctgctatgaaatcttcccctcaaattcctcatcagagcgataaacaggcagcattctaaacaaactgaattaaaacactcagcagacatttatctttgtattcttcatgaaatgtgttttgtcttttttttttattactagtgtttaagtcattttttacttgaatcagatggtgtcatttagtaaggattttatgagttcttgttttttaaaatccagactttctttttctacatgtgagatagttttcattttaactggcatgtcatttgcacacaaaaataaagactagagcaaaataatgcaacgcaggaggagaaaagaaatgcactaagacaagaacattctctcatagaacattgatctgttttacaggaaacaaaccttgccttgaaatttacacagtgagactgtacataattgcatgaaaatagctatttttttcctaagacatttttcattcatgaatattttcaagtttttcatactgtacacatttcttaaaacacatgataccagcagcaactgaaaatgaatgccgaatttggtacacatgtgttatctacctcaaggtaacaagagtatgtggcaaaacatataccacccatagtgcttcacaaaatgcacttctatttagccagcgtttattgtagtaaactattcttaataaaactcactcactgtttataaatgttctggtatgcattctttatagtgaagtgttaatacatcacatcttatttattttagcaaatcagtatattttctgtatttaattataaaaaattaacttagtttttaaaatttatttgcaaatatactttttccatttggcactatggtttgttgcctacctagctgcatctataatgtcagcttatcctaaggctgtccacgtacttaatttacttaagtgttcattttaagtaacgtgctcactgtgtataggaatttgtattttggaggtgcttgatctatctacaaaagaaaaaattaattaggaattactttattataaaatgctcctagaagtcttaattgtgtttattttttaaaaaaacaaatgttagacttgtgtgcatggaagtaattaaggtacatcattattgtagtttgaaagttgtacatgataagacattttgtttttactgtatgtttttactgaatgatctattccccatcccaaggcaagcatgaataaaattaggttaaacgtagcatgtggcatcgcagtctcttagaatttgtttcatctattttattttattgaatactgtctgtatctttggttatcctgtttgaagaaaaaggacaaataaaacatggccagcaaatacaaaaaaaaaaaa

SEQ ID NO: 126726 - DNA, 1560 bp, Homo sapiens
atgtggaatgctgtgaccctctggcagcagcgtgaatcatgcattgaagaggaatcagagataggaacactagagacaaaggagacacattttatccgtggacccaaaactctggctccggtcacggactgggaaggcagccttcccttggtgtttaatcaatgcagggacgcctctctgattatacacccacgtttcaagggtttcagaccacgcagggacgcctgccttggtccttcacccttagcagcaagtcctgcttttctggggaaggggcaagctgctcctcgccaggccgagctaggtcccaattcttcctcagcctctgctcctccaccctacaatccttttatcacctcccctcctcacacctggtcaggcttacagtttcattccatgactagccctccccctcctgcccagcaatttcctcttaaaaaggtggctggagctaaaggcatagtcaagcggctgaagactgacactgcccgattgccttggaagcccccagaccatcatagacgccgagcttcgggtaactctcacagtggaagggtacagcctccctcccggctgccttcgtgggctcatgttgagtgtctcaggcttttccaggagcacggtgcaagctgtcagtggatctaccgttctgggatctggaggacagtggttttcatgtgcgtccgtgtgaagagaccaccaaacaggctttgtgtgagcaatatgggctgtttatttcacctgggggcaggcgggctgagtccgaaaagagagtcagtgaagggagataggggtggggccgttttataggatttgggaaggtaatggaaaattacagtcaaagggggggtttttctctggtgggcaggggtgggggacacaaaggtgctcagtgggggtgctttttgagccaggatgagccaggaagaggactttcacaaggtaatgtcatcagttaaggcaaggaccggccatttacacttcttttgtggtggaatgtcatcagttaaggcggggcaggggcccttttcagttcttttgtgattcttcagttacattcaggccatcatggatgtatacatgcaagtcacaggggatgcagatggcttggcttgggctcagaggcatgacattactgaattattatattaataagaaaaataaaacaaaatagtgttgaagtgttggggtggcgaaaatttttggggggtggtatggagagagaatgggcgatgtttctcagggctgcttcaagcgggattaggggcagcgtgggaacctagagtgggagagattaagctgaagggaggtcttgtggtaaggggtgatattgtggggatgttagaagaaacatttgttgtatagaatgataggtgatggcctggatacagttttgtatgaattgaaaaactaaatggaataagagaaggagaaaaacaggtataaaaggactaagaattgggaggacctaggacatctaattagagagtgcctaaggagattcagcatagtcctgccagcaaagattatttatttacttcaagagttaagagggaattc

SEQ ID NO: 126727 - DNA, 1485 bp, Homo sapiens
ggagtaaactcacgaaatcctcgaagacctccgcctagttctgttaatacaggaggcatcacagagatcatggcagaaggaggtgaattagagtttgttaaaaggatcatccatgacagtctacaacttaaaaaaagattaaggattgatatggcagccttgttgattggtgtctgctctgaggtctcagggagaaaagattggatccagcagcttgcgccacgatggtatagctgcatgctgggaaagaaatgcagcctggcgcctctgaaggaggagcttcgcatacaaggggttcccaaagtaacgtacactgaattctgtcaaggtcggacaatgagatgggccttagcttggagtttttatgatgatgtcacagtaccagtacacgaaggacgtttagcagttggaggagttacatctgatagccagaacaaaggcagtgcgtcaccaccaagtaagcgaagaaaattagagaaaccgagaaaacccataacattcgtggtgctggcgtccgtgatgaaggaattatccctcaaagcatcacctctgcgctcggagacggcggaaggcatagtcgttgtcacgacatggattgaaaaaattctcactgatttgaaggtccagcataaacgagttccctgtggaaaagaggaagtcagccttttcctaacggccatagaaaactcctggattcatttaaggagaaagaaaagagagcgtgtgagacagctgagagaagttccccgagctcctgaggacgtcattcaggccttggaagagaaaaagcccacccccaaagagtctggcaatagccaagaactggccaggggcccccaggagaggaccccctgtgggcctgctctgcgggaaggcgaggctgccgctgtggagggcccgtgcccgagccaggagtccctgtcccaggaggaaaacccggaacccacggaggatgaaaggagtgaggaaaagggaggggtggaggttttggaaagttgtcaaggctctagcaacggagcccaggaccaagaggcttctgagcagttcggcagcccagtggctgaaagggggaaacgtctcccaggagtggccggacagtacctgtttaagtgtttgataaacgttaagaaggaggtggacgatgccttagtggagatgcactgggttgagggccagaacagggatctgatgaaccagctttgcacctacatacgggagcaagaggcaggaaagagcacagacttcgacgttcagacctgggttcccgtccagttccattccttgcacaggggtccttcccacctcttaagggaggagtccgaaggagtctacccatgggcctgcttgctctttctcccactgctggctgacctcatccacgccagtttcttcaaccactcctcatacattcattgtgcccagatccagacccatcctgaacttccagcatcctcattcctcacccgccggcccatggccgtgtga

SEQ ID NO: 126728 - DNA, 927 bp, Homo sapiens
actgggacctcatctatgtgggccggaagcggatgcaggtggagcaccccgagaaggctgtgcctcgcgtgaggaacctggtggaggccgactattcctactggaccctggcctacgtgatctccctgcaaggcgcccgcaaactgctggctgctgagccgctctccaagatgctgcctgtggacgagttcctgcccgtcatgttcgacaaacacccagtgtccgagtacaaggcccacttctccctccgcaacctgcatgccttctctgtggagccgctgctcatctaccccacacactacacaggagacgatggctatgtgagtgacaccgagacctcagtcgtatggaacaatgagcacgtcaagaccgactgggaccgcgccaagtcccagaagatgcgggagcagcaggcactgagccgtgaggccaagaactcggacgtgctccagtccccactggacagtgctgcccgggatgaactctgagggttagcagccagaaagccaaagcagccatcggtggcccaggctccacgtgcttactgaggactatcagggccaacctctggacccccttggcaggccacagagggctctcgtgtggggtggtgtccagccagctcttgctaagcaatcacgtgcacacaggcagcattaatggagtgcctactgcatgccagcaatcagggcttggccctggggaattgggaggaaccaagccctcttcatctgttcatgtgcccagcatttattaagcacctgctgtatgcaaggttcccatgttacggcagtgaatgaggcataattgttccctccatcagcgattgattcagtcatcaagcagttactgatcagattaagaatcagggcactagtgatacacattcatttttaaaattcattcaaggatttaaaaaaaaaaaaa

SEQ ID NO: 126729 - DNA, 239 bp, Homo sapiens
gaagaatggaatgaatatgagtttctcgttttcgaattatgcccagtcgagccagtttagaacctggcaagacagttcagtgagttatgcagctggagcactcacggtccactgaagctctgaatcctcatactctgtccggggccccagcctagcctttaccacgatactggccctggtttggggggattctgaacctcacactaatagacttctctcttcttctagtaggtgtagtc

SEQ ID NO: 126730 - DNA, 1259 bp, Homo sapiens
atgtccaaccgagtggtctgccgagaagccagtcacgccgggagctggtacacagcctcaggaccgcagctgaatgcacagctagaaggttggctttcacaagtacagtctacaaaaagacctgctagagccattattgccccccatgcaggatatacgtactgtgggtcttgtgctgcccatgcttataaacaagtggatccgtctattacccggagaattttcatccttgggccttctcatcatgtgcccctctctcgatgtgcactttccagtgtggatatatataggacacctctgtatgaccttcgtattgaccaaaagatttacggagaactgtggaagacaggaatgtttgaacgcatgtctctgcagacagatgaagatgaacacagtattgaaatgcatttgccttatacagctaaagccatggaaagccataaggatgagtttaccattattcctgtactggttggagctctgagtgagtcaaaagaacaggaattcggaaaactcttcagtaaatatctagcggatcctagtaatctctttgtggtttcttctgatttctgccattggggtcaaaggttccgttacacgttactatgatgaatcccagggggagatttattgatccattgaacatctagataaaatgggtatgagtattatagaacaattagaccctgtatcttttagcaattacttgaagaaataccataatactatatgtggaagacatcccattgggggtgttattaaatgctatcacagagctccagaagaatggaatgaatatgagtttttccgtttttgaattatgcccagtcgagccagtgtaagaaactggcaagacagttcagtgagttatgcagctggagcactcacggtccactgaagctctgaatcctcagggatgccacctgcacattcttcatactctgtccgggggtcccagcctaggccttttaccacgatacttggtcctggtttggggggattctgaaaccctcaaactaaattagaacttttcttccctttttttttctaagtaggtgtaagtcccttcccctaatttcaactccattaaaaaaatggctttatagttttaggggccagttggaagggaagggctgggcatcaaaataattttggatccaaaaaaggatgacaatggtaaaggctccagttggtgggcagacagttttttgaaagtaacttgtaaagcatttaccatatcctaaatttggcactccttt

SEQ ID NO: 126731 - DNA, 239 bp, Homo sapiens; identical to SEQ ID NO: 126729

SEQ ID NO: 126732 - DNA, 1259 bp, Homo sapiens; identical to SEQ ID NO: 126730

SEQ ID NO: 126733 - DNA, 915 bp, Homo sapiens
atgcgaccgacgctgctgtggtcgctgctgctgctgctcggagtcttcgccgccgccgccgcggccccgccagtatttcttgaagagaacaatttcctggttatggctgaggaatcagaaaatgcctttttatttctcatctgcaaggtgatggagagatgggagatggtgaacaggcgtgtggagggcggaataatggtccccaaagatgtccacgccctcatcctcagagtccgtgaacctgggaatgtgctgcctgacgtacaaaagggactccgcagataccctctttcccagctgcccgctcctcagcacccgaagattcgcctgtacaacgcagagcaggtcctgagttgggagccagtggccctgagcaatagcacgaggcctgttgtctaccaagtgcagtttaaatacaccgacagtaaatggttcacggccgacatcatgtccataggggtgaattgtacacagatcacagcaacagagtgtgacttcactgccgccagtccctcagcaggcttcccaatggatttcaatgtcactctacgccttcgagctgagctgggagcactccattctgcctgggtgacaatgccttggtttcaacactatcggaatgcctccactgagcttcagcaagtcatcctgatctccgtgggaacattttcgttgctgtcggtgctggcaggagcctgtttcttcctggtcctgaaatatagaggcctgattaaatactggtttcacactccaccaagcatcccattacagatagaagagtatttaaaagacccaactcagcccatcttagaggccttggacaaggacagctcaccaaaggatgacgtctgggactctgtgtccattatctcgtttccggaaaaggagcaagaagatgttctccaaacgctttga

SEQ ID NO: 126734 - DNA, 156 bp, Homo sapiens
atgcgaccgacgctgctgtggtcgctgctgctgctgctcggagtcttcgccgccgccgccgcggccccgccagtatttcttgaagagaacaatttcctggttatggctgaggaatcagaaaatgcctttttatttctcatctgcaaggtgatggag

SEQ ID NO: 126735 - DNA, 2215 bp, Homo sapiens
gttgactggaggcggaggttgcagtgagccgagatcgccccactgcactccagcctggtgactccgtctcaaaaaaaaggggaggggggcgggggagagttgaaagcttaatatgtactttgggggctattaaagcaaacatttcgactaaaggggcgaatcctcgaattgtgcgatcaagcacccgagaggagagttggggggggtcaggaggggtgggggctccagggaacgcccgggggcctgggccggggtctcgcggggcccttccggaaggatcgcggcccccgaaggtgggcgtcccgcggggctccagtctccaggacgttccgggaggctccgcgctctgggaggccggctgcgtggggtccccgcgctgcagccgcagaggccccccagggccgcggttcccggagcgggaaagtcccgcgcgggggcggtggcctcgggggcgggacggggcgggggcgggggcgcgggcggccgagccgaatcccctccaccgggacgccccgctgccgctcgggaagaggcgggccctgcgcgccctgcgctcgccatggcggtttgggcggcgacgtgagcggctccgcggaccccgagcggggccccggccgcgacctgagccgccgccgagcgcccggggccatgcgaccgacgctgctgtggtcgctgctgctgctgctcggagtcttcgccgccgccgccgcggccccgccagaccctctttcccagctgcccgctcctcagcacccgaagattcgcctgtacaacgcagagcaggtcctgagttgggagccagtggccctgagcaatagcacgaggcctgttgtctaccgagtgcagtttaaatacaccgacagtaaatggttcacggccgacatcatgtccataggggtgaattgtacacagatcacagcaacagagtgtgacttcactgccgccagtccctcagcaggcttcccaatggatttcaatgtcactctacgccttcgagctgagctgggagcactccattctgcctgggtgacaatgccttggtttcaacacttatcggaatgtgactgtcgggcctccagaaaacaattgggtgaccccaggagaaggctccctcatcaataggttctcctcttcctttgacatcgctgatacctccacggcctttttttgttattatgtccattactgggaaaaaggaggaatccaacaggtcaaaggccctttcagaagcaactccatttcattggataacttaaaaccctccagagtgtactgtttacaagtccaggcacaactgctttggaacaaaagtaacatctttagagtcgggcatttaagcaacatatcttgctacgaaacaatggcagatgcctccactgagcttcagcaagtcatcctgatctccgtgggaacattttcgttgctgtcggtgctggcaggagcctgtttcttcctggtcctgaaatatagaggcctgattaaatactggtttcacactccaccaagcatcccattacagatagaagagtatttaaaagacccaactcagcccatcttagaggccttggacaaggacagctcaccaaaggatgacgtctgggactctgtgtccattatctcgtttccggaaaaggagcaagaagatgttctccaaacgctttgaaccaaagcatgggcctagcccactggctccctggaagagatcaagccatcggagctgctagagttctgtctggactttccagagaccagtattcccttttgctgcctctaaaaggcctgtccctgcagacatgagagacagcaggtctcatgggggtgacaagcttttttttttttttcttaaagaattttcaaaatcaaattccagaatgattttacggagatatcccaggaaaattaaggcttctcttaaacactaaaaaggcatgtaattgcttgttagcaaaatggatatgacacatctctgatacttttttcattattggttgggctgagcagtcagaagacctggtcgtcgtcttgactttggcaaatgagccggagccccttgggcaggtcacacaacctgtcccagcgagggacactgagtggcccttcatgtacatccatggtgtgctggcttaaaatgtaattaatcttgtaaatatactcctagtaatttaagattttgtttttaaactggaaataaaagattgtatagtgcatgtttttt

SEQ ID NO: 126736 - DNA, 415 bp, Homo sapiens
tttcgtagcagcccgcgcccgggcaggaatagaatatgaacaaacccataacaccatcaacatatgtgcgctgcctcaatgttggactaattaggaagctgtcagattttattgatcctcaagaaggatggaagaagttagctgtagctattaaaaaaccatctggtgatgatagatacaatcagtttcacataagatgctgttcccaaaactgctaatacactaccttctaaagaagctataacagttcagcaaaaacagatgcctttctgtgacaaagacaggacattgatgacacctgtgcagaatcttgaacaaagctatatgccacctgactcctcaagtccagaaaataaaagtttagaagttagtgatacacgttttcacagtttttcattttatgaattgaagaatg

SEQ ID NO: 126737 - DNA, 405 bp, Homo sapiens
tcatgcaggacattttggttttgcaaaactttgcttgtgtgcatgctgcttgggatgtacttcttcataaaggaagtctgcagtcaactcatccccattgtctatctcgatttttaaggagatttgaagcattacttcaaactggaaaaagtcccacttctgaattactgtttgactggggcaccacaaattgcacagttggtgatcttgtggatcttttgatccaaaatgaattttttgctcctgcgagtcttttgctcccaggtaaacttgagcatcccaaaaacctgcagccatgcccttgcttttgactgtctgcttttgctttaattggaccactgccactttgggggagccattgctttgattgtgctttaggatcatactcgtaaagtcatgtttcat

SEQ ID NO: 126738 - DNA, 1128 bp, Homo sapiens
atgagcctattttcaagattagtgaaatacaacttgagccaaataattttcccaaaaaaccaaaaactagatcttcaaaatctgtccttagaagatggaagaaaccaagaagttcatactttgattaagtacactgatggtgaccaaaatcatcagtctggttcagaaaaggaagatactatcgttgatggaacttccaaatgtgaagaaaaagctgatgttttaagctcctttttggatgaaaaaactcatgagttactgaataattttgcctgtgatgtaagagagaagtggctttctaaaacagagctaattggactacctcctgaattctcaataggcagaatccttgacaaaaaccagagggctagtttacacagtgccattaggcagaaatttccatttttagtaactgtaggaaaaaacagtgaaattgttgtaaaaccaaatcttgaatataaagaactttgtcatttggtatctgaagaggaagcatttgacttttttaaatatttggatgcaaagaaagaaaattccaaatttacctttaaacctgatacaaacaaagaccacagaaaagctgtccaccattttgtcaacaaaaagtttggaaaccttgtggaaaccaaatctttttctaaaatgaattgcagtgctggtaatccgaatgtggtggtaacagtaagatttcgggaaaaagcacacaaactagacagcactaaaatctctgttcaacccttcccactgtgtcggaattggtgggttcttggtctcactgacttcaagaatgaagccgcggaccctcgcagtgaaagttatggtcccaaacattgtggttttcacagtttttcattttatgaattgaagaatgtcacaaataactttgatgaacgacccatttctgttggtggtaataaaatgggagagggaggatttggagttgtatataaaggctacgtaaataacacaactgtggcagtgaagaagcttgcagcagccttggcagtgagatgcgtcagagctgttggagtcagggtgctggcggtcttctgcagcaggggcacctgtcctgagatcaaatgtctgcactggctgaagggcatggtcacaaaccagactaaaccctaa

SEQ ID NO: 126739 - DNA, 1668 bp, Homo sapiens
atgaacaaacccataacaccatcaacatatgtgcgctgcctcaatgttggactaattaggaagctgtcagattttattgatcctcaagaaggatggaagaagttagctgtagctattaaaaaaccatctggtgatgatagatacaatcagtttcacataaggagatttgaagcattacttcaaactggaaaaagtcccacttctgaattactgtttgactggggcaccacaaattgcacagttggtgatcttgtggatcttttgatccaaaatgaattttttgctcctgcgagtcttttgctcccagatgctgttcccaaaactgctaatacactaccttctaaagaagctataacagttcagcaaaaacagatgcctttctgtgacaaagacaggacattgatgacacctgtgcagaatcttgaacaaagctatatgccacctgactcctcaagtccagaaaataaaagtttagaagttagtgatacacgttttcacagtttttcattttatgaattgaagaatgtcacaaataactttgatgaacgacccatttctgttggtggtaataaaatgggagagggaggatttggagttgtatataaaggctacgtaaataacacaactgtggcagtgaagaagcttgcagcagtaagttatattttcaggaataaaaagaaagagttgcttcatagtgtgccctataatagtgcaaatatcttactggatgaagcttttactgctaaaatatctgactttggccttgcacgggcttctgagaagtttgcccagacagtcatgactagcagaattgtgggaacaacagcttatatggcaccagaagctttgcgtggagaaataacacccaaatctgatatttacagctttgaccatcaagcaactatcgttgatggaacttccaaatgtgaagaaaaagctgatgttttaagctcctttttggatgaaaaaactcatgagttactgaataattttgcctgtgatgtaagagagaagtggctttctaaaacagagctaattggactacctcctgaattctcaataggcagaatccttgacaaaaaccagagggctagtttacacagtgccattaggcagaaatttccatttttagtaactgtaggaaaaaacagtgaaattgttgtaaaaccaaatcttgaatataaagaactttgtcatttggtatctgaagaggaagcatttgacttttttaaatatttggatgcaaagaaagaaaattccaaatttacctttaaacctgatacaaacaaagaccacagaaaagctgtcccacccattttgtcaacaaaaaagtttggaaaccttgtggaaacccaaatctttttctgaaatgaattgcagtgctggtaatccgaatgtggtggtaacagtaagatttcgggaaaaagcacacaaacgtgggaaaaggcctctttctgaatgccaagaaggaaaagttatatatacagcttttaccctacgaaaggaaaacctggaaatgtttgaagcgattggttttttagctatcaaacttggtgttaattcttcggattttagttatgcaggccttaaagacaagaaagccatcacctatcaagcaatggttgttagacgttttcctccagagaggttgaaaaatattgaaaaaaa

SEQ ID NO: 126740 - DNA, 141 bp, Homo sapiens
gggttgtgtccactgtggtccccgactctgccacaagctgttcatcgggggcttacccaactacctgaacgatgaccagtgccacgggctctccaagggctacgccttctgtgagtacgtggacatcaacgtcacggtcag

SEQ ID NO: 126741 - DNA, 1662 bp, Homo sapiens
ggcacgaggtcgacctcgtccttgaggcgccagatgaagaacatcgtccacaactactcagaggcggagatcaaggttcgagaggccacgagcaatgacccctggggcccatccagctccctcatgtcagagattgccgacctcacctacaacgttgtcgccttctcggagatcatgagcatgatctggaagcggctcaatgaccatggcaagaactggcgtcacgtttacaaggccatgacgctgatggagtacctcatcaagaccggctcggagcgcgtgtcgcagcagtgcaaggagaacatgtacgccgtgcagacgctgaaggacttccagtacgtggaccgcgacggcaaggaccagggcgtgaacgtgcgtgagaaagctaagcagctggtggccctgctgcgcgacgaggaccggctgcgggaagagcgggcgcacgcgctcaagaccaaggaaaagctggcacagaccgccacggcctcatcagcagctgtgggctcaggcccccctcccgaggcggagcaggcgtggccgcagagcagcggggaggaggagctgcagctccagctggccctggccatgagcaaggaggaggccgaccaggaggagcggatccgtcgcggggatgacctgcggctgcagatggcaatcgaggagagcaagagggagactgggggcaaggaggagtcgtccctcatggaccttgctgacgtcttcacggccccagctcctgccccgaccacagacccctgggggggcccagcacccatggctgctgccgtccccacggctgcccccacctcggacccctggggcggcccccctgtccctccagctgctgatccctggggaggtccagcccccacgccggcctctggggacccctggaggcctgctgcccctgcaggaccctcagttgacccttggggtgggaccccagcccctgcagctggggaggggcccacgcctgatccatggggaagttccgatggtggggtcccggtcagtgggccctcagcctccgatccctggacaccggccccggccttctcagatccctggggagggtcacctgccaagcccagcaccaatggcacaacagcagccgggggattcgacacggagcccgacgagttctctgactttgaccgactccgcacggcactgccgacctccgggagcagcgcaggagagctggagctgctggcaggagaggtgccggcccgaagccctggggcgtttgacatgagtggggtcaggggatctctggctgaggctgtgggcagccccccacctgcagccacaccaactcccacgccccccacccggaagacgccggagtcattcctggggcccaatgcagccctcgtcgacctggactcgctggtgagccggccgggccccacgccgcctggagccaaggcctccaaccccttcctgccaggcggaggcccagccactggcccttccgtcaccaaccccttccagcccgcgcctcccgcgacgctcaccctgaaccagctccgtctcagtcctgtgcctcccgtccctggagcgccacccacgtacatctctccccttggcgggggccctggcctgccccccatgatgcccccgggccccccggcccccaacactaatcccttcctcctataa

SEQ ID NO: 126742 - DNA, 1543 bp, Homo sapiens
ccaaatacagccccattctggggtacggggtcggtgcagggtggggggtagggtttcaacatagagctttcaggagggcgcagttcagctagtgacagtgactgcaggtgtctaagcggagaggatgggccactccaacggggggcgggtgagcaaggggcgctggagaaagagcgtggagagcacgtgccgtctagtgtgcgcgctgggctggaagccctcgaagacactggatcctgcatcccacagtcagcccacagttcccagtgagatcagagcagctaatgctgcggatgctgttctgagacttcccgggcagccgcggctgctcatcgtgtcgtgccacccctgggttgtgtccactgtggtccccgactctgcccacaagctgttcatcgggggcttacccaactacctgaacgatgaccaggtcaaagagctgctgacatcctttgggcccctcaaggccttcaacctggtcaaggacagtgccacggggctctccaagggctacgccttctgtgagtacgtggacatcaacgtcacggatcaggccattgcggggctgaacggcatgcagctgggggataagaagctgctggtccagagggcgagtgtgggagccaagaatgccacgctgagcaccatcaatcagacgcctgtgaccctgcaagtgccgggcttgatgagctcccaggtgcagatgggcggccacccgactgaggtcctgtgcctcatgaacatggtgctgcctgaggagctgctggacgacgaggagtatgaggagatcgtggaggatgtgcgggacgagtgcagcaagtacgggcttgtcaagtccatcgagatcccccggcctgtggacggcgtcgaggtgcccggctgcggaaagggcgtcagttctctagatgaccgcatggagccccatttgacagaagagaaagctgaggtgcaaaagatccagcccgcccaggatgcggtgacctgccagcacctgccgcagccttcgtccgggagtcgccccatctctccacgcatcggggccctgtgccccttgctgctgcagccgggcaccatgtcgacctcgtccttgaggcgccagatgaagaacatcgtccacaactactcagaggcggagatcaaggttcgagaggccacgagcaatgacccctggggcccatccagctccctcatgtcagagattgccgacctcacctacaacgttgtcgccttctcggagatcatgagcatgatctggaagcggctcaatgaccatggcaagaactggcgtcacgtttacaagtccccttctggaagtacgggtgatgaggacaaccccacaggcccagaggccctgagccactgtgaagctgctacaccccctttggccctctccggagccctctgtgctgacctgttctggcatgagggcgagtcctcttgcttctcaccatcccttcgccacatggtctcatcttgtcacttcagccccaggtggtgggttgtgcaggagcagtctttccactttgatggatggggaaactga

SEQ ID NO: 126743 - DNA, 415 bp, Homo sapiens
tggaggctggtaatgatttctatgacggtagctatgatgacccttccgtgccattgctggggcaagggaaggagaagccacagtatggcaagaaccccgtggtgatggtggacgagattatgagctccagccctcccaagttcaccttccctgaagcaggcttacgaatcatgatcaccaataagtttggacccaggacccgactacggatggccagcaggatcatcattaatgagcggcagagactgatcaactcggccaatggtgtgagcagtaagccgcttcaaaacgggaggcacgagaacattgagaacgggaatgttcctgtggaaaaccccgaagaccctcagcagaatcaggagcagcagccgccgccacagccaccaccgccagagccagagccggtggaggctga

SEQ ID NO: 126744 - DNA, 1443 bp, Homo sapiens
atgagcgagctgacgaggaagcatgtaacaactgttctatcagatatctctgtactctcagcgcaagaagaaatatacaccgcgggacaaactccaggtccagtcaaacaaaagagcattgcaaacggtaacccggtcaacagtgagctggaggctggtaatgatttctatgacggtagctatgatgacccttccgtgccattgctggggcaagagagatcagcactaatcacggtgttgcgctcaacagtgaaggagaagccacagtatggcaagaaccccgtggtgatggtggacgagattatgagctccagccctcccaagttcaccttccctgaagcaggcttacgaatcatgatcaccaataagtttggacccaggacccgactacggatggccagcaggatcatcattaatgagggagagccccgaatgatggctgtcaccagggccgtgggctgggttgtcgagctggcagtaggaaggggtggcccaggccctctgataaatcctcaaagttttcctggtaaccatgcaaatcggcagagactgatcaactcggccaatggtgtgagcagtaagccgcttcaaaacgggaggcacgagaacattgagaacgggaatgttcctgtggaaaaccccgaagaccctcagcagaatcaggagcagcagccgccgccacagccaccaccgccagagccagagccggtggaggctgacttcctgtcccccttctccgtgccggatgagaacaacgtgttccctgattctgttggtgtctctctgatgcagcctcgatttaatgctccccagggcctccaaattcaagaggccagaggggacaaggtcaagtgggtgttcacctggcccctcatcttcctcctgtgcgtcaccattcccaactgcagcaagccccgctgggagaagttcttcatggtcaccttcatcaccgccacgctgtggatcgctgtgttctcctacatcatggtgtggctggtgactattatcggatacacacttgggatcccggatgtcatcatgggcattactttcctggcagcagggacaagtgttccagactgcatggccagcctaattgtggcgagacaaggccttggggacatggcagtctccaacaccataggaagcaacgtgtttgacatcctggtaggacttggtgtaccgtggggcctgcagaccatggttgttaattatggatcaacagtgaagatcaacagccgggggctggtctattccgtggtcctgttgctgggctctgtcgctctcaccgtcctcggcatccacctaaacaagtggcgactggaccggaagctgggtgtctacgtgctggttctctacgccatcttcttgtgcttctccataatgatagagtttaacgtctttaccttcgtcaacttgccgatgtgccgggaagacgattag

SEQ ID NO: 126745 - DNA, 338 bp, Homo sapiens
  misc_feature (1)...(338): n = a,t,c or g
gacattccagaaaatgtcgacattactctgaagggacgcacagttatcgtgaagggccccagaggaaccctgcggagggacttcaatcacatcaatgtagaactcagccttcttggatgagaccaggtgttgcttgttcagtatctcaagcccagaaagatgaattaatccttgaaggaaatgacattgagcttgtttcaaattcagcggctttgattcagcaagccacaacagttaaaaacaaggatatcaggaaatttttggatggtatctatgtctctgaaaaaggaactgttcagcaggctgatgaataagatctaagagttacctggctaccn

SEQ ID NO: 126746 - DNA, 205 bp, Homo sapiens
tttcgttgtatgctcacttccccatcaacgttgttatccaggagaatgggtctcttgttgaaatccgaaatttcttgggtgaaaaatacatccgcagggttcggatgagaccagattgaaacaattggcaaaaaggtgtcttcaaagagaattccatatgctccttctggtgaaattccgaagtttagtcttcaagatccaccta

SEQ ID NO: 126747 - DNA, 732 bp, Homo sapiens
atgaagaccatccgcagcaatcagactgttgatattccggaaaatgtcattactctgaagggatgcagagttattgtgaagggccccagaggaactctgtggagggacttcaatcacatcagtatagaactcagtcttcttgtaaagaaaaaaaagaggctccggcttaacaacacttgtggtgagaacatgatcaagggtgttacactgggcttccattacaagatgagatctgtgtatgctcacttccccatcaacatcgttacccgggagaatgggtcttttgttgaaatccgaaatttcttgggtgaaaaatacatccgcagggttaggatgagaccaggtgttgcttgttcagtatgtcaaacccagaaacatgaattaatccttgaaggaaatgacattgagcttgtttcaaattcagcggctttgattcagcaagcaacaacagttaaaaacaagcatatcaggaaatttttggatggtatctatgtctctgaaaaagaaactgctcagcatatcaggaaatttttggatggtatctatgtctctgaaaaagggggatcctatagagccacacggcaggcgaggaaactgaggctcggctggtggcgccgtgggcttggagtccgagccacgctgactgcaaagacgggtctcattcccgcagatcgagctctgccggcggctgcgccgcaagccgggcagaacagatctgcatcaggcaattaa

SEQ ID NO: 126748 - DNA, 1024 bp, Homo sapiens
ctgggacacacgggcccgctgtcggtctcccgtcctccgacatcttgtctggaacttccgcctggcagtctccagtaggagtggagctctgtgcggcgtagtttggtggaaaaacgggccttgcgtcggcctcacccccagtgtttgtgtttcagaatgaagactattctcagcaatcagacctgtcgaccattcccagaaaaatgtcgacatgtactctgaagggacgccccagtaatcgtgtaagggcccgcagagggaaccctgcggaagggactttcaatcaccttcaatggtagaacctcagcctttcttggaaagaaaaaaaaagaggctcccgggttgacaaaatggtggggtaaccggaaagggaactggcctacccgttcggacctatttggtagtccatgtacagaaccatgatcaaaggggtgttaccactggggcttcccgttaccaaggatgagggtcttgtgtatgcttcactttccccatccaacgttggttatcccagggagaaatgggtcctctttgttgaaatcccgaaattttcttggggtgaaaaatacatcccgcagggtttccggatgaagaccagggtgttgcttgttccagtatcttcaagccccagaaaggatgaatttaatcccttgaaaggaaatgacattggagcttgtttccaaatttcagccggctttggatttcagcaagccccacacacgtgtttaaaaacaagggatatccagggaaatttttgggatgggtatcctatggtcctctggaaaaagggaactgtttcagccagggctggatggaataaggatcttaaggagtttacctgggctacagaaagaaagatgccaggatgacagctcaggagctaccttgtgatatattaaaagatgcaaaaaaaaacacatattagatttggaacaaccaacctgcgtatggttctacccataaaaattccatgagggagaaaagacttccctctcccattgagttcgagactactaccggcgcg

SEQ ID NO: 126749 - DNA, 328 bp, Homo sapiens
ggcacgagcgtgccgccacccgatggaagattcgatggacatggacatgagccccctgaggccccagaactatcttttcggttgtgaactaaaggccgacaaagattatcactttaaggtggataatgatgaaaatgagcaccagttatctttaagaacggtcagtttaggggctggtgcaaaggatgagttgcacattgttgaagcagaggcaatgaattacgaaggcagtccaattaaagtaacactggcaactttgaaaatgtctgtacagccaaattcatcaattatgtgaagaattgcttccggatgactgaccaagaggctt

SEQ ID NO: 126750 - DNA, 273 bp, Homo sapiens; identical to SEQ ID NO: 120637

SEQ ID NO: 126751 - DNA, 1311 bp, Homo sapiens
atggaggattcgatgaacatggatatgagccccttgaggccccagacctatcttttcaattgtgaaccaaaggccgacaaagatgatcactttaaggtgaatgatgatgaaaataagcaccagttatctttaagaacggtcagtttaggggctggtgcgaaggatgaactgcacattgttgaagcagaagcaatgaattacaaaggtagtccaattaaagtaacactggcaactttgaaaatgtctgtgcaggcaacagtttcccttgggggctttgaaataccactacctgtggtcttacaatcgaagtgtggtttagggccagtgcatattagtggacagcacttagtagctgtggaggaagatgcagaatcagaagatgagggttccatggaaaaaagtaaaacctgctgtgatgatgatgatgatgatgatgatgatgatgaagatgacgaggaaactgaagaaaaactccggaagacttttaagaagtggcttcttattcctcatgcaaagagaactggctgctgtgaagctgacgtgggccacatactgaacagtgggataaattctctctgctttgtaggagctgtgaaacttctggctgactcgagatatgaatgtagaggaggactgctctgttctggccattgctatcagggcggcttccaggaagactgggaggccctgcttggtgaggagaaatggatccgggtctcacctaacgaagcagtctggccgtggtctgccacagccgtaccgtggggaattcctcccagtgcaaatcatccggtctccctggcaccggcaggggagaacggccgactggagctgcagggatggcggctgtccccaccccctacccaaccaacttgggtgtgtcttaggcagtctccagtgtgctgccactggccgcaacctgagcggctacctaatgtctgcacagttctgtgcttgggacccaaggccctggtggcgtgggctcacggaggggatctcctgatcgcaggttgcacagatccatggaaaaagcatgttttcctgggtggggtagaacaatcactcaccgcctcccttggctggggttgggagttccctttgccctgtgcagctcccgggtgggcctttgctccactctgcttttcctcgttctctgtgggtcatgccaaccgcctcatcagtcccaataagagaatctgcatacctcagctgaaggtgcaggatccactcaccatttttgttctccttagtgggagccgtggttcacagtggcttctagtcggccatcttggtccctccataggattttag

SEQ ID NO: 126752 - DNA, 1454 bp, Homo sapiens
  misc_feature (1)...(1454): n = a,t,c or g
ggctggggaggtcttgcaatcatgagggaaggcaaatgggaagcaaagtcatgtcttatgtggtggcgggcagggggacttgtgcacaggaactcctatttatacaaccatcagatatcttgagacaagaacagtatggggctccctggtgtgattccgtcctgcgcggctgttctctggagcagcattcatttatcttcgtctgccttgtctcctaccataagtgcgtgccgccacccgatggaagattcgatggacatggacatgagccccctgaggccccagaactatcttttcggttgtgaactaaaggccgacaaagattatcactttaaggtggataatgatgaaaatgagcaccagttatctttaagaacggtcagtttaggggctggtgcaaaggatgagttgcacattgttgaagcagaggcaatgaattacgaaggcagtccaattaaagtaacactggcaactttgaaaatgtctgtacagccaacggtttcccttgggggctttgaaataacaccaccagtggtcttaaggttgaagtgtggttcagggccagtgcatattagtggacagcacttagtagctgtggaggaagatgcagagtcagaagatgaagaggaggaggatgtgaaacctcttaagtatatctggaaagcggtctgcccctggaggtggtagcaaggttccacagaaaaaaagtaaaacttgctgctgattgaagatgatgacgatcgatgatgaagaggatgatgatgaagatgattgatgatgatgatttttgatgatgaggaagctgaagaaaaagcgccagtgaaagaaatctataccgagatactccagccaaaaatgcacaaaagtcaaatcagaatggaaaagactcaaaaccatcatcaacaccaagatcaaaaggacaagaatccttccaagaaacaggaaaaaactcctaaaacaccaaaaggacctagttctgtagaagacattaaagcaaaaatgcaagcaagtatagnagaaaaggtggttctcttcccaaagtggaagccaaattcatcaactatgtgaagaattgcttccggatgactgaccaagaggctattcaagatctctggcagtggaggaagtctctttaagaaaatagtttaaacaatttgttaaaaaattttccgtcttatttcatttctgtaacagttgatatctggctttcctttttataatgcagagtgagaactttccctaccgtgtttgataaatgttgtccaggttctattgccaagaatgtgttgtccaaaatgcctgtttagtctttaaagatggaactccaccctttgcttggttttaagtatgtatggaatgttatgataggacatagtagtagcggtggtcagacatggaaatggtggggagacaaaaatatacatgtgaaataaaactcagtattttaataaagt

SEQ ID NO: 126753 - DNA, 648 bp, Homo sapiens
atgaggaagacagccaatatattaaggatgacagagtgggcctgcaggcatcattgcaacaccgaaccaatgccagcaacctcctacctccagatgttttatcaaggagaaacaattcagcgtttcatcattaagtatgatgcaactgtaggtctttttgcagatgttctttatttctggaaattgataactgaatttagaggcctaatcggattcaagtacagttttttttgggcagtggacaagactacgtcggatgtggagagcatcttgtgcgcaccatactggctagagaatgttcacatgctttacaagctgaggatgctcaccaagccctgttggagactatgcaaaacaagtttatcaggaaagacagcagcagagttcccatggaggaggaaatattggaaatttgaggaaaaacaagaaagtataggtcagtacttgcctatgtattgccaggcagcattaagggtccaaattgaagatagtgaccatgaatttaaagaaggcatgttctttgaagaagtgcttgaggatcttgatcccgcttgtttaaaattcccattgaaagctctgctcttgtctgcagctgatctggttgcaacacttttggcacctggcgagtggagagtttgttcaacttaa

SEQ ID NO: 126754 - DNA, 746 bp, Homo sapiens
ctcagagtgcctgaatccgaggaaactaaatctggcagaaaaggcggacacagactctatgcgactagcgaaaagaagactatcaagtgagaaggaaaatgactcaagcactttggacacggtaggcgctgtggttgtggaccacgaagggaatgttgctgctgctgtctccagtggaggcttggccttgaaacatccggggagagttgggcaggctgctctttatggatgtggctgctgggctgaaaatactggagctcataacccctactccacagctgtgagtacctcaggatgtggagagcatcttgtgcgcaccatactggctagagaatgttcacatgctttacaagctgaggatgctcaccaagccctgttggagactatgcaaaacaagtttatcagttcacctttccttgccagtgaagatggcgtgcttggcggagtgattgtcctccgttcatgcagatgttctgccgagcctgactcctcccaaaataagcagacacttctagtggaatttctgtgggagccacacgacggagagcatgtgtgtcggatatatgtcagcccaggatgggaaagccaagactcacatttcaagactttcttctggtgcggtggcaggacagtctgtggcattccaaggtggggtgtgccgcctgggagagcccagtgaactgacccttcaggctgagtgtgaagcgtctcagaggcatttcagaacctgagcttttgggggtttt

SEQ ID NO: 126755 - DNA, 2150 bp, Homo sapiens
ggcgagcccacagctactggctgctcaagcggctgtccaggaacggggcccccctgctgcggcggctgcagtccagcctgcagtctcagcgaagctcacagcagagagaaaatgatgaggagatgaaggctgccaaagagaagctgaagtactggcagcggctgcggcacgacctggagcgcgctcgcctgctgatcgagctgctgcgcaagcgggagaagctcaagcgtgagcaggtgaaggtggagcaggtcgccatggagctgcggctgaccccgctgacggtgctgctgcgctcagtgctggaccagctgcaagacaaggaccccgccaggatatttgcgcagcccgtgagtctgaaggaggtaccagattatttggatcacattaaacatcccatggactttgccacaatgaggaaacggttagaagctcaagggtataaaaacctccatgagtttgaggaggattttgatctcattatagataactgcatgaagtacaatgccagggacaccgtgttctatagagccgcggtgaggctgcgcgatcagggaggtgttgttctgaggcaggcccggcgcgaggtggacagcatcggcttggaagaggcctcggggatgcacctgcctgagcggcctgctgcggcaccgcggcggcctttctcctgggaagacgtggacaggttgctggaccccgccaacagagcccacctgggcctggaggagcagctgagagagctgctggacatgctcgacctcacctgcgctatgaagtccagcggctcccggagcaagcgggcaaagctgctcaaaaaggaaattgcccttctccgaaacaagctgagccagcagcacagccagcccctgcccacggggccaggcttggaaggcttcgaagaggacggagctgcgctggggccggaggcgggcgaggaaggagataaatctccccctaaacttgaaccatcagatgcattacctcttccttcaaactcggagactaattcagaaccaccaaccctcaaaccagtagaactcaacccagagcagagtaaacttttcaaaagagtcacatttgataatgaatcacatagcgcttgcactcagagcgcactggtaagcggacgccctccagagcccacccgcgccagtagtggcgatgtgccggcggcggcggcctccgcggtggcggagccagcaagcgatgtaaacagacgcacttctgttctcttctgcaaatcgaaaagtgtaagccccccaaagtctgccaagaacactgaaacccagccaacttctcctcagctagggaccaaaacctttttgtctgtagtccttccgaggttggagactcttctgcagccaaggaaaaggtcgcggagcacatgcggagactccgaggtggaggaggagtccccaggaaagcgcctggacgcaggtctcaccaacggctttgggggtgcgaggagcgagcaggagccgggcggcggcctggggaggaaggccacaccccgacgacgctgtgcctccgagtccagcatctcctccagcaacagcccgctctgcgactcgagctttaatgcgcccaaatgtgggcggggcaaaccggctcttgtgcgacggcacacgctggaggaccgcagtgagctgatctcctgcatcgagaatgggaactacgccaaggcggccaggatcgcagccgaagtcggccagagcagcatgtggatctccactgatgccgccgcctcggtgctggagcctctgaaggtggtgtgggccaagtgcagcggctacccctcctacccggcactgatcatcgaccccaagatgccccgtgtgcctggccaccacaacggcgtcaccatcccggccccacccctggacgtgctgaagattggggagcacatgcagaccaagtctgatgagaagctgttcctcgttctcttttttgataataagagaagttggcagtggcttcctaagtccaaaatggttccccttggtattgacgaaactatagacaagttaaagatgatggaagggaggaattccagcatccggaaggccgtgcggatcgcttttgaccgcgccatgaaccacctgagccgcgtccacggggagccgaccagcgacctcagtgacattgactga

SEQ ID NO: 126756 - DNA, 2046 bp, Homo sapiens
ccaaccctcaaaccagtagaactcaacccagagcagagtaaacttttcaaaagagtcacatttgataatgaatcacatagcgcttgcactcagagcgcactggtaagcggacgccctccagagcccacccgcgccagtagtggcgatgtgccggcggcggcggtcccgtcgacactcagcaggatgctcacgtggtggtttccaccaggtggccccacctgaccgggccctgccccagctgtgggctcccactgtggacagttttgccggctggcggccacgtcctcagcaacctctcaggctcgttcatcagatgtcccttgtagaagagcacgtgtcccctccgggccactgtcttacattggagtgggcacaattctgagttaggctgaacagggtcgctggtcctgaggcgacgcactcactgtgggcctcctgcccgtgtcgcccgcgggccggctgtgctgtgcgccaggcttctgttcctgcgatggcccagccccagagtctggccctgactcgtggcttccttcctccgtgactgcacgctcaccagcagtgaaccgtcacctgaagcggtctccctgtgcacgtgctggggcgtgagagcgcgggggtgtctttgtccactcaccgccgttgcggagacccctgctgcgagtctctgtgtgcatgtgctggggcttgagagtgtggggatgtctgaacttggctcggcactgtctgaggatgtggcatggacagtgcgtgctcactcactcgctagcatcttctgtatttctgggttttctacctgatttccttctccccttacttccccttcctctgttttttccccacaatgcccagtggattcttgagcagtgctgctgtttgtctcttgctggtcaccacgctgagtgcccctgcggccaactgagaagtcctgctcgtggggtggggcatctgtgcgtgggatcttgtgcaggcgtctgtcctgggccttgggtctgtctctgaccatcccagctgcattgtcatggagctgggtcccagcaagagcaggtctcgtgcaggcgtctggcctgggccttggttctgtctctgaccatcccagctgcattgtcacggagcgagtcccagcacgatgggccttgggtctgtctctgaccgtcccagctgcattgtcatggagcaggtcccagcaagatgggctttgggtctgtctctgactgtccccagcggcattgtcacagagcaagtcttgtgcaggcatctggcctgggccttgggtctgtctctgaccatcccagctgcattgtcgcggagcgggtcccagcacgatgggccttgggtctgtctctgaccgtcccagctgcattgtcatggagcaggtcccagcaagatgggctttgggtctgtctctgactgtccccagcggcattgtcacagagcaagtcttgtgcaggcatctggcctgggccttgggtctgtctctgaccatcccagctgcattgtcgcggagtgggctgcattgtcacggagcgagtcccagcacgatgggccttgggtctgtctctgaccgtcccagctgcattgtcatggagcaggtcccagcaagatgggccttgggtctgtctctgactgtccccagcggcattgtcacagagcaagtcttgtgcaggcatctggcctgggccttgggtctgtctctgaccatcccagctgcattgtcgcggagtgggtcccagcaagatgggccttgggtctgtttctgaccatccccggctgcattgtcacggagcaggtcccagcaagagcaggtctcgtgcaggcgtctggcctgggccttggttctgtctctgaccatcccagctgcattgtcacggagcgggtcccagcaacatgggccttgggtctgtctctgaccgtccccggctgcattgtcacggagcaggtcccagcaagagcaggtctcgtgcaggcgtctggcctgggccttgggtctgtctctgaccgtcccagctgcattgtcacggagcgggtcccagcaacataggccttggg

SEQ ID NO: 126757 - DNA, 547 bp, Homo sapiens
gtcttctccttcctgccaccttgtgaagaagataaaaataaaaatgaagtcaccagccctcaggggtctgtcaaggcaacacacaaaatctccagttaccttctggtggatgacgtttggagacacatcgcgtccgtcacaggacacacttccgatggatttacagcaactcctgggggtcacgaaggtgtgttccaaggccacatctccaacctcacagagaggacaggaagtgatcagtaccccaactagcaagagtggcccgttcattggccgaggttcttgaggatagagtgggaggtgggagcgtccctcgtgctgccttcatttttcctaccctcagctcaggggtctgtgctagaggaagacacacgaaggctactgtgcccccaccacaagagagggaaacagggagacgcgtgggtctggagccaagcgtatctctctgtacccatcgcacacgaatttgaatcatctgctctttggaatcgcctacaccctgctgcacccacgatgtggctgtaactccattaaagaattgaatacc

SEQ ID NO: 126758 - DNA, 849 bp, Homo sapiens
tcaggtgggcttgtgatccgggtggcttttgagcgtgtggaacttgacgctgtccagcttctcgaagcgcttcccgcagcgatcgcacgtgaagttgtactgcacctccgcagtgtgcttcttcatgtgccagttgagcgacgcgcgctgccggcactggtagccacagatctcgcactgcaggggggtctcgccggtgtgggtgcgccgatgtacctccaggtggttcttcctcttgaaggacttgccgcaggtctcgcaggtgaattcacggacacctgggggcggtggggaccgaggcacgcctggcttcttcttctccttctccttttccttctccttctcgttctccctctccctctccttcttcttcttcttctttttcttttttgttatacagtgtctcactatgttgcccaggctctgctcctcggtgagctggttctgggcatgcagggcagccaggatgggcgggtgggggctcagggtgtagctctgacagcgcctctgcagctgctggatgcgggccaggatctcccactctgagggcaggctgcctggggtgttgtcctcttcttgggatccctcagtggcctcctcctgtcctgtcctgttcttcaggtatggcttctcccacttccattcgcgaatcactgcctggaccactttctcatctcccttgagcaggtccagcagctttagttccagtgccttagtctccttgcggagctgactgatggtctcctggttcttcttgatgttccactgagagctctcaaaaaaagccttccggtcaccctctgaggtcaggagttcgagaccagcctggccaacgtgccgaaaccccat

SEQ ID NO: 126759 - DNA, 957 bp, Homo sapiens
ttagacgaacgcgggatgctgtataatcctcatgaggtactcacttcgactgggctctgtggtgctggtcaccatggtctctttcccgcacaggaggcgcacctggggatgggcacacgggtgctcaagagggttcggctgggccaggcctgggtcttcccgccccagctcccctgccttgcaggcactcacggtggtggagcggttggggccctgccagcaacccgtgccttgctcatacttcatggcactgaacttgtcgtggtcggggccaatccatgagccccaagtgcctgccagtgggggcccctgcattcctgggacgcactcgttggtggtgagctcgtagcactggctgtacaggtaagcaaactccccgttggggccaaagtcaaaagaaatctcttgctccaggttctgcaggggggtctcgccggtgtgggtgcgccgatgtacctccaggtggttcttcctcttgaaggacttgccgcaggtctcgcaggtgaattcacggacacctcttcttcttcttcttctttcttctttcttctttcttctccttctccttctccttctttcttctttcttctttcttttcttcctcttcctcttccgctgctgctgctgctccttctccttctccttcttcttcctcttcttcttcctcttcctctttttcttcttgttctccttcttcttcctcttcttctgctgctgcttctcctcctcctccttcttcttctttcttctttcttccttctcctcctccttctccttcttccccttctcccttctctcttctcccttctccttatttcttcttcttcttctctcgcaaagaatgatgccatctttgaggccgtccatgaagttgttgccgatgcgacggcctgtcaccccctcgatccactctctcagctcctgctcccgctggtggtcatacttctgggccagcat

SEQ ID NO: 126760 - DNA, 867 bp, Homo sapiens
tcagtgacaagtgctgggctcccccagatcacactcatctgtgctggatttcaccagctctcggttgatggaggtccccacgctccctgctcctcctcctccgtctgccctacatccctcctgcttctccagggaaccacagatctcgatgccaatttggatcaacttatttctgtctttcagggagctgacggctgggcggggtccctggggcacccgggcacatttggacgtgtttggcagggagagtcctggcccagccccggcacgtagggccgcgcttccacgggccgccgccaggagacgcgcgaggctgtagatgcggctttgcagagaagcagctggttctgtccccagcccccactccctccattcaatcacccatccatccccagcgcggtccagcccgtgacgggagagcctgaagcagaaggtgggggggcgtccacagctgtcccccttccccccccccgacagctgggcactggaccctgttgatcttgtgcgcgaaggcgcggcgctcggaggcagccatggtcctcgcgtcccgccgccgccgccccgggccccggccccgccgccgccgccgcctcccggttctgggcagccggggcggggcggggccggcgcgggggcggggcccttccgggtggcccgggccgctccgtgctgccccttctccatgaccaagttccactgtgtagaatagtcgtctggctcgttgtaacctctgtaattcttcctcagggtcacgaaggtgtgttccaaggccacatctccaacctcacagagaggacaggaagtgatcagtaccccaactagcaagagtggcccgttcattggccgaggttctgcctcatttgccat

SEQ ID NO: 126761 - DNA, 893 bp, Homo sapiens
tttcgtatccggggggctgcaggctgctggcttctgcggctgcggtgtcgatgtcgcggccagggccaagccacagcgggttgaggggcggaacccctgcaggcggcgccccctacacgaggtcacccctgggaaggagcgcagcccacccggcccctccgcatccgagcaggacgcccgtctcctctccctgaggatatcaggtctccctgtcccaagaggcttgtgccaagatggcatcagctggagacacccaggcaggcccacgggatgcagcaaatcagaacttcgactatatgtacaaactgctactgatacgcaacagcagtgtgggcaagacttccttcctgatccgatacgcggacgactccttcactcccgccttcgacagtactgtgggcatcgatttcaaggtcaagaccgtctaccgccatgacaagaggatcaagctgcagatctgggacacagcgggccaggagcgctaccgcaccatcaccacggcctactaccggggagccatgggcttcctgctcatgtatgacatcgccaatcaggaatcctttgccgctgtgcaggactgggccacgcaaatcaagacctactcctgggacaacgcccaggtcatcctggtggggaacaagtgtgacctggaggacgaacgtgttgtgcctgctgaggatggccggaggctcgccgacgaccttggtttcgagttctttgaagccagtgccaaggagaacatcaatgtgaagcaggtcttcgagcgcctggtggatgtcatctgcgagaagatgaacgagtccctggaacccagctccagctcaggcagcaacgggaaaggcccggccgtgggggatgctccagccccccagcccagcagctgcagctgctag

SEQ ID NO: 126762 - DNA, 1286 bp, Homo sapiens
atggcatcagctggagacacccaggcaggcccacgggatgcagcagatcagaacttcgactatatgttcaaactgctactgataggcaacagcagtgtgggcaagacttccttcctgttccgatacgcggacgactccttcactcccgccttcgtcagtactgtgggcatcgatttcaaggtcaagaccgtctaccgccatgacaagaggatcaagctgcagatctgggacacagcgggccaggagcgctaccgcaccatcaccacggcctactaccggggagccatgggcttcctgctcatgtatgacatcgccaatcaggaatcctttgccgctgtgcaggactgggccacgcaaatcaagacctactcctgggacaacgcccaggtcatcctggtggggaacaagtgtgacctggaggacgaacgtgttgtgcctgctgaggatggccggaggctcgccgacgaccttgccgcatctacagcctcgcgcgtctcctggcggcggcccgtggaagcgcggccctacgtgccggggctgggccaggactctccctgccaaacacgtccaaatgtgcccgggtgccccagggaccccgcccagccgctaaagtgctgtggggtgaataactacacagatttttctggctcttccttcgaaatgacaacgggccacacctaccccaggagttgctgtaaatccatcggaagtgtgtcctgtgacggacgcgatgtgtctccaaacgtcatccaccagaagacctgcggcaagtccttcaagaggaagaaccacctggaggtacatcggcgcacccacaccggcgagacccccctgcagtgcgagatctgtggctaccagttgccggcaagcgcgcgtcgttcaactggcacatgaagaaagcaacactgcggaggtgcaagtacaacttcacgtgcgatcgcctgcgggaagcgcttcgagaagctggacagcgtcaagttccacacgcttcaaaagccacccggatcacaagcccacctgacccacctgaccactgaccgcccctatttattcgtccgctcggacaccacgcccgggcttgccggggcctggacagctgcgagggccgcccggaccgcgggccggaaggaggcgcccccgccccgccccagagctggcgcccctgggcaggttccccaccccgccccaccgcatccttctcggagctggtgcctggggctgcattgctggaactgtgtcaagagagcagagtgagattaaagagcgagaaaggaaaaaaaaaaaaa

SEQ ID NO: 126763 - DNA, 780 bp, Homo sapiens
atgcagggtgtcagacatggcaggtactacggtctacctggcgcgtatcaaagagttggtcgacgttctcacaacaacctaatagggaccaaccatggaaggccagtagtaaaggagtttgaagttccctttcagaaaccaattaacaaccccaaagagacaaaagaaatgcaggagttgaaactaaatagcagtaagtcagcatcccgtcatcgttggcccacagagaattatggaccagactcggtgcctgatggatatcaggggtcacagacatttcatggggctccactaacagagcctccattatggcatgctgaatttaccaaagaagaattggttcagaagctccgttccaccacaaaaagtgcagatcacttaaacggcctgcttcgggaaatagaggcaaccaatgcagtccttatggagcaaattaagcttctcaaaagtgaaataagaagattggaaaggaatcaagagcgagagaagtctgcagctaacctggaatacttgaagaacgtcttgctgcagttcattttcttgaagccaggtagtgaaagagagagacttcttcctgttataaatacgatgttgcagctcagccctgaagaaaagggaaaacttgctgcggttgctcaaggtgaaggcattctcatctcctcagaggcttcagagcttctccatttcatagacaaccagggcccagtgcacgtgatccagaaatatcttgagcaccctctgctgcttgagccaggtcatcgcaagtttgacattcggtaa

SEQ ID NO: 126764 - DNA, 439 bp, Homo sapiens
aagactcaggttgctccaagcacagatgggattcagcccaccatcaagtaactcaaggacagatgaaagagaattctttatcgcctcttataacagaaagaaagaggatggagagggcaacgtttggattgcaaagtcatcagccggtgccaaaggtgaaggcattctcatctcctcagaggcttcagagcttctcgatttcatagacaaccaggcccaagtgcacgtgatccagaaatatcttgagcaccctctgctgcttgagccaggtcatcgcaagtttgacattcgaagctgggtcttggtggatcatcagtataatatctacctctatagagagggtgtgcttcggactgcttcagaaccatatcatgttgataatttccaagacaaaacctgccatttgaccaatcactgcattcaaaaaaaaaaaaaaaaa

SEQ ID NO: 126765 - DNA, 394 bp, Homo sapiens
tcgggcacgaggccggtcttcttggtcccccacacaattggcatcccttcatccagctattgtaacacctcaggtcaaacaggaacatccccacactgacagtgacctaatgcacgtgaagcctcagcatgaacagagaaaggagcaggagccaaaaagacctcacattaagaagcctctgaatgcttttatgttatacatgaaagaaatgagagcgaatgtcgttgctgagtgtactctaaaagaaagtgcagctatcaaccagattcttggcagaaggtggcatgccctctcccgtgaagagcaggctaaatattatgaattagcacggaaagaaagacagctacatatgcagctttatccaggctggtctgcaagagacaattatggtaag

SEQ ID NO: 126766 - DNA, 792 bp, Homo sapiens
atgaatgggaaagaatctcatagcctgcaatgggaaggaagcaaaatgggaagctccacacctgagagttgggggagagcaggagcagggaggctcccagctgacagattgtgtgtgcacacagctaccatcgcctctgtgtcataccctcatggacagtggttctcccaaatcccagatggttctccctggaaagttctgctggcagatcctggcattggggaagttgggaaaatacatgaacactgtctgctggggactgggtggcatgccctctcccgtgaagagcaggctaaatattatgaattagcacggaaagaaagacagctacatatgcagctttatccaggctggtctgcaagagacaattatggtaagaaaaagaagaggaagagagagaaactacaggaatctgcatcagaaagccctcagaatggcagtgtgccaagggctggcactcgatttacctcacttctgtttgcaccaaaatctgtaaagctaactatttatattaaaaagcatggaaaaatgtatttctgtatttcagagtttggtagtcgatttggtgttcttcaagatgagcatcctatggccatcccgccgctggtgaggctccagttggttgagcttcctgtaatcagagtctctggtgttgccctccctctcattcccggatcagtcatgcagcctttgaagtcactgccctgcacaccatccgagtttggagaccagaactggcagttattggataagaattgtagagtagagaggagctcagatccaccttcataa

SEQ ID NO: 126767 - DNA, 873 bp, Homo sapiens
atgaatgggaaagaatctcatagcctgcaatgggaaggaagcaaaatgggaagctccacacctgagagttgggggagagcaggagcagggaggctcccagctgacagattgtgtgtgcacacagctaccatcgcctctgtgtcataccctcatggacagtggttctcccaaatcccagatggttctccctggaaagttctgctggcagatcctggcattggggaagttgggaaaatacatgaacactgtctgctggggactgggtggcatgccctctcccgtgaagagcaggctaaatattatgaattagcacggaaagaaagacagctacatatgcagctttatccaggctggtctgcaagagacaattatggtaagaaaaagaagaggaagagagagaaactacaggaatctgcatcagaaagccctcagaatggcagtgtgccaagggctggcactcgatttacctcacttctgtttgcaccaaaatctgtaaagctaactatttatattaaaaagcatggaaaaatgtatttctgtatttcagagtttggtagtcgatttggtgttcttcaagatgagcatcctatgattgactctctcagttctctgagccttatgtttagagcactcaagctatatgttgttacaatatcatctcccaaagagacaataattctttcaaattctgtagaagcgactctggttagcccaacttgggtcaaacttccaccccaatctataatcagctgtggccagaggagaaggtcacattgtacaaaatggctgtcaggagctcactgctctaacagtgttggagttgggataatggagaggagagctggacagcagcccgacagatgtccgctatag

SEQ ID NO: 126768 - DNA, 732 bp, Homo sapiens
atggttcgctattcacttgacccggagaaccccacgaaatcaggcaaatcaagaggttccaatcttcgtgttcactttaagaacactcgtgaaactgctcaggccatcaagggtatgcatatacgaaaagccacgaagtatctgaaagatgtcactttacagaaacagtgtgtaccattccgacattacaacggtggagttggcaggtgtgcgcaggccaagcagtggggctggacacaaggtcggtggcccaaaaagagtgctgaattcttgctgcacatgcttaaaaacgcagagagtaatgctgaacttaagggtttagatgtagattctctggtcattgagcatatccaagtgaacaaagcacctaagatgcaccgccggacctacagagctcatggtcggattaacccatacatgagctctccctgccacattgagatgatccttacggaaaaggaacagattgttcctaaaccagaagaggaggttgcccagaagaaaaagatatcccagaagaaactgaagaaacaaaaacttatggcacgggagaaactccctgcagatgtggagaagccctcagttactgaccccttgttaaaagaaacagccagaaaccagaaacatgaccaggaagataaacagctgttgaggtctcagctgctctccagagtggcatcatcttcggaaataagccttgcattcatcttcaccgaggaaattgggccttga

SEQ ID NO: 126769 - DNA, 1188 bp, Homo sapiens
atgaaggactggagacctaggaggaaaaaatggtttcctgggccaggtccagggccccattgctgtgaggaacctagggacttggtgtcctacatcctagctgctccagccatggctaaaaggggccaaggtagagctcgggttgtggtttcagagggtgcagcttggcagcttccacatggtgttgagcctgtgggtgcacagaagtcaagaaccaagctgaataacacagtacaagaatttcacaatgcaatcacaagtattaatagtagaataaaccaagctgaggaaagaatctcagaactcgaaaactggctttctgaaataagacagtcagacaaaaataaagaaaaaagaataaaaaggaatgaacaaaacctccaagaagtaggggattatgtaaagaagccaaatctacaaatcactgtcatccctgaaaggaagggggagaaagcaaacagtttggaaaacgtatttcaatatattgtccatgaaaacttccacaaccttgctagagaggacaacagtcaaatacaggaaatacagacaactcctgcaagattctacacaggaagatcatccccaagacacataattgtcagattttccaaggaccctgattctcttgaaggagacttacacaggctgagaattaaccttctctggcattctgccactcataagtacaggctgcacctgggcttcagttcagttggccttctggctgccagtgatgagggactttttaaaggcttccatggaggccctttgactctcacacttgggtttaaattggtggttaatagatttgatcctggcatctatacttagtgcatcaatggtgcttagcaataccctcccaattcaacaatctttcaagttacttttccacctgtactctcaaatactagatacatcacagaagttaatgcattcgcttctacttatatgctgtcctgggtcactacaagtaaaagtgttagcaatttcactgcaggagcacatctgagactatcttcagggaagagattctgatggaaccactggtgagtgagcaaactccagaatcccatcctcagactcaggtgtatataattactactgctatcaactgtcttagattgggctcttgcagctgaccctgagaattagattcctgtccaagtgattgcctgagggagtgctctc

SEQ ID NO: 126770 - DNA, 216 bp, Homo sapiens
atggcggccgggagcagcttcagtgggcacacgacagccgcgcgacccgtggcggggcgagctgtggcagtagcatcctcaccactcgcagcagcctcagccgcggcgcccgtagcgccagcagcggctgcttttgcaaaggctgagcgcaggggcggggcgggccaggaagccatggagttctgtgcagccgcggactcccggggagcggactag

SEQ ID NO: 126771 - DNA, 1294 bp, Homo sapiens
atggggtttcaccatgttggccaggctgctctcgaactcctgacctcaggcatgccagaggaacagagagaagggctccaggaagaactgattgacatcatcctcctcatcttggagcgcaaccctcagctgcactactaccagggctaccatgacattgtggtcacatttctgctggtggtaggcgagaggctggcaacatccctggtagaaaaattatctacccaccacctcagggattttatggatccaacaatggacaacaccaagcatatattaaactatctgatgcccatcattgaccaggtgaatccagagctccatgacttcatgcagagtgctgaggtagggaccatctttgccctcagctggctcatcacctggtttgggcatgtcctgtctgacttcaggcacgtcgtgcggttatatgacttcttcctggcctgccacccactgatgccgatttactttgcagccgtgattgtgttgtatcgcgagcaggaagtcctggactgtgactgtgacatggcctcggtccaccacctgttgtcccagatccctcaggacttgccctatgagacactgatcagcagagcaggagacctttttgttcagtttcccccatccgaacttgctcgggaggccgctgccctaacagcaagctgagaggacggcagcctctactttcaaagactttgagctggcatcagcccagcaggaggcctgatatggtgctgcggcagcggtttcggggacttctgcggcctgaaagatcgaacaaaagatgtcctgaccaagccaaggaccaaccgctttgttgaaattgggcaagtgatgggggctgacagtgggcacttgggagcggctgcactggctgtggtgaaaagttgccctgggaatgggccccttaagttttcagcttgcagctgtttccctgaaaagccagagaagaacctttctcttacattacattaaggtctcacccttccatggaaggattgggaggggtggaatttcctttattaaaaagggtttctgtccagagttttttattcctgccaccctgccctgcccgtttgtgtttgcctttacttcagaggccagtagcagagcctacctgacacagagggcacctgggggcctggcacagaatcttatgcctcttcccagtgggcttttggatgggctctctgccacctccctggtgttggaggaagtgggtttctgaagcttgcagctgcttttgcaacctgctgggcctgggctgccctagttaccgggaacctcctagtca

SEQ ID NO: 126772 - DNA, 866 bp, Homo sapiens
atggcacagaaacatcttactggcttatatggacctgtcctaatagctgttattacccaattctggcatttgttcttacttcctcctgacattgtccgccttgccgattttcataagaagccccatcgcaaccatacccatgaccactctagcgcactgctgagcagccgtacgacaatggcagagatggccaacatacgaccaaacacacggagaaaacaaccacgagaccagagcgacaagagccaagaagccagaacgccacgcacacagagcgacgaaagacggagcaaccgcccgaccgggaagcgcaaaaagaggacacaaaaagaaacaaaaacaacaaaagcggccaaacaagaagagaagacacgacaagaacacacgaaccgccgagagcaagaaactcagaaccaaccacgcaaacgaacggcaagaacaagcggccagagaacgaagaaccgcgagaagaaaacatcattcttaatacttctccataaacagattcaagttaaagctttggcagacctcacaggaagcccctccgcgtgccggtgggcgggcgctcaggcccgaggatgcggggcgaggaggcgggtactggtgattctcctggcagcccccgcccgccccgccagggggagcgttgcgcccgacgtaggctgcggggcctgggctggcggcgcagggcggtgatcggctcggtggctggccggcgaagtaccagtacgagcctcatcgcagacatcatcgggccaggacaagccacagacaaaactcctcagacacgagttaaagaaggaagaggtttattcgaccgggagtatcagcaggactctgtcttaatagccgagctccctgagtga

SEQ ID NO: 126773 - DNA, 438 bp, Homo sapiens; identical to SEQ ID NO: 123529
  misc_feature (1)...(438): n = a,t,c or g

SEQ ID NO: 126774 - DNA, 401 bp, Homo sapiens; identical to SEQ ID NO: 123532

SEQ ID NO: 126775 - DNA, 799 bp, Homo sapiens
  misc_feature (1)...(799): n = a,t,c or g
acataacctcgattttcttccgccatccggctaaatagtcccatgtgcactttgttccatggataaataaacactaggaacgcatttccaccctagatttcagcagaaatgctgaattgtaaaggaatatttgagtaaagtgagttgccgttcttgaagcccgtctcctaaggattctcccggtgtccgcgtagggatctcatgctatataggagggccctgccaggcaccgtctcctctctccggtccgtgcctccaagatgacaaagaaaagaaggaacaatggtcgtgcccaaaaaagggccgcgcgccacgtcagggggnngccncccttaaaatttttnccccngggnccntgccacctaactgtgcccgaatgcgtgcccaagggacaaggccattaagaaattcggtcattccgaaacatagtggaggccgcagcaggcaagggcacatttctgaagcgagcgtcttcgatgcctatbtbbcttcccaagctggtatgtgaagctacatttactgtgtgagttgtgcaattcacaagcaaaagtagtcaggaaatcgatcttcgtgaagcccggcaaagacccgaacacccccaccccgatttaggacctggcgggtgattgccccacggtccccccaccaaaagcccatgatctgggtccagaatactgcagacatcagacatgtgttaactgggtttgctgccggcaagccaccatccttgggaaggagttgtgtgggcaaatcaggaagttgccctctcagcagatgtctccaggatggctgccctcag

SEQ ID NO: 126776 - DNA, 306 bp, Homo sapiens
atgcggggcgtgtggccgcccccggtgtccgccctgctgtcggcgctggggatgtcgacgtacaagcgggccacgctggacgaggaggacctggtggactcgctctccgagggcgacgcataccccaacggcctgcagagcctcccggccacctgcttctggggccacagcccaggtggcagagttgaaagcacccccgagacccgaactggtccagttccctttccacagaaggcacagtttgtgcatgtcccgggacttgcccaggccctttaccggcagagtctacggctgtttctgttttag

SEQ ID NO: 126777 - DNA, 945 bp, Homo sapiens
atgcgggtgctgtggatgctcttttggctcctcttttggctcctgctggaatttatcagccatcagtccacctgtgttatcaatactctggctgaccatcatcatcgtgggactgactttggtggaagtccttggttacgtatcattattgcatttccgagaagttataaagttgtccttaccctctggacagtttacctttggttgtctttcctgaagactatcttccagtctgaaaatggacatgatgtatccacagatgtacagcagagagccaggaggtccaaccgccgtagacaggaaggaaataaaattggcctgaaagacgtcattactctacggagacatgtggaaacaaaaggtagagctaaaatccgtaagatgaaggtgacaacgaaaatcaaccatcatgacaaaatcaatggaaagaggaagaccgccaaaaaacagtaagatgtgccttgacacaaatactgttgtatgaaccatgtgccaatcaaagtagacaactgtaaagtccttgagaatattttctacaatatttgtggcaaattcagtgggttcaaaattgagtttgtcctttctgcttcattagtttaagctgtataattcctttcccttcctacattcttgtttgtaattttttcgggggaagaggagttgctagtactggcattggttttcctttctctctttttttttttttttttcctgagatggagctttgctgttgttgcccaggctgttagtgcaatggcacaatctcagctcactgccttttgggttcaagcaattctcctgcctcagcctcccaagtagctgggattacaggtgcccaccaccacgcccagctaatttttgtatttttactagagatggggtttcaccatgttgtccaggctggtctcgaacttctgacctcaggtaatccacctgcctcagcct

SEQ ID NO: 126778 - DNA, 2778 bp, Homo sapiens
atgcatgtggagcggcgggtgtgccatgccgtgagtaaatacaacgtgacgctgtcgtgtgtggcagggggcctggcagcgaagtccagtggccttgagctcatctggctctgtgacttgctggtcagagaacttggccagctaactgggcctgtctgtaaagtaaggacacctgcattgatctatggtcggcaccaccagcctcccttgccccggcccctaccgacactcacctgcgcagctagcaggtggccacagcctgaggaggccacagcgccaccaggggaaggtggacaaaaagatagagccctgctccctggaatccctgcaggtccgaaagaccagtgccagaaccgccgcaagatcagctccagaaccgccacaagaccagagccagaaccaccgcaagaccggagccagaaccgccgcaagaccagcgccagaaccgcagagccacagggcttgtcactgcctgaggatgatgaccctgcgcctctaagctgcagactggggtgtctgctcacgcactgcctgccttcctgggtgccgtgctgccctccagagagcaccaccctggacgtggtggaggtggagagctatgacccctacacggacagctggacgcccgtcagcccggccctcaaatacgtcagcaacttctcggctgccggctgccggggccggctctacctggtgggctccagcgcctgcaagtacaacgccctggccctgcagtgctacaaccctgtcacagatgcgtggagtgtgatcgcctcgcccttcctgcccaagtacctgtcctcgcctcgctgtgctgcactgcacggggagctctacctcattggggacaacaccaagaaggtctacgtgtacgaccccggggccaacctgtggcagaaggtgcagtcacagcacagcctgcatgagaatggcgcgctggtgccactgggtgatgcgctgtacgtgacgggcggccgctggcagggcatggaaggtgactaccacgtggagatggaggcctacgacacggttcgggacacctggacccgccacggcgccctgccccggctctggctctaccacggggcctccaccgtcttcctggatgtctccaacaagaaaacagaaggatacaggccactactccagttggttgggccatcagttgatccagctgaaagcatgtgtatggatggagaatgtgccaatggcttaaggagagagggcacagccacgtacacaggaaagatgctgcacctccggggccgtgtcattcaccgtccctccccagtgcccggcgtggtatcagctgatcggtctgaagtgtggctgcttctcccggactctgcagcaccaggtacgtggcagggcagccagtccctgctgccacatcctgtgaaccaggacagggtaaggcctcctttccccagcgggctcttctcaaaagagttccccgggaacagcagccctcggtgtgagtgtaagggttttggagcctggactgctgagcagagggtggtccggttggggaggctcctcggcaccgcagcccccatcttcccaccacaacaccctggcctgcgcattggtcagccagctcccaaaagaaggccctgcatccccccagatcagccaggaaccaaaggcagtgacttggcagccggctttgtctctgataaaagggcccagtcagctctaaaatcccagggtccttccctggcagccttgcctggagcccagatagcccaaggcctctcccaggaaggtccctcccaaaactgtgctcagtgtcagcatcagtcaggatgcagcgcggacaggaatgggaacttccggaagcatcactgtccatgtttcggcttgccagggccccctgggcctcccggtccccagggccccccaggccccatcatcccacccgaggcgctgctgaaggagttccagctgctgctgaaaggtgcggtgcggcagcgggagcgcgcggagcccgaaccctgtacgtgtggccccgccgggccggtcgctgcgagcctcgccccggtctcggccaccgccggggaggacgacgacgacgtggccgctttcctctgccgcctgcgccgggacgcgttggtggagcggcgcgcgctgcacgagcttggcgtctactacctgcccgacgccgagggtgccttccgccgcggcccgggcctgaacttgaccagcggccagtacagggcgcccgtggctggcttctacgctctcgccgccacgctgcacgtggcgctcggggagccgccgaggagggggccgccgcgcccccgggaccacctgcgcctgctcatctgcatccagtcccggtgccagcgcaacgcatgccggcaggccccggaggagcgcccgcgacccctcggaggctctccaggtctttctcagcatggtgaacatgggagccggggctctgtctgcatgagggaggtgctcagaccctgcagggcgggaacaaggtggaggaagtcgctggcgctgcagaagctgggcagtcaccccctccacacccactaccagggaaggggcaggaagcatcaggggagtcacctgctctcgtctgagagggaggtgacagccaagaacctgaactacgaatgcaggagccggacagggggaaagggacgtctaagactcatcctcttgttcgttcaacctgttgaagtggcaggattgccagttcctggacgctacctgcagggctccagtgtcccctggaacctgggagatacattcaaatccaagtactga

SEQ ID NO: 126779 - DNA, 6042 bp, Homo sapiens
atggagagtgggaaaggacgttcaaagctgaaagagcagctgaagcccagccttggggcaggagagctctggtcctgctcaggaaatgactgcagcaccccatgcggtggcagggccgctccatgggcctctgcgtcctgggagccaggacccccacctggagttggagaagttgctggcggggaagggaggatgatgaaggaggacatcatctggcaatggccctggagcattcctgaaccaccccctccctgtctgggccacgccctgtggcagcccctgctatctgccatctccatccgtccagctgggccgcctctgtggaacccaggcatcaccaaggtaagcagcccctgctatctaccatctccatccgtccagcagagccgtctctgtgggacccaggcatcaccaaggtttagggagccatccagcagctcctcatccccaaagtctgcagggctgatggctggtcagccccacagtccccgggagctcctcggggctgcagggcaccgcagcaggaggcccagcacagaactccgggtcccgcccagtccaagtctcaccatggactctcagtacgagacgggccacattcgcaagctacaggcccggcacatgcagatgcaggagaagactttcaccaagtggatcaataacgtcttccagtgcggccaggcgggcatcaagatccggaacctgtacacagagctggctgacggcatccacctcctgcggctgctggagctcatctcaggggaggccctgccacccccgagccggggccgcctgcgtgtgcacttcctggagaacagcagccgagctctggccttcctcagggccaaggtgccagtaccactcatcgggccagagaacatcgtggacggagaccagacactcatcctgggactcatctgggtcatcattctgcgtttccagatctcccacatctccttggacaaggaggagtttggggccagcgcagccctgctgtccaccaaggaagccctgctggtctggtgccagcggaagacagccagctacaccaacgtgaacattacagatttctcccgaagctggagcgatgggctgggcttcaatgccctcatccatgcccacaggccagacctgttggactacggctccctgcgtccagaccgcccactgcacaaccttgcttttgctttcctggtggctgagcaggagctgggcattgctcagctgctggaccccgaggacgtggcagccgcacagccagatgagcgctctatcatgacctacgtctccctctactaccactactgctcccgcctgcatcaggggcagactgtccagaagagactcactaagatcctgcttcagctccaggagacagagctgctgcagacccagtacgagcagctggtggctgaccttctacgctggattgcagagaagcagatgcagctggaggcgcgggattttccagactcgctgcccgccatgcggcagctactggcagcattcaccatcttccgcacccaggagaagccaccccggctacagcagcgaggggccgcagaggccctgctcttccggctacagacagcactccaagcccagaaccgcaggcccttcctgcctcatgagggcctgggccttgcagagctgtcccagtgctgggcagggctggagtgggcagaggctgcaaggagccaggccctgcagcagaggctactgcagctgcagcggctagaaaccctggcccggcgcttccagcgcaaggcagccctccgggagagtttccttaaggatgcagagcaggtgctagaccaggccagagccccgccagccagcctggccacagtggaggcagccgtccagaggctgggcatgctggaggctggcatcctgccccaggaggggcgcttccaggccctggctgagatcgcagacatcctccggcaggagcagtaccacagctgggcagatgtggcccgcaggcaggaggaagttaccgtgcgctggcagaggctccttcagcatctacagggacagaggaagcaggtggcagacatgcaggctgtgctgagcctgctgcaggaggtggaggctgcctcccaccagctggaggagctgcaggagccggccaggtccaccgcctgtgggcagcagctggcagaagtggtggagctgctgcagaggcatgacctgctggaggctcaagtctcggcccacggagcccatgtgagccatcttgctcagcagacagcagagctggactcctccctgggcaccagtgtggaggtgctgcaggccaaggccaggacactggcccagctccaacagagcctggtggctcttgtcagggcccggcgggccctgctggagcagaccctgcagcgggcagagttcctgcgcaactgtgaggaggaggaagcctggctgaaggagtgcggacagcgggtggggaatgcggccctgggccgggatctcagccagatcgcaggcgccctgcagaaacacaaggtgcccctggaagctgaggtccaccgccaccaggccgtgtgcgtagatctcgtgcggaggggacgcgacctcagcgccccgcaggcccccaacgcagccggatccccggggaacgggcagaggccgttcagggagggtggcagctgctccagacccgggtgtcgcctcttctctggagtggcgaatgccaggtatccagacaccattgccttgacctttgatcctactaatcagtggctgtcttgtgtgtacaacgatcatagcatttatgtttgggatgtgagggaccccaagaaagtgggcaaggtgtactcggctctgtatcattcttcctgcgtctggagtgtggaggtctaccccgaggtgaaggatagtaaccaggcctgcctgccccccagttcctttattacctgctcctcagacaacaccatccgcctgtggaacacagagagctccggggtgcatggctccaccctccaccgaaacatcctcagcagtgacctcattaaaatcatctatgtggatgggaacacccaggccctgctggacacagagctgcctggaggagacaaagctgatgcatccctgttggatccccgcgtgggcatccgctcggtgtgtgtcagccccaatggacagcatctagcatcaggggaccgtatgggcacacttagggtgcacgaacttcagtccctgagtgagatgctgaaggtggaggcccatgactctgagattctgtgcctggagtattctaagccagacacaggtctgaaactgctagcatcggcgagccgggaccggctgatccatgtgctggatgccgggcgggagtacagcctacagcagacgctggacgaacactcatcctccatcactgctgtcaagtttgcagccagtgatgggcaagtccgcatgatcagctgtggagcagacaagagcatctacttccgcactgcgcagaagtctggagatggagtgcagttcacacggacacaccacgtggtgcggaagacgaccctctatgacatggatgtggagcccagctggaagtacacggctatcggctgccaggaccgaaatattcggatatttaacatcagcagtggaaagcagaagaagctgtttaaagggtcacagggtgaggacggcacactcattaaggtgcagacagacccctcagggatctacattgccaccagctgttctgacaagaatctctccatttttgacttctcctcaggcgagtgcgtggccaccatgtttggccactcagagattgtcactggcatgaaatttagtaatgattgtaaacatctcatctctgtgtctggggacagctgcatatttgtgtggcgcctgagctctgagatgaccatcagcatgaggcagcgtctggccgagttgcgccagcgtcagcggggcggcaagcagcaaggaccatcctctccccaaagggcttctggacccaaccggcaccaggccccatcaatgctgtctcctggaccggctctctcatcagacagtgacaaggagggagaagatgaggggactgaagaagaacttccagcactgcccgtccttgccaagagtaccaagaaggcactgggtctgtggcagttggcctcggtccccagcccagctttgccccgaagcctgtcccactgggagatgagtcgggcacaggagtccgtggggttcctggacccagctcctgcagccaacccaggacccagaagaagagggcgctgggttcagccaggtgtggaactgagcgttagatccatgctggatctgcggcagctggaaacactggccccaagcctgcaggaccctagccaggactcgctggccatcatcccatctggtcccaggaagcatgggcaggaggcccttgagacttcactcactagccagaatgaaaagccccctcggcctcaggcttcccaaccttgttcctatccccatattatccgattattgtcacaagaggaaggggtctttgcccaagatctggaacctgcacccattgaagatgactctgagagcacggagcccctcagtgtggatggcatctcctcagaccttgaagagccagctgagggtgatgaagaagaggaagaagaggagggaggcatgggcccctatgggctacaggagggcagcccccagactccagaccaggagcagtttctaaaacagcactttgagactctggccagtggagctgctccaggggccccagtgcaggtcccagagaggtcagagtctcggagtatctcttcacgattcctgttgcaagtacagacccgcccactcagggaaccatccccatcctcctcaagcctggcactgatgtcgagaccagcccaggtgccacaggcatctggtgagcagccgagaggcaatggtgccaatccccctggagcacccccggaggtggaaccgtcctctggcaaccccagcccccagcaggcagcctctgtgctgttgccacgatgccgtctcaaccctgacagcagctgggctcccaagagagtggccacagccagccccttttctggactccagaaggcccagtctgtgcacagtctggtgccacaggaaagacatgaggccagtctgcaggccccttcaccaggcgcactgctgtctcgggagatcgaagctcaggatggtctgggctccctgcccccagctgatggccgtccgtctcggcctcactcctatcagaaccccaccaccagttccatggccaagatatcccgcagtatctctgttggggagaacctgggcctggtggctgaacctcaagctcatgcccccatccgagtctcaccactcagcaagctggccctgcccagccgggctcacctggtcctggacatccccaaaccactgcctgaccgtcctaccctggctgcattctctcctgtcaccaaaggccgggcccctggcgaggcagaaaagcctggcttcccggtgggcctaggaaaagctcacagtacaactgagagatgggcctgtttgggggagggcaccactcccaagcctaggacagagtgccaggctcatcctgggcccagcagcccctgtgcccagcaactgccagtcagcagcctcttccaaggccctgaaaacttgcagcccccaccccctgagaagactcccaaccccatggaatgcaccaagccaggggcagccctgagccaggactcagagccagcggtgagcctggagcagtgtgagcagctggtggcagagctccgcggcagcgtgcgccaggcagtgcggctctaccactcggtggctggctgcaagatgccctcagcagagcaaagtcggattgcccagctcctcagagacaccttctcttcagtgcgacaggagctggaagctgtggctggggcagtgctgtccagcccaggcagcagccctggggctgtgggagccgagcagacacaggccctgctggagcaatactcagaactgttgcttcgagccgtggaacggcgtatggaacgcaaactctga

SEQ ID NO: 126780 - DNA, 5526 bp, Homo sapiens
ctccaacaaggtgtccagtcgggtgacagcagtgtccttctctgaggattgcagctactttgtcactgcaggcaaccgacacatcaaattctggtatctcgatgacagcaagacctcaaaggtgaatgccactgtgcccttgctgggccgctcagggctgctgggagagctacggaacaacctattcactgatgtggcctgtggcagaggaaaaaaggcggacagtaccttctgcatcacgtcctcagggctgctgtgcgagttcagtgatcgaaggcttttggacaagtgggtggagctgagggtctaccccgaggtgaaggatagtaaccaggcctgcctgccccccagttcctttattacctgctcctcagacaacaccatccgcctgtggaacacagagagctccggggtgcatggctccaccctccaccgaaacatcctcagcagtgacctcattaaaatcatctatgtggatgggaacacccaggccctgctggacacagagctgcctggaggagacaaagctgatgcatccctgttggatccccgcgtgggcatccgctcggtgtgtgtcagccccaatggacagcatctagcatcaggggaccgtatgggcacacttagggtgcacgaacttcagtccctgagtgagatgctgaaggtggaggcccatgactctgagattctgtgcctggagtattctaagccagacacaggtctgaaactgctagcatcggcgagccgggaccggctgatccatgtgctggatgccgggcgggagtacagcctacagcagacgctggacgaacactcatcctccatcactgctgtcaagtttgcagccagtgatgggcaagtccgcatgatcagctgtggagcagacaagagcatctacttccgcactgcgcagaagtctggagatggagtgcagttcacacggacacaccacgtggtgcggaagacgaccctctatgacatggatgtggagcccagctggaagtacacggctatcggctgccaggaccgaaatattcggatatttaacatcagcagtggaaagcagaagaagctgtttaaagggtcacagggtgaggacggcacactcattaaggtgcagacagacccctcagggatctacattgccaccagctgttctgacaagaatctctccatttttgacttctcctcaggcgagtgcgtggccaccatgtttggccactcagagattgtcactggcatgaaatttagtaatgattgtaaacatctcatctctgtgtctggggacagctgcatatttgtgtggcgcctgagctctgagatgaccatcagcatgaggcagcgtctggccgagttgcgccagcgtcagcggggcggcaagcagcaaggaccatcctctccccaaagggcttctggacccaaccggcaccaggccccatcaatgctgtctcctggaccggctctctcatcagacagtgacaaggagggagaagatgaggggactgaagaagaacttccagcactgcccgtccttgccaagagtaccaagaaggcactggcctcggtccccagcccagctttgccccgaagcctgtcccactgggagatgagtcgggcacaggagtccgtggggttcctggacccagctcctgcagccaacccaggacccagaagaagagggcgctgggttcagccaggtgtggaactgagcgttagatccatgctggatctgcggcagctggaaacactggccccaagcctgcaggaccctagccaggactcgctggccatcatcccatctggtcccaggaagcatgggcaggaggcccttgagacttcactcactagccagaatgaaaagccccctcggcctcaggcttcccaaccttgttcctatccccatattatccgattattgtcacaagaggaaggggtctttgcccaagatctggaacctgcacccattgaagatggtattgtctacccggagccgagtgacaaccccaccatggataccagtgagttccaagtgcaggctccagcccggggaactctgggaagagtgtacccaggcagcaggagctcagaaaagcacagccctgacagtgcctgctctgtggattacagcagcagctgcctttccagcccggagcaccccactgaagactctgagagcacggagcccctcagtgtggatggcatctcctcagaccttgaagagccagctgagggtgatgaagaagaggaagaagaggagggaggcatgggcccctatgggctacaggagggcagcccccagactccagaccaggagcagtttctaaaacagcactttgagactctggccagtggagctgctccaggggccccagtgcaggtcccagagaggtcagagtctcggagtatctcttcacgattcctgttgcaagtacagacccgcccactcagggaaccatccccatcctcctcaagcctggcactgatgtcgagaccagcccaggtgccacaggcatctggtgagcagccgagaggcaatggtgccaatccccctggagcacccccggaggtggaaccgtcctctggcaaccccagcccccagcaggcagcctctgtgctgttgccacgatgccgtctcaaccctgacagcagctgggctcccaagagagtggccacagccagccccttttctggactccagaaggcccagtctgtgcacagtctggtgccacaggaaagacatgaggccagtctgcaggccccttcaccaggcgcactgctgtctcgggagatcgaagctcaggatggtctgggctccctgcccccagctgatggccctccgtctcggcctcactcctatcagaaccccaccaccagttccatggccaagatatcccgcagtatctctgttggggagaacctgggcctggtggctgaacctcaagctcatgcccccatccgagtctcaccactcagcaagctggccctgcccagccgggctcacctggtcctggacatccccaaaccactgcctgaccgtcctaccctggctgcattctctcctgtcaccaaaggccgggcccctggcgaggcagaaaagcctggcttcccggtgggcctaggaaaagctcacagtacaactgagagatgggcctgtttgggggagggcaccactcccaagcctaggacagagtgccaggctcatcctgggcccagcagcccctgtgcccagcaactgccagtcagcagcctcttccaaggccctgaaaacttgcagcccccaccccctgagaagactcccaaccccatggaatgcaccaagccaggggcagccctgagccaggactcagagccagcggtgagcctggagcagtgtgagcagctggtggcagagctccgcggcagcgtgcgccaggcagtgcggctctaccactcggtggctggctgcaagatgccctcagcagagcaaagtcggattgcccagctcctcagagacaccttctcttcagtgcgacaggagctggaagctgtggctggggcagtgctgtccagcccaggcagcagccctggggctgtgggagccgagcagacacaggccctgctggagcaatactcagaactgttgcttcgagccgtggaacggcgtatggaacgcaaactctgagttctggaagcctgtcccaagtgaatgaatgctccagcgattccaaactgcagcccctctgcccctcaccaaaacctgcggggctgcttggagtggaaagcagggagcagtgttcagaggcaaagcagccttcccagccgctcctcgtggggggcctgtatttattaatttatttccctgactgttgcctcacttccttggaactcctgcctccacagcccctccagtggcagggacaggtcttgggtctttgtcatcttggtgctgtgagaggtaggagggcagcctgccccatctaggaatctgggaagggctggccctctcttagaagccatttgaaattactgcagggattagctccctgtggtggagcatacacagggtactctggggtcgaggtgagaggtgatgtggtattcagtgcccgtcagccaactgtgggccttcacctctacctgcacttcccctctcacaccagctgcactcccctggctgccagagcagggtggttttccccaatacctggagctcagaaaggcagagccatctggccctccagggtgtccccagccatcaggagacttgagttggtatttggacctgagcccgcacattccactcccattctccctccaagaggggcccagcattgtatttccctgtgaccccttactctcctggccagaacttgagccagctgtgggatgttgctgcaggacagtaagccctcacctgggcaaacatgaagctctggcctcctttcctcagccccttgttcttccctgtcctccaccctggaccccagccggctgctggagcccagaggccaccttctccctgcatcctgaatgatgcttagtcagaagcctgtgttggaacatccctcgtttacggggcgctggcctacctcctgaggacctcagccacagatgagatcacacgcatgcacgtgcacacatgtacacacacacacctacctgcacagcacgctgttgagtgttggttgctagagtatccggctggctgctgtgtgcctggtttcctcacatcctgcctcagcttcaccaccctggcttatgtggaacacctatcagggagcagaaaaggggtgcagtacactaagtgaacccagattctggattcttggtgtccacagcctagctgatacgagatagcccataggacacctggtttaggtagaaggagcctcctcaaaggcagtgctgggcacccacgggtgtgctggatactggagtttgagaggagggaggtgctggggccaaaggagacactagaaaagtggtagatgggacaggtaagtggcagaggtgagggggtaagttagaatgtaaaagggcagtaattaggggtgagggaaaggagataggggaccctaggaggtagagtgggaccatgtcgtgaggcagttgaagagttgaggaaaggtttttctgggccctactgctcccctctgctgcaggtaagtcagagcagctttaccacagcttcaggccacgagagccccttcacccgccctgctgcgccataggcagaggcttataaagaaatgggttctgggccaggtgtggtggctcaagcctgtaatcccagcactttgggaggccgaggcgggtggatcacctgaggttaggagttcgagatcagcctggccaacatggtgaaaccctgtctctactaaaaataaaaaaattagctgggcgtggtggtgggcgcctgtaatcccagctactcgggaggtttaggcaggagaatcgcttgaaccctggaggtggaggtggaggttgcagtgagccgagatcgcgccattgcactccaacctaggtgacaaagctacacgccatctc

SEQ ID NO: 126781 - DNA, 1176 bp, Homo sapiens
atggggctgatcttgctagccgccagtcctctcatggcctcatccagcatagatgaattttacaaatataatgttgaaggggaaaaacgccagagaatccccggggagaacctgggcctggtggctgaacctcaagctcatgcccccatccgagtctcaccactcagcaagctggccctgcccagccgggctcacctggtcctggacatccccaaaccactgcctgaccgtcctaccctggctgcattctctcctgtcaccaaaggccgggcccctggcgaggcagaaaagcctggcttcccgcaactgccagtcagcagcctcttccaaggccctgaaaacttgcagcccccaccccctgagaagactcccaaccccatggaatgcaccaagccaggggcagccctgagccaggactcagatggagaggctggacgtgtccgaggcacagggaaggggcaagggacagccagtctggcagcttctgtcacgtgggggcagctggaggccctgaagagggagaaggccgtgcagctggcacacagtgtggaagtgtgcagttttctgcaggagtgtggacccacacaggtccagctgcgagacgtgctcctccagctggaggccctgcagccagggagctcagaggacacctgccacgccctgcagctggcccagaagaagaccctggtgctggagaggagggtccacttcctccaaagtgtggtcgtaaagtacggccagcgcagtggtggcattgggaggcaggtgcacgaacttcagtccctgagtgagatgctgaaggtggaggcccatgactctgagattctgtgcctggagtattctaagccagacacaggtctgaaactgctagcatcggcgagccgggaccggctgatccatgtgctggatgccgggcgggagtacagcctacagcagacgctggacgaacactcatcctccatcactgctgttaagtttgcagcagtgatggaggatgagtgttcgtccagcgtctgctgtaggctgtactcccgcccggcatccagcacatggatcagccggtcccggctcgccgatgctagcagtttcagacctggggatgaaagaactccatcagcccatgagtgccctgaacagcccttatctgggcctggcaaagagccccaagggaactga

SEQ ID NO: 126782 - DNA, 1635 bp, Homo sapiens
atgcccaaccccaaaaacagcaaaggcggccgcaaaaacaagcgcgccaacagcagcggcgacgagcaggaaaatggagccggggccctggcagcggcgggcgcggcgggagcggcggccgggggggccctggcggcggcggccggttgcggggcggcggcggcgggcgcgccgggcgccggaggcgcggcgggcgccggaggcgcggggactggcgccgcgaacgctgcggccgccgcgggggctgcggccgcgggcgatgccaaaaacgaagccccatgtgccactcccctgatctgcagcttcggtaggccggtggacctggaagaaggacgactaccagaaggtggtgtgcaacaacgagcactgcccctgcagcacctggatgcacctgcagtgcttctacgagtgggagagcagcatcctcgtccagttcaactgcatcggccgcgcgcgcacgtggaacgagaagcaatgccgccagaacatgtggacaaagaaggggctacgacctgggccttccgcttctgctcttgccgctgtggccagggcaacttgaagaaggacacagactggtatcaggtgaagcggatgcaggacgagaaaaagaagaagtctggctccgagaagaacacagggaggcctcctggtgaggcggcggaggaggcaaaaaagtgcaggcccccaaataagccccagaaaggcccaagccacgacctcccccgccggcattccatggaccggcagaactcccaggagaaggcagtgggtgccgcagcctacggtgcccgttcccccggtggctccccgggccagtccccacccacgggctactccatcctctctcctgcccacttcagcggcccccgctcctccagatacctcggggagttcttaaagaacgccatccatctggagcctcacaagaaggccatggctgggggccatgtgttcagaaatgcccactttgattacagccctgcggggttggcagttcacagggggggacacttcgacacccccgtgcagttccttcggcggctggacctctccgaactcctcactcacatccccaggcataagctgaacactttccacgtgcgcatggaagacgatgcccaagtgggccagggggaagacttgcggaagttcattctggccgcgctcagtgccagccacagaaacgtggtaaactgtgccctgtgccaccgggcgctcccggtgttcgaacagttcccactggtggatggaactttgttcctaagcccgtcgagacatgatgagatcgaatatgatgttccttgtcaccttcaagggagactcatgcatctgtatgccgtgtgcgtggactgcctggaaggggttcacaagatcatctgcatcaagtgtaagtcacggtgggatggcagctggcaccagctgggcactatgtacacctacgacatcctggctgcctctccatgttgtcaggcccgcctgaactgtaagcactgtgggaagccggtgatcgacgtgaggatcgggatgcagtacttctccgaatatagcaacgtccagcagtgtccacactgtgggaacctggactaccacttcgtgaagccattttcctccttcaaagttctcgaagcttattga

SEQ ID NO: 126783 - DNA, 1563 bp, Homo sapiens
atgcaggaagccccatgtgccactcccctgatctgcagcttcggtaggccggtggacctggagaaggacgactaccagaaggtggtgtgcaacaacgagcactgcccctgcagcacctggatgcacctgcagtgcttctacgagtgggagagcagcatcctcgtccagttcaactgcatcggccgcgcgcgcagctggaacgagaagcaatgccgccagaacatgtggacaaagaagggctacgacctggccttccgcttctgctcttgccgctgtggccagggccacttgaagaaggacacagactggtatcaggtgaagcggatgcaggacgagaaaaagaagaagtctggctccgagaagaacacagggaggcctcctggtgaggcggcggaggaggcaaaaaagtgcaggcccccaaataagccccagaaaggcccaagccacgacctcccccgccggcattccatggaccggcagaactcccaggagaaggcagtgggtgccgcagcctacggtgcccgttcccccggtggctccccgggccagtccccacccacgggctactccatcctctctcctgcccacttcagcggcccccgctcctccagatacctcggggagttcttaaagaacgccatccatctggagcctcacaagaaggccatggctgggggccatgtgttcagaaatgcccactttgattacagccctgcggggttggcagttcacagggggggacacttcgacacccccgtgcagttccttcggcggctggacctctccgaactcctcactcacatccccaggcataagctgaacactttccacgtgcgcatggaagacgatgcccaagtgggccagggggaagacttgcggaagttcattctggccgcgctcagtgccagccacagaaacgtggtaaactgtgccctgtgccaccgggcgctcccggtgttcgaacagttcccactggtggatggaactttgttcctaagcccgtcgagacatgatgagatcgaatatgatgttccttgtcaccttcaagatccttataaacataacagtgaggaaaagcagtggtcagaaaagggccaaggtatttttagattagttgaattaattttgaagtttatgaaagatgagagtgtgttgatagcagcaaaagggagactcatgcatctgtatgccgtgtgcgtggactgcctggaaggggttcacaagatcatctgcatcaagtgtaagtcacggtgggatggcagctggcaccagctgggcactatgtacacctacgacatcctggctgcctctccatgttgtcaggcccgcctgaactgtaagcactgtgggaagccggtgatcgacgtgaggatcgggatgcagtacttctccgaatatagcaacgtccagcagtgtccacactgtgggaacctggactaccacttcgtgaagccattttcctccttcaaagttctcgaagcttattgatgaaagctttgctttagtaatagctattttattgatattattcccttattacatatcttttatagggaaaaaaaa

SEQ ID NO: 126784 - DNA, 1077 bp, Homo sapiens
atggtggcaggcatccctggttctgcacaggtttcctccaaaggggacagattgctggagaagcttccagatgctgtgaggttcctggtggtctctgaagatgagtccctcctcgccgcaggctttggaagatcggtgcggatattcttggcggactcgaggggctttcgccgattcatggccatggatctggaacatgaagacatggtggagacggctgtttttggtactgagaacaacctgatcatcacggggtcccttgatgcgctcattcagctgcaccacctcgtgagcgatgacgtctgcctgaaggtggtggagctctacctgaacgagaagaagcggggtgccgctggtgggaacctgtcctcccgctgcgtccgcgctgctagggagaccagctaccagtggaaggctgagcgctgcatggccgacgagaactgcttcaaggtgatgttcctgcagcgcaaagggcaggtgatcatgaccatcgagctcctggacaccgaggaggcccagacggaggaccctgtggaggtccagcacctggctcggtacgtggagcagtatgtggggaccgagggcgcgtccagctcgcccactgagggcttcctcctgaaacctgtgttcctgcagaggaacctcaagaagttccgccgccggtggcagagcgagcaggcgcgggccctgcgcggtgaggccaggagctcctggaagcggctggtgggcgtggagagcgcctgcgacgtggactgccgcttcaagctcagcactcacaagatggtgttcatcgtgaactccgaggactacatgtaccgtcgcgggaccctctgccgggccaagcaggtgcagcccctggtcctgctccgccaccaccagcactttgaggagtggcacagccgctggctggaggacaatgtgacggtggaggcggctagcctggtgcaggactggctgatgggtgaggaggacgaggacatggtaccctgcaagacgctgtgtgagacagtgcacgtgcacggcctgcccgtgacccgctaccgcgtgcagtacagccgccgcccggcctcgccctga

SEQ ID NO: 126785 - DNA, 3681 bp, Homo sapiens
catggcgcacgctggcggtggcagcggtggcagcggtgccggcggccccgcgggccgggggctgagcggcgcccgctggggtcgctcgggctccgcaggccacgagaagctgccggtgcacgtagaagacgccctcacctatctggaccaggtgaagatccgctttggcagcgaccctgccacctacaacggcttcctggagatcatgaaggagttcaaaagccagagcatcgatactcctggagtcatcagacgtgtctcgcagctcttccacgagcaccctgacctcattgttggattcaacgcttttcttcccctcggatatagaatagacattcccaagaatggcaagttaaacatacagtcgcctctgacaagccaggagaattcgcacaaccacggggacggtgcagaggacttcaagcagcaggtgccgtataaagaggacaaaccccaggtgcccctggagtccgattccgtggaattcaacaacgccatcagctatgtgaataagattaaaacccgcttcctagaccacccagaaatctacaggtcattcctggagatcctgcacacgtaccagaaggagcagctgaacacgaggggccggccattccgaggcatgtctgaagaggaggtgttcaccgaggtggccaacctcttccggggccaggaggacctgctctcagagtttggacagttcctgcccgaagccaagcggtctctgttcacaggaaacgggccgtgcgagatgcacagcgtgcagaagaacgagcacgacaagaccccggagcacagcaggaagcgctcccggccctcgctcctccgccccgtgtctgcacccgccaagaaaaaaatgaaacttcgtggtaccaaagacctgtccatcgctgcagtggggaagtacgggactctgcaggaattttctttctttgacaaggtccgccgggtgctgaagagccaggaggtgtatgaaaacttcctccgctgcatcgcactcttcaaccaggagctggtgtctggctctgagctcctgcagctcgtcagcccatttctggggaaatttccagaactctttgcacagttcaagtccttcctgggggtaaaagagctgtccttcgcgccacccatgagcgacagatccggggacgggataagccgggaaattgattatgcatcctgcaagcgcataggatccagctaccgggcactccccaaaacctaccagcagcccaagtgcagtgggaggacagccatctgcaaggaggtactgaacgacacctgggtctccttcccttcctggtctgaggactccacgttcgtcagctccaagaagacaccgtacgaggagcagcttcaccgctgtgaggacgagcgcttcgagttagacgttgtcctggagacgaacctggccacaatccgtgtgttggaaagtgtgcagaagaagctgtctcggatggcgccggaagaccaggagaagttccggctggacgactccctgggaggcacgtcggaggtgatccagcgccgtgccatttatcgcatctatggcgacaaggccccggagatcatcgagagcctcaagaagaaccctgtcaccgctgtccccgttgtcctgaaaagactgaaggccaaggaagaggagtggcgggaggcccagcagggcttcaacaagatctggcgggagcagtatgagaaggcgtacctcaagtcccttgaccaccaggctgtgaacttcaagcagaacgacaccaaggccctgcgctccaagagcttgctcaacgagatcgagagcgtctacgacgagcaccaggagcagcactcggagggccgcagtgccccctctagcgagccgcacctcatctttgtgtacgaggaccggcagatcctggaggacgcagcagcgctcatcagctactacgtgaagcggcagccggccatccagaaggaggaccagggcaccatccaccagctgctgcaccagttcgtgcccagcctcttcttctctcagcagctggacctgggcgcctccgaggagtcagctgatgaggaccgggacagcccccaggggcagaccacagaccccagtgagcggaagaagccggcgccaggaccccacagtagccccccagaggagaagggggccttcggggatgccccggccactgagcagccacccctgccgcccccagccccgcacaagcccctggacgatgtctacagcctattttttgccaacaacaactggtacttcttcctgcgcctgcaccagaccctgtgctccaggctgctgaagatctaccgccaggcgcagaagcagcttctggagtatcggaccgagaaggagcgggagaagctgctgtgtgagggccgcagggagaagggcagcgaccccgccatggagctgcggctgaagcagcccagtgaagtggagctggaggagtactacccggccttcctggacatggtgcggagcctgctggagggcagcatcgaccccacgcagtacgaggacaccctacgcgagatgttcaccatccatgcctacgtgggcttcaccatggacaagctggtgcagaacattgcgcggcagctgcaccacctcgtgagcgatgacgtctgcctgaaggtggtggagctctacctgaacgagaagaagcggggtgccgctggtgggaacctgtcctcccgctgcgtccgcgctgctagggagaccagctaccagtggaaggctgagcgctgcatggccgacgagaactgcttcaaggtgatgttcctgcagcgcaaagggcaggtgatcatgaccatcgagctcctggacaccgaggaggcccagacggaggaccctgtggaggtccagcacctggctcggtacgtggagcagtatgtggggaccgagggcgcgtccagctcgcccactgagggcttcctcctgaaacctgtgttcctgcagaggaacctcaagaagttccgccgccggtggcagagcgagcaggcgcgggccctgcgcggtgaggccaggagctcctggaagcggctggtgggcgtggagagcgcctgcgacgtggactgccgcttcaagctcagcactcacaagatggtgttcatcgtgaactccgaggactacatgtaccgtcgcgggaccctctgccgggccaagcaggtgcagcccctggtcctgctccgccaccaccagcactttgaggagtggcacagccgctggctggaggacaatgtgacggtggaggcggctagcctggtgcaggactggctgatgggtgaggaggacgaggacatggtaccctgcaagacgctgtgtgagacagtgcacgtgcacggcctgcccgtgacccgctaccgcgtgcagtacagccgccgcccggcctcgccctgacccgccctcatgggcaccgggcaggcgcctcacagagcacagacgtgccctcggccttggtcgtgtcggggccgttttcttgaacgacgtgagaggcatctcccagcccctctgctgccggacagcgcactccagggcaggacgccgcccccgtggctcccggtctcctgtgggcctgctgtgtgccaaacctgagctacctgcacccgagccctggggctcagccccaccacaggggcgggtggacgtgctggccgaggaacaagcaatcatgtttgcgttcccgg

SEQ ID NO: 126786 - DNA, 2193 bp, Homo sapiens
atgagttgtgatacaaatggagaagtggaggggggaagggtagacagcaaaacaagaggcaggcaagaagtagaaaggaacacagaaactcatctgggctctggactcaactgtgatattccactgatatttttaacatatgaatggagggggatcctggaatacaagattttcagtgttaagactggagaagttctgggtaaaccaggacaacttggtcatcctactggtcaaacaacattttttgaaactgggacccaggtcacgtcgatgcaagagatgggctcctacagctttgggcagccccaccctgtggctttgcagggtacagctccactccccgctgctttcaccggctggcgtttagcgtctgtggcttttccaggcacacagtgcaagctgtctgtggatctaccaatctggggtctggaggacagtggccctcttctcacagctccacttggcagtgccccagtggggcctctgtgtgggggttctgaccccacatttcccttctgcactgccctaacaggaccctcagctgcaagtctgttggagtttgctagaggtccactccagaccctgtttgcctgggtatcagcagaggtgtctgcagaacaggggtttttcgtgaaccacgaatgctgctgtctgatcgttcctctggaagttttgtctcagaggagtacccggccctgtgaggtgtcagtctgcccctactggggggtgcctcccagagatcgcagtaatcagtgcccctccgggtttaccttagactcagttggacctttttgtgctgatgaggatgaatgtgcagcagggaatccctgctcccatagctgccacaatgccatggggacttactactgctcctgccctaaaggcctcaccatagctgcagatggaagaacttgtcaagatattgatgagtgtgctttgggtaggcatacctgccacgctggtcaggactgtgacaatacgattggatcttatcgctgtgtggtccgttgtggaagtggctttcgaagaacctctgatgggctgagttgtcaagatattaatgaatgtcaagaatccagcccctgtcaccagcgctgtttcaatgccataggaagtttccattgtggatgtgaacctgggtatcagctcaaaggcagaaaatgcatggatgtgaacgagtgtagacaaaatgtatgcagaccagatcagcactgtaagaacacccgtggtggctataagtgcattgatctttgtccaaatggaatgaccaaggcagaaaatggaacctgtattggtgagtgtctggctgtttccgtgactgagatcagtttgccgtcaacaagtcaaatattgatgaatgtaaagatgggacccatcagtgcagatataaccagatatgtgagaatacaagaggcagctatcgttgtgtatgcccaagaggttatcggtctcaaggagttggaagaccctgcatggatattgatgaatgtgaaaatacagatgcctgccagcatgagtgtaagaatacctttggaagttatcagtgcatctgcccacctggctatcaactcacacacaatggaaagacatgccaaggaaaactgccatttaaacaaattgaaagtggggggggccagtaaggaaaaggaaaagagtgatgattttcttgaaaaaggagaaaaaaatctgggtattattaaggtgaccaaaagggttgccaatgtcctgatgctttggaaatctttggattccatacatctagacccttttggaacatcagtgaattatctagattctgcattcagaaatataagaaaccttggcatagtgtcagtgacttctacagatatcagttctttatatgccaaggcacagcatgttgcccggcgtcactacggatgtaacattgtccgaactgaatattacaaggaactagcagccagaattgttgtagctgcagtggcaagtgtatctgtggaatttgcaggctcagaggactgtcatagcaatatacaagatgaaggtttgctcctcgcagctctgctagatgtcatgaaggagggtttccccaccctgccgtgtatcctaagggaactttcagggttggtgattgatctcattgcctacctctgctcaaccactggcatgcttaagataaatttcaaggaaatgttgtcagaagtacttggttaa

SEQ ID NO: 126787 - DNA, 1254 bp, Homo sapiens
atgcctgtagacccagctattcggggggctgacgtggaagaatcacttaagcccaggataatgggattacagtgggcaaaacatcttggaaatgcagtcaaagttacaatcaatgacttgaatgaaaattctgtgacactgattcaggaaaactgccatttaaacaaattgaaagtggtggtggacagtaaggaaaaggaaaagagtgatgatattcttgaagaaggagagaaaaatcttggtaatattaaggtgaccaaaatggatgccaatgtactgatgcatttgagatcttttgatttcatacatctagacccttttggaacatcagtgaattatctagattctgcattcagaaatataagaaaccttggcatagtgtcagtgacttctacagatatcagttctttatatgccaaggcacagcatgttgcccggcgtcactacggatgtaacattgtccgaactgaatattacaaggaactagcagccagaattgttgtagctgcagtggcaagagctgcagcccgatgcaacaaaggcatagaagtactgtttgcagtggctctggaacattttgtgttggtagttgtgagagttttgaggggacctacttcagcagatgaaacagccaagaagattcaatacctgatccattgtcagtggtgtgaagagagaatttttcagaaggatggtaatatggtagaagaactcaggattaagaaactcactcaaaaccacacaacgtcatggaaactgaacaacctgctcctgaatgactaccgagtaaataacgaaatgaaggcagaaataaataagctctttgaaaccagtcagaacaaagacacaatgttacagaatctctgggacacagctaaagcagtgtttagagggaaatttatagcactaaaagcacacaagagaaagcaggaaagatctaaaattgacaccctaacatcacaattaaaagacgtagagaaacaagagcaaacaaattcaaaagctagcagaagaaaagaaataactaagatcacagcagaactgaaggagatagagacacaaaaaacccttcaaaaactcaatgaatccaggagctggttttttgaaagatcaacaaaacagactgctagccagactaataaagaagaaaagagagacaataaaaaaatgattaaggggatatcaccacccatcccacagaaatacaaactaccatcagagaatactataaacacctttatgcaaataaactag

SEQ ID NO: 126788 - DNA, 1713 bp, Homo sapiens
atgggcaaagacttcatgactaaaacaccaaaagcaatggcaacaaaagccaaaactgacaaatgggatctaattaaactaaagagcttctgcacagcaaaagaaactatcatcagggttaacaagcaacctacagaatttggggaaattgaaataaaaagtacaaaagaaacaagtaaaggaacagttaatgacatacaaagggaaccaagagactatggcctcctgaaagccagatacataaagacttctggtaacgccactgttgatcacttatccaagtatctggctgtgaggttagctttagaagaacttcgaagcaaaggtgaatcaaaccagatgaaccttgatacagccagtgagaagcagtataccatttatatagcaacagccagtggccagttcactgtattaaatggctctttttctttggaattggtcaggataatgggattacagtgggcaaaacatcttggaaatgcagtcaaagttacaatcaatgacttgaatgaaaattctgtgacactgattcaggaaaactgccatttaaacaaattgaaagtggtggtggacagtaaggaaaaggaaaagagtgatgatattcttgaagaaggagagaaaaatcttggtaatattaaggtgaccaaaatggatgccaatgtactgatgcatttgagatcttttgatttcatacatctagacccttttggaacatcagtgaattatctagattctgcattcagaaatataagaaaccttggcatagtgtcagtgacttctacagatatcagttctttatatgccaaggcacagcatgttgcccggcgtcactacggatgtaacattgtccgaactgaatattacaaggaactagcagccagaattgttgtagctgcagtggcaagagctgcagcccgatgcaacaaaggcatagaagtactgtttgcagtggctctggaacattttgtgttggtagttgtgagagttttgaggggacctacttcagcagatgaaacagccaagaagattcaatacctgatccattgtcagtggtgtgaagagagaatttttcagaaggatggtaatatggtagaagaaaacccatatagacagctgccttgtaactgtcatggaagcatgcctggaaagacagcaatagaacttggacctctgtggtcaagttcccttttcaatactggattcctcaaaagaatgctatttgaatctcttcaccatggtttggatgacattcagaccctaataaagacattaatctttgaatcagagtgtacgcctcaaagtcagttttcaattcatgcatcttcaaatgtcaacaagcaagaagaaaatggtgtatttattaaaactacagatgacaccacaacagataattacattgcacaaggctttcgagtaagccgaactcattttgacccaatgggtgtacgcacagatgcacctctgatgcagtttaaatctatccttttaaagtacagcacccccacctacactggaggacagtcagaaagccatgtccagtcagcatctgaagatacagtaactgaaagagttgaaatgtcagtgaatgacaaagcagaagcaagtggctgcagaagatgcttccagaagaaatcaaccctactgacacctcgatttcagatttctggccttcagaactgtgagaataactttaagccaccaagtttggaataa

SEQ ID NO: 126789 - DNA, 860 bp, Homo sapiens
cggacgcgtggggtaatatggtagaagaaaacccatatagacagctgccttgtaactgtcatggaagcatgcctggaaagacagcaatagaacttggacctctgtggtcaagttcccttttcaatactggattcctcaaaagaatgctatttgaatctcttcaccatggtttggatgacattcagaccctaataaagacattaatctttgaatcagagtgtacgcctcaaagtcagttttcaattcatgcatcttcaaatgtcaacaagcaagaagaaaatggtgtatttattaaaactacagatgacaccacaacagataattacattgcacaaggaaagagaaaaagtaatgaaatgatcacaaatttaggcaagaagcaaaagactgatgtcagtactgaacatcctcccttttattacaacattcacagacacagcattaaaggaatgaatatgccaaagttaaaaaagtttttgtgctatttatctcaagcaggctttcgagtaagccgaactcattttgacccaatgggtgtacgcacagatgcacctctgatgcagtttaaatctatccttttaaagtacagcacccccacctacactggaggacagtcagaaagccatgtccagtcagcatctggaagatcacggaacctggaaaagttgaaaggtcggtgattgacaaagcaggaagcaagtgggctgcagaaggatgggtaaacgtggagaaggattgggttctcaggtgtcttgtattaggtgggccttattagttctctataccaactgtagttctttttctgttctttcaattcagtagagtaaaaataaaaaacagtgtcattttcattcaaaaaa

SEQ ID NO: 126790 - DNA, 1371 bp, Homo sapiens
atggatgaagctggaaaccatcattctcagcaaactatcacaaggacaaaaaaccaaacaccgcatgttctcactcacagaaagccgtctgagacatcttgcaccacacaaatctccgacttggccttcatacagccttttgtgaaagcaaatataattacagagcaaaagagaggaacaaaacagcagattttgaatctccccctgaatggccagaaaaatgagcaggcaactggagatgaggacatggatgaagctggaaatcatcattctcagcaaactaacacaagaacagaaaaccgaacaccgcatgttctcactcataagtgggaactgaacaatgagaacacatggacacgaggaggggaacatcacacaccagggcctctccagggctctgctctcggaatagctctaacccccccaaaagggcaagaaccggttttaataatgcagaattatgcctctttactaactactgaatacgctttatttcggatgccaaaccagaaacaccttttcctctatgctcaacacatgtgctctggtgaaattcacaaaactcctagacctaatcatggagcatatgaagtaacacagtccacgcatagtgttcccctgcatatgggatgtattgcactatgtaaatgtgacttaaccctgttgaatcacactgaatctttgttgtgcatgacattcaaggtttggcagccacctccaagcctcatcacagatgctaatagcaaatcaactgaaatggatgatgcggaattaagatttggtgtaagacaactagcccaagtgtctggagtagttacaatggaatgcacgcatgtagccgagctgcaagtggaagcccagttttctgactcccaggcacttctcccttcctcttccactgctttgcatggcgagaagagtttggcacagctctgttattcccatttcacaaatacagtaactgatgcagttagaacaaagggaatattttggagctcacttcctagtcaatatcaggagcttaatgatctcactgaggtaaaatttatgaggattcagacttgccattgctgggttgatctttgtggttcttggaaggggctccgaggtgggagtcctgctgcaaatgcagctctggctggacctgccctgcagttagccctgagggcaccaatgatctcagatgcaagtacttgcccgggaggtgccagtgcaaggatggacgctggctctagtctggtccacacactgataggtaacctctctgaagtactgtattgtacaaggagttactctttcattctttcatctagcagcaactatgtagtgagcatcaacaaagaacctattgaaagtctaactaaacggtga

SEQ ID NO: 126791 - DNA, 1257 bp, Homo sapiens
atgggcaaggacttcatgtcaaaaacaccaaaagcaatggcaacaaaagccaaaattgacaaatgggatctaattaaactaaagagcttctgcacagcaaaagaaactaccatcagagtgaacaggcaacctacagaatgggagaaaatgtttgcaatctactcatcagacaaagggctaatatccaaaatctacaaagaattcaaacaaatttacaagaaaaaaacaaacaaccccatcaaaaagtgggtgaaggatatgaacagacacttctcaaaagaagacatttatgcagccaaaaaacacatgaaaaaatgctcatcatcactggccatcagagaaatgaaaatcaaaaccacaatgagataccatctcacaccagttagaatggcaatcattaaaaagtcaggaaacaacagggacatggatgaagctggaaaccatcattctcagcaaactattgcaaggacaaaaaaccaaacaccatatgttctcactcacaggattgtttttgaagacttgcaaaggtcctgtatgaagtacaaccagtgtagcacttggcacatgggaaacaggcactccacacagaaggcctggtctcctcttacacataaacatcctcatggacccaggctgcttctagctcatgatctgccaactcaaagatgtaaccttcattattctcatggtctacatggggtgcacctgcatttcagcagcagcagagtggaggaggggacagtgaagaagagaagcaacaaagagtgcatgccggctgcctttccaggaagggagatagaaatctcaggatctcaacaaggtacaaataacgcacattcccagaacatagagccagggacagtcccctctcagttctcttctaaaggtggttctggcacaacagttgataaagctgtgtccctgaagggctttttagccctgggtgcttcctgtaaaacttgtcagcttccactggatctgcgggactgtgtccctcacaggctggacacccggccctgcggagaggacttgattaaacaagaaactctgttcagcttcatgcaggagcgccagaaaagatacgccaagtatgccgagcagatccagaaagtgaacgagatgtccgccatcctccgccgcatacagatgggcatcgaccagactgtgcccctgctggacaggctcaacagcatgctgcccgagggcgagcggctggagcccttcagcatgaagcccgaccgcgagctcaggctgtag

SEQ ID NO: 126792 - DNA, 462 bp, Homo sapiens
atggatgaagctggaaaccatcctcagcaaactatcgcaaggacaaaaaaccaaacacctcatgttctcactcacaggtcagaaccggatgcaagacccttcaaagaagcctccaaaacaaaggtcttcaaaggcatcaaccgatttttacaacttctttccaagggtgaacttagtcctgctgattggcgtgtaacggaaaagccagtggctgctggggatgtacctgctgatgcccagttcaaagggagacagtttccggacgcccaacaatcacagggcggcccaggaccgagagagagcaatagactcgcctcttgcttccgcatccccagttctggtccaggtggcactgaacccaattatctccaaggacggcgagagtcagccagggccggcaggaaccatcacattatgctccttggggaggaggaacgctgttggtgccctcttagcacttaa

SEQ ID NO: 126793 - DNA, 3239 bp, Homo sapiens
atgtactcacatgtgatcacggtgtgccggcatgtgaagaatggggacattctgctactgaaccgacagcccacactgcacagaccctccatccaggcccaccgtgcccgcatcctgcctgaagagaaagtgctgcggctccactatgccaactgcaaggcctataatgccgactttgatggagacgagatgaatgcccatttcccccagagtgagctgggccgggccgaggcctacgtcctggcctgcactgatcagcagtaccttgttcccaaggatggccaaccattggcgggactgatccaggatcacatggtttcaggggcaagcatgactactcggggttgctttttcacccgggagcactatatggagctggtgtaccgaggactcacggacaaagtggggcgcgtgaagctcctttctccttccatcctgaagccctttccgctgtggacaggaaaacagcatataaacagaaccaaagacaaaaaccacatgattatctcaatagatgcagaaaaggcctttgataaaattcaacaacccttcatgctaaaaactctcaataaattaggtattgatgggacgtatctcaaaataataagagctatctatgacaaacccacagccagtatcatactgaatgggcaaaaactggaagcattccctttgaaaactggcacaagacagggatgccctctctcaccactcctattcaacatagtgttggaagttctggccagggcaatcaggcaggagaaggaaataaagagcattcagttaggaaaagaggaagtcaaattgtccctgtttgcagatgacatgattgtatatctagaaaaccccactgtctcagcccaaaatctccttaagctgatgagcaacttcagcaaagtctcaggatacaaaatcaatgtgcaaaaatcacaagcattcttatacaccaataacagacaaacagagagccaaatcatgagtggactcccattcacaatcacttcaaagagaataacatacctaggaatccaacttacaagggatgtgaaggacctcttcaaggagaactacaaaccactgctcaaggaaataaaagaggatacaaacaaatggaagaacattccatgctcatgggtaggaagaatcaatatcgtgaaaatggccatactgcccaaggtaatttatagattcaacaccatccccatcaagctaccaatgactttcctcacagaattggaaaaaactactttaaagttcatatggaaccaaaaaagagcccacattgccaagtcaatcttaagccaaaagaacaaagctggaggcatcatgctacctgacttcaaactatactacaaggctacagtaaccaaaacagcatggtactggtaccaaaacagagatatagaccaatggaacagaacagagccctcagaaataatgccgcatatctataactatctgatctttgacaaacctgacaaaaacaagcaatggggaaaggattccctatttaataaatggtgctgggaaaactggctagccatatgtagaaagctgaaactggatcccttccttacaccttatacaaaaattaattcaagatggattaaagacttacatgttagacctaaaaccataaaaaccctagaagaaaacctaggcaataccattcaggacataggcatgggcaaggacttcatgtcgaaaacaccaaaagcaatggcaacaaaagccaaaattgacaaatgggatctcattaaactaaagagcttctgcacagcaaaagaaaccaccatcagagtgaacaggcaacctacagaatgggagaaaatttttgcaacctactcatctgacaaagggctaatatccagaatctacaatgaactcaaacaaatttacaagaaaaaaacaaacaaccccatcaaaaagtgggcaaaggatatgaacagacacttctcagaagaagacatttatgcagccaaaaaacacatgaaaaaatgctcatcatcactggccatcagagaaatgcaaatcaaaaccacaatgagataccatctcacaccagttagaatggtgatcattaaaaagtcaggaaacaataggtgctggagaggatgtggagaaataggaacacttttacactgttggtgggactgtaaactagttcaaccattgtggaagtcggtgtggcaattcctcagggatctagaactagaaataccatttgacccagccatcccattactgggtatatacccagaggattataaaccatgctgctataaagacacatgcacacgtatgtttattgcggcactattcacaatagcaaagacttggaaccaacccaaatgtccaacaatgatagacgggattaagaaaatgtggcacatatacaccatggaatactatgcagccataaaaaaggatgagttcatgtcctttgtagggacatggatgaagctggaaaccatcattctcagcaaactatcgcaaggacagaaaaccaaacaccgcatgttctcactcgtgttacttttgtctcccaaagctatcatactgtgtctggaattggttccttccagtgggttcttggtcttgctgacttcaggagtgaagccgcagaccttcacagactgaagctacagaccttcgcagtgagtgttacagcttttaaaggtagtgcagatgcaaagagtgagcagcagcaagattgtatcgtgaagagtgaaagaacaaagcttccacagtgtggaaggggacccaagcagtttgccactgctggctcggaaagatccacctacgacctcacgtcctcagaccgaccagcccaagaaacatctcagcaatttcaaatccgtgggttcgtggtcttgctggcttcaggagtgaagctgcagaccttcctggtgagtgttacagctcataaaggctgcccagacccaaagagtgaacagcagcaagatttattgcaaagtgtgaaagaacaaggattccacagcatggaaggggacccgagcggattgctgctgctggctcacagaaaagttctccaagtccccacccatcccagaagccgagctggcttcacctctcactggcaccccttgcgggactttgcggcacccagcctgggcactctggcagcccagagggagctggctcctgctgttgcctctccctccacacctccccgtgagcagaaggagccaggctctggccttggccagccccagtga

SEQ ID NO: 126794 - DNA, 369 bp, Homo sapiens
ggtcacagattgatttacagaagaagaagcggcgagcgccagctccccctccaccacagccaccaccaccgagtcccctgatccccaaccgcactgaggataaggaggagaacaggaagagcacgatggtttattgctgtgcgtcattccctactcaggccaagcgcttctgatggacgggcctcttcctgacctcggacctttcccagtgtctcttctgccctggctctgattttcctgttggtcttcctcctttcaggataaaagggctcattgtatacccagaatttacttcctttggggtttacatataaatgcattaataacagagatttgtttgattgaggtttatatttttttgaaggaggc

SEQ ID NO: 126795 - DNA, 1482 bp, Homo sapiens
atggaagtggcaaagaatccaacctttaaagattatccagaagggtccgcagatgcagatgatgatgcagaaccagttggagctgaaatgtctacaggaaccgcactggcagttgtctggagctcacagggtggtgcattcacacagttgcaccaagccatgcacgtgagtattcacagcagcactgttgacagcatccccaggctcaccccaaccgaatccctttccacagtccagcacataaagcgtggtgtattcacaccgagtgccactgcacagcaacgagccacacagcagcggatgagcctcagagcaaaagaagccagatatcatgatacaaagccccaaaacaggcagagccagcctccactcatgccaccaggagagtggctgctgtcaggagagggtggggaatcagaatgttggcccgaggatccttgggtggtactgactgtgagaaacacgcattcacccgtccaaacccaaagaatgggctcggagacacgaaaaacagcagaagcgagacttttaatggcggtcttggaagatcgggcgtcttgtaggcaggcacacccggggcaggtatctcttgggtcacagattgatttacagaagaagaagcggcgagcgccagctccccctccaccacagccaccaccaccgagtcccctgatccccaaccgcactgaggataaggaggagaacaggaagagcacgatgggtggtggacggcaggtgccacaaaagcctcccagaggcactgctcggggtccaccccagttagtgcttcccccacccccgccctaccctcctcccgacacagacgtggtggagcctctcagctttcccggggaaggcgctggttccgaggcctcagacccgatacccaaacagatgtcagctaggagccagtgttctcatattagaatgaacctcagagtgtctgtagagagagacagctgtccggcacagccgtcgtgtgatctggatggtgggctaactcaggcaggctgtgggcacacctgtagagatcgcactcaagagctgggaggacgtccttcagcagtggaacctccccacctgctgcccttagacctttggacaggtctgagccggaaggagagcgaagtggcggagagaaaaccagactcaccttcgtcttgccttgtggctccatttcctccttgtgccctcttgccaactccataccagttcattcccccaggaatagaatatggcaaaggtagtgggatgtcacttcttacatccaagattagggttgaaaaggactgtggtctccatcttgggcaccctcgctcacttgctcactctgaggaaagccagccaccacgctgtgagctgctctacggagacccacatggcaaggagctgagggagacttcagccaactgccagcgaggcgctgaggccctttgtccactgatcatgagcctagaaacctgccaacagccacttgagtga

SEQ ID NO: 126796 - DNA, 924 bp, Homo sapiens
atgacaaaatctccaaaagcaattgcaacaaaaacaaaaattgacaaatgggatctaattaaactaaagagcttctgcacaacagaagaaacaataatcagagtgaaaaggaaacctacagagtgggagaaaagttctgaaatctacccatctgacaaaggtctaatatccagaatctacagccagggtgggaatgtcggatatgcaggtcctcctgatcaggcagatgtggtgatgagtatgactactgatgacaatgtaaaaatgttttcagtgtgtgcattggctcctagtcagctgagcccaggggtcttaaaaccaaatgaaatgacaactaagaaaaaagagttaaaatctgtgaggactctggaaaacaagaaaggaggacttcagaagaactacaaacaaaaatactgcaagaagggaaaaagattgaatcagattctgacgacacagaaaggtttcaatgttaaccacttggatatcgctccaagatatgccagtatcttaatgggcatttcgaatggtgttggcacattgtcaggaatggtttgtcctatcattgttggtgcaatgacaaagaataagtcacgtgaagagtggcagtatgtcttcctgatcgctgccctagtccactatggtggagttatattttatgcaatatttgcctcaggagagaaacaaccctgggcagacccggaggaaacaagtgaagaaaaatgtggatttattcatgaagatgaactcgatgaagaaacaggggacattactcaaaattatataaattatggtaccaccaagtcttatggtgccacaacacaggctaatggaggttggcctagtggttgggaaaagaaagaggaatttgtacaaggagaagtacaagactcacatagctataaggaccgagttgattattcataa

SEQ ID NO: 126797 - DNA, 801 bp, Homo sapiens
atggagaaggaggcagtgtccgtgactgtgctgctctccgcagccccctgcctgctgtcctgtttcctcggctcctcggtgtctggactggcgttctgggtttcccagcagaaaactaaagggccagagaggtgtaaaaacacacaccacttggcaggaacaggaaatatagtggtcattatgattagctatccaaaaggaagagaaattttggagctggtgcaaaaaggaattccagtaacgatgaccataggggttggcacccggcatgtacaggagttcatcagcgcttcctggacactgttgttaaatcagaaagacctgcccgaagccgctcttgaacgccgactcttccgctttccgggtacccgtcttttgtccgcggcgatgagagagcggccagacgcccagctcgcccctcgccgggcatcagcctcgctcccctccccgtctatcccggcccgaggggccctggcgccggctcgctccgtccccgcggccgtaaagcgcgctgttacacgactgcgtcgcaaacaaaacacgtcggggaaaccagaccgccgcggagagggacagcgcccagcgaaagcgaggctgatggagcgaagccaggaagaggatgcggagacgcggggagagcccggggactgcatgcgtctgcgcagctgcgaggttaagccgccctttggcggtccccaggacggttcctggtgccagacggtcccacccctcatttccttccccatatttggcaaccagaccagcatccaggacaacataaactatgccactggttgttag

SEQ ID NO: 126798 - DNA, 1708 bp, Homo sapiens
gggctgcgcgcccgacacgcgcttcttcgtgcccgagcccggcggccgaggggccgcgccctgggtcgccctggtggctcgtgggggctgcaccttcaaggacaaggtgctggtggcggcgcggaggaacgcctcggccgtcgtcctctacaatgaggagcgctacgggaacatcaccttgcccatgtctcacgcgggaacaggaaatatagtggtcattatgattagctatccaaaaggaagagaaattttggagctggtgcaaaaaggaattccagtaacgatgaccataggggttggcacccggcatgtacaggagttcatcagcggtcagtctgtggtgtttgtggccattgccttcatcaccatgatgattatctcgttagcctggctaatattttactatatacagcgtttcctatatactggctctcagattggaagtcagagccatagaaaagaaactaagaaagttattggccagcttctacttcatactgtaaagcatggagaaaagggaattgatgttgatgctgaaaattgtgcagtgtgtattgaaaatttcaaagtaaaggatattattagaattctgccatgcaagcatatttttcatagaatatgcattgacccatggcttttggatcaccgaacatgtccaatgtgtaaacttgatgtcatcaaagccctaggatattggggagaagcctgggggatgtacaggagatgcctcctgccagaatctcctcctgggaagggatccagctggcaaatttgagtctagctttaccagatgatgacgggaagtggatggacaggcagtcccacccttcagccttccccttgctggattcttgaggccacagtgttgattccccagctttcaaaggagatgcaggagaaaatacggcattgctagaagccggcaggagtgactctcggcatgggaggacccatctcctagcacacgtgcccacttgaagtggcaccaacagaagtttggcttgaactaaaggacattttatttttttttactttagcacataatttgtatatttgaaaataatgtatattattttacctatttagattcttgattttgattattacaaaggactaaggatattttcttcttggaaggagacttttccgattagtcctcatatatttatctacttaaaataggagtgtttaccatgaacagtgtgtttgctttcagactatttacaaggacaactgggggcaggtactctaaatataaaggaccaggtggtgtttcctaaataattggctgcctatggttctgtaaaaacccagttaattctatttttcaaggtttttggcaaagcacatcaatgttagactagttgaaagtggaattggataattccaattccgataattggtccccatggggctttcccctggaggaaaggttttttttgttgtttttttttttaagaacttgaaacttgtaaactgagatgtctgtagcttttttgcccatctgtagtgtatgtgaagatttcaaaacctgagagcactttttctttgtttagaattatgagaaaggcactagatgactttaggatttgcatttttccctttattgcctcatttcttgtgacgccttgttggggagggaaatctgtttattttttcctacaaataaaaagctaagattctatatcgcaaaaaaaaaaaaaaaaaa

SEQ ID NO: 126799 - DNA, 489 bp, Homo sapiens
  misc_feature (1)...(489): n = a,t,c or g
taggcctttgtgggtcacattaaggagcccccactcctccctccgcctcnccggccattggaccgtgcgggcagaacccgtggactggacccacggcctcagccgaaacgcgtcccgggcgcggaaaccctcggccgccgtggaaccttcccgggaagctctccccgcgcgggtgaaatgcgtccgaagacagggaaccgcttcccggagccgctgggaaggaggacggtacggaggcccgggagaccctcggcgcatgtccgcgaacgatgagtatgaggaagatgtagcccctcaccgttggggcacggcgcttggaaggtgcggcaaaggactctgtctatcccctcgggcagggtatctcgagtaagtcacctcggcctccttagaaatgcttcaggtgacgggtctgccttccctccgagtactgcgagctgccgggcatcgcaggaactcgtgaacctggcgtggtctgcgcctcccctagct

SEQ ID NO: 126800 - DNA, 988 bp, Homo sapiens
cccacgcgtccggtgtgaataaagtaaatgagctggagggggcgggacaagatttcaaaaagcaccactcatacacccaggactggcaaagctgctggcagtaagctctatcatggggctcccccactgcaggtgagctgattggcctcagctggcaccatccatgctcagtgtttgccctgaggacaagaagacatggcaaaaaagaggaaagtacagaacacactcccacctggctggtggggatatagatagtgcagctgctgtggaaaccttcagctccacagaaagaggaatatcagagctgctggtgttattgatgcttctggtgttactactggaaactgtgtccagcccaaagcgacatcagagggcctggcacagcaactacgaccccatcctgtcccagtcctgcggcacatctccaatggctcccactgccaagggcatgccccagccgtgcatcaaagacctccccctggaatcatacgcagatctcctgccctcctccaactctgccctggcacacgccgccccccacctggcatcctctgctcacctccgcctccccggccattggaccgtgcgggcagaacccgtggactggacccacggcctcagccgaaacgcgtcccgggcgcggaaaccctcggccgccgtggaaccttcccgggaagctctccccgcgcggatcctacaaccaggattctgtgttgggggccaagatgccctgctgaagcctctattccctgaggctgcttcgcaggagatagacctcctgacaaggctttcgatgtgcagacacccaaaggatggagaaagggagtggaacagtcccagcatccctgaagcagatgcagtggaggcagaaaggcaccaggctctgccgtggccgcttcctcctgaccgactacaaggccgcacttccgggccgttaccccggcggaacggaggcctgcggtcgcggcggcgcaggggaaacccctag

SEQ ID NO: 126801 - DNA, 3232 bp, Homo sapiens
atgcacacgttctctcagttgcagaagctgaagggcctgcagccgcccgtggtagtgctccggaacaagatcaagccctgcttaaccattgactcgtcgccgctgtcagcagacctgaagaagcctctcgcagtcatcgtgtgccctgggtggaagaaggcccaatttatttttgaattattgggagaatatagcatgtcctccaggcctcttcatcctgtgctattaacaattgggctccataaagaggaagccaaaaatacaaagcttccaaggggctgtgatgtgattgttacgaccccatacagcctgctgaggcttctcgcctgtcagagcctgctgttcctcaggctctgccacctgatcctggatgaggtagaggtgctattcttggaagccaatgaacagatgtttgctatattagataactttaaaaaaaatattgaagttgaagaaagggaatctgcaccacatcagattgttgcagttggagttcattggaacaaacatatagaacatctcatcaaagagttcatgaatgatccctacattgtgatcacagccatggaagaggctgctctctatggcaatgtccaacaggtagtagaaagcagttcaatattttgcttgaagatgcataaagaaatgatttttaacttacaaaatgttttagaacagtggaagaagaagttaagttctggctctcaaattatattagccctcacagacgactgcgtcccactcttggccatcaccgatgccacgtgtgtgattcacttcagtttccctgcctcaccaaaagtttttggtggacgcctgtattgcatgtctgatcattttcacgctgaacagggttctcctgcagaacagggagataagaaagccaaatctgtcttgctgctgacggagaaagatgcgagccatgcggtgggcgtcctgcgctacttggagcgagcggacgccaaggtccccgcagagctgtacgagttcaccgcaggagttctggaagccaaagaagataagaaagccggaaggcctctttgtccatatctgaaggcttttggtttttgcaaagacaaaaggatctgtcctgaccgacaccgtattaatccagaaacggacttgcccaggaaactgtccagccaagccctaccttcatttggatacattaaaataatacctttttatattttgaatgcaacaaattactttggccgtatagttgataaacacatggatctttatgcaactctcaatgctgaaatgaatgagtattttaaggattctaataaaacaactgtggaaaaggtggagaagtttggattgtatggattagcagaaaaaacgctttttcacagggttcaggtgttggaagtgaaccaaaaagaagacgcctgggccctggatgacatccttgtagagttcatcgatgaaggcaggacggggctcgtcacaagggaccagctgctgcatctcccagaacatttccacacacttcccccgcaggctgtggagtttattgtctgtagggtgaaacctgctgacaacgaaatagaatggaatccgaaggttactaggtacattcatcataaaattgttggaaaattgcatgatgcaaaagtgatcctggctttgggaaatacagtttggattgatccaatggtgcacattacaaacctttccagtttaaaaacctctgtcattgattataatgttcgagctgaaattttgtccatgggcatgggcattgataatccagaacacatagaacaactgaaaaaattacgcgaagatgctaagataccagcttgtgaagaaagcctaagccagaccccggagcttaacatacccgtggtcacgaacacagagcatacagcactgcgaggtttcacagagagcctgctagaagagaccccatatcagacagctcctggagaacaggggatcctgacaggcttgaattgtctcttcaaagatgtacaaaaactgagtcacattgtcacccacgaggaagggagctggctggctggggagcaggggacgcctccagcagaagatgctgcttgcctgcagagcccccagcctgaggacacgggtgcagaaggaggggctgagtccaagacgagctcagaaaaccagaagcctggttcttcatcacagtcccatgtgctgctcttgctggccgtgactgtggctggtgaggtgagaggtgcaggtgaggagaaaggatcttccggagccgagtgggtttctggtatttggacagtcagtgtctccatgtggctagaaaagtatgatgcatccattgtgctgccacacgctggatctgccagccctgctgcagctggtcggtctcaggtggaccccgtgccctcctctgcagacgtgacacccgcatgccactgtgccaggcagggcttctggaggacgcagaaccccaacgtggcttttgattttgatcactgggaagactgtgaagaggacagccacttccccaaggtagtgaattctaaaaacctgccgtacacagtgacagaggtggttgaagacagtagcagcacttcagaggatgacgacagtgagagtgaaagagaaggctcttgggaagtagaaagttctggtgtttttgctggtgaaggttttgactgtggagctcttctaacacccatatcagtgtctgtttctctgcatgtggctgctgccctgttggtggagctctgggggcagagaccaggccgccgtccagtggcgccccgtgcgcaccagctgcctgctgtttacacccagagtccttcccccgaccagggctacaagaagcaggcagcactgaagctgggggacatcagtcaccgtctgctggagcagcaggaggacttcgccggcaagacagcccagtaccggcaggagatgcggcacctgcaccaggtgctgaaggacaagcaggaggtgctggaccaggcgctgcagcagaacagagaaatggaaggtgaacttgaagttatttgggaatctaccttcagggaaaaccgaagaatccgagaacttctccaggacacactcacgaggacaggcgtgcaggacaaccccagagctctggttgcccccagcctcaatggcgtctctcaggcagacctgctggacggctgcgatgtctgctcctatgacctgaagtctcatgcccccacctgctagaatctgcgggagcccgtggtgtagcctcctctggcctgag

SEQ ID NO: 126802 - DNA, 2576 bp, Homo sapiens
ccacgcgtccgccggctgcacggtcgcaccggcagcggctcaggctccggctcctctcccgctgcagcagccgcgctgccggccccactgggctcggatccggccccggccccctcggcaccgcctgctctggccccggccccggccccgcggaccatgcgctgggcgcccccaggggaaacccgacccggccaagggcccgcaaagacgaggctcccgggccggggcccctcccggccgcccagctctcggccggcgccctgccccgcgtcccggagccgcgtgagcctgcggggccatggagcgcgcgccgcccgacgggccgctgaacgcttcgggggcgctggcgggcgatgcggcggcggcgggcggggcgcgcggcttctcggcagcctggaccgcggtgctggccgcgctcatggcgctgctcatcgtggccacggtgctgggcaacgcgctggtcatgctcgccttcgtggccgactcgagcctccgcacccagaacaacttcttcctgctcaacctcgccatctccgacttcctcgtcggcgccttctgcatcccactgtatgtaccctacgtgctgacaggccgctggaccttcggccggggcctctgcaagctgtggctggtagtggactacctgctgtgcacctcctctgccttcaacatcgtgctcatcagctacgaccgcttcctgtcggtcacccgagcggtctcataccgggcccagcagggtgacacgcggcgggcagtgcggaagatgctgctggtgtgggtgctggccttcctgctgtacggaccagccatcctgagctgggagtacctgtccgggggcagctccatccccgagggccactgctatgccgagttcttctacaactggtacttcctcatcacggcttccaccctggagttctttacgcccttcctcagcgtcaccttctttaacctcagcatctacctgaacatccagaggcgcacccgcctccggctggatggggctcgagaggcagccggccccgagccccctcccgaggcccagccctcaccacccccaccgcctggctgctggggctgctggcagaaggggcacggggaggccatgccgctgcacaggtatggggtgggtgaggcggccgtaggcgctgaggccggggaggcgaccctcgggggtggcggtgggggcggctccgtggcttcacccacctccagctccggcagctcctcgaggggcactgagaggccgcgctcactcaagaggggctccaagccgtcggcgtcctcggcctcgctggagaagcgcatgaagatggtgtcccagagcttcacccagcgctttcggctggctcagggacaggaaagaggccaagtcgctggccgtcatcgtgagcatctttgggctctgctgggccccatacacgctgctgatgatcatccgggccgcctgccatggccactgcgtccctgactactggtacgaaacctccttctggctcctgtgggccaactcggctgtcaaccctgtcctctaccctctgtgccaccacagcttccgccgggccttcaccaagctgctctgcccccagaagctcaaaatccagccccacagctccctggagcactgctggaagtgagtggcccaccagagcctccctcagccacgcctctctcagcccaggtctcctgggcatctggccctgctgccccctacccggctcgttcccccaggggtgagccccgccgtgtctgtggccctctcttaatgccacggcagccaccctgccatggaggcgccttcctgggttggccagagggcccctcactggctggactggaggctgggtggccggccctgccccccacattctggctccaccggggagggacagtctggaggtcccagacatgctgcccaccccctgctggtgcccacccttcgcagttactggttggtgttcttcccaaagcaagcacctgggtgtgctccaggcttcctgccctagcagtttgcctctgcacgtgcacacacctgcacacccctgcacacacctgcacaccgtccctctccccggacaagcccaggacactgcctttgctgccttctgtctcttgcataagcctcaggcctggccctttcacccctcttcccaccaactctctctgcccccaaaagtgtcaaggggccctaggaacctcgaagctgttctctgcttttccattctgggtgttttcagaaagatgaagaagaaaacatgtctgtgaacttgatgttcgtgggatgtttaatcaagagagacaaaattgctgaggagctcagggctggattggcaggtgtgggctcccacgccctcctccctccgctaaggcttccggctgagctgtgccagctgcttctgcccaccccgcctctgggctcacaccagccctggtggccaagcctgccccggccactctgtttgctcacccaggacctctgggggttgttgggaggagggggcccggctgggcccgagggtcccaaggcgtgcaggggcggtccagaggaggtgcccgggcaggggccgcttctcctt

SEQ ID NO: 126803 - DNA, 2145 bp, Homo sapiens
atggagcgcgcgccgcccgacgggccgctgaacgcttcgggggcgctggcgggcgaggcggcggcggcgggcggggcgcgcggcttctcggcagcctggaccgcggtgctggccgcgctcatggcgctgctcatcgtggccacggtgctgggcaacgcgctggtcatgctcgccttcgtggccgactcgagcctccgcacccagaacaacttcttcctgctcaacctcgccatctccgacttcctcgtcggtaaatccccagcccctggccgctggggacccaggggcgcccagcgtggccgggccagcggggactggaacacggacctgggcccaggggacacagatagtgctgggagctatgtgggggtgaaggctggcggcagggcagagtttgtggctgacaccaggtggaggggtggcgccttctgcatcccactgtatgtaccctacgtgctgacaggccgctggaccttcggccggggcctctgcaagctgtggctggtagtggactacctgctgtgcacctcctctgccttcaacatcgtgctcatcagctacgaccgcttcctgtcggtcacccgagcggtctcataccgggcccagcagggtgacacgcggcgggcagtgcggaagatgctgctggtgtgggtgctggccttcctgctgtacggaccagccatcctgagctgggagtacctgtccgggggcagctccatccccgagggccactgctatgccgagttcttctacaactggtacttcctcatcacggcttccaccctggagttctttacgcccttcctcagcgtcaccttctttaacctcagcatctacctgaacatccagaggcgcacccgcctccggctggatggggctcgagaggcagccggccccgagccccctcccgaggcccagccctcaccacccccaccgcctggctgctggggctgctggcagaaggggcacggggaggccatgccgctgcacaggtatggggtgggtgaggcggccgtaggcgctgaggccggggaggcgaccctcgggggtggcggtgggggcggctccgtggcttcacccacctccagctccggcagctcctcgaggggcactgagaggccgcgctcactcaagaggggctccaagccgtcggcgtcctcggcctcgctggagaagcgcatgaagatggtgtcccagagcttcacccagcgctttcggctgtctcgggacaggaaagtggccaagtcgctggccgtcatcgtgagcatctttgggctctgctgggccccatacacgctgctgatgatcatccgggccgcctgccatggccactgcgtccctgactactggtacgaaacctccttctggctcctgtgggccaactcggctgtcaaccctgtcctctaccctctgtgccaccacagcttccgccgggccttcaccaagctgctctgcccccagaagctcaaaatccagccccacagctccctggagcactgctggaagtctcctgggcatctggccctgctgccccctacccggctcgttcccccagggaaagatgaagaagaaaacatgtctgtgaacttgatgttcctgggatgtttaatcaagagagacaaaattgctgaggagctcagggctggattggcagaatgggctcggccacgctcgggggtggatggagcagcggttgcagagattgagcaagagcaccaggaggggacagtcccaggagggctggggtggttgcagcccgaacattccatggagcctccaggagctcgccagagggcagtgggctcccgacgccttgacttttcctctttcgagattgttgtagattccatgctgttgggtgcaacactacagagaccccacgtgccctttatcggcttcccccacagggaagcttgggtggacgccatgcacgcagagctgcaccccgcccccgccaagcactgccgcaccccgcggctctgcagcctctttagcggcaccaggacaggtccccggcacgtgtgttcactgatgagacgctccggttgcctcagcatgtctgcccttcaggcctccatcccggggccagcgccgacccgggcactgcatacagacaaacgaggtctctgttctccaggagcttag

SEQ ID NO: 126804 - DNA, 711 bp, Homo sapiens
cagtgtggtggaattcggacctgatggtcataaaccgctccaccaccgagctgcccctcaccgtgtcctacgacaaggtctcactggggcggctgcgcttctggatccacatgcaggacgccgtgtactccctgcagcagttcgggttttcagagaaagatgctgatgaggtgaaaggaatttttgtagataccaacttatacttcctggcgctgaccttctttgtcgcagcgttccatcttctctttgatttcctggcctttaaaaatgacatcagtttctggaagaagaagaagagcatgatcggcatgtccaccaaggcagtgctctggcgctgcttcagcaccgtggtcatctttctgttcctgctggacgagcagacgagcctgctggtgctggtcccggcgggtgtttgggagccgccattgagctgtgggaaagttgaaggaaggcatttgaaggtggactattttttggagaggcctgatgcccgaatttcagtttggcacttacagcgaatctgagaggaaaaccgaggagtacgatactcaggccatgaagtacttgtcatacctgctgtaccctctctgtgtcggaggtgctgtctattcactcctgaatatcaaatataagagctggtactcctggttaatcaacagcttcgtcaacggggtctatgcctttggtttcctcttcatgctgccccagctg

SEQ ID NO: 126805 - DNA, 2028 bp, Homo sapiens
atggaacggggtgcagtggggtgttcgtggtcctgctgccgttggctgggcgcagccatccctgccggctcccccgcgcctgtgccccgggccctactgcacctgcacgggcggggctctggggccggcgcggggagtgaggccgccggtctcctctgctgtggtcggtgtgggggccggcggggcgcagagctgctcacccggctgactcccccttctgccctgctggcctctgagccggttctctggggcctctgtgagcgccttgtgccccccacacccgccgtgagtaccgtgtctctctgctcagccaggcccacaccaggatgccggcgcgtgccatctttacacgggctgcacctgtgccgtctgagccaggtggtgctgcggtttccgtcggtctcgttctgcctgcacctggacaccatttgtccagagtgcacattgcagcttctctttgatttcctggcctttaaaaatgacatcagtttctggaagaagaagaagagcatgatcggcatgtccaccaagtgcagcccgaccatcctgtccccagtgctctggcgctgcttcagcaccgtggtcatctttctgttcctgctggacgagcagacgagcctgctggtgctggtcccggcgggtgttggagccgccattgagtgttctggaagctgtgggatggcaggcagtgggtgtaaaggctttgaacaagtggagagcaaggaaatgcgtgttcgggtggtatcagctcatgaggctctgtccaccaagcagtggccaggtccctgctggaagcggctgcatcttcctgtcagccctggtttccatggtgactggcgtcacgctgccacccgagtatggctgaccttcctgcagagagaggagccgcagtcttttgcttgtggaaggagacgctgggctgtgcgaagttggtgggttcttagtctcgtcttcaagaatgaagccgcagaccctcgcggtacatgttacggttacctaaaaacggtgtgtctggagtttgttccttctggtgcgttcgtggtctacactgatttcaggagtgaaactgcaaacctccgcggtgcctcgtggacacacagcagatgcttctcgggcaagggctcagacgctgcccaccccacccgtgatagctcagcaaaccaaccagcacctgctggcctgcccaacctggggcgcaaggcggccacccaggccccgcgccggcccaaacaaacggcgggcggccttcccaccccctttggccccccccttggcgccggccccacgtggccgagcgcggcgcaagcttgggctgcagagttcccccacggcccctctgcctccgtttggattgacgcggccacccaggtgtgcttctccctgggcgtggggttcggggtgctgatcgccttctccagctacaacaagttcaccaacaactgctacaggtgggtgctccaccaggaacctgcagtgagcccagcaccagtgggctgtggggaccttgagtccacctgggccgtctttatgctccaggagcccatgaaggggcaaggacgtgcgggagtcattgctgtggaagggggaacacagctggcaccaaatgaatgccctgagctcggcggcaggcctgtgaggcaaggtcgcctaagtggggagggccgatggaaccggaagtattctgagcatccaagagcacctggaggaagagttcaccttcttcctttcgatggcgaggacggcattctgcagacgtggaagacttacaccctcggaagccaaaaccacaaagcaggattccttcggagaggaaagatgaaccctaaaattggggttttgaccggttctggagactggaaatccaacatcaaggcagctgattcagttcctggtgaggcctctcttcctggcttgcagatggccgccttcttactctatcttcacatggcagaaagtaaaatggagagagcttcctcttcttataaggccacagtcctcctgggttatgaccccacccttacaatttaa

SEQ ID NO: 126806 - DNA, 770 bp, Homo sapiens
gatgggtttctaattctgtcataaaaaatgatgaaacaaggtgatgtcagaaggaactcgaggtaacaccaaaataccccatccagggcctggaagcccctctgcctttgactgtaagatggggcaggacccccgctctcagtgggatgtgcccgcgaccctggcgctgggagacagtgctgcagagaggagtggtgtccgcacggctgtcaccagacatcctcatcaccctccgcaccgcacagcccagcgtctccttccacaagcaaaagactgcggctcctctctctgccaggaaggtcagccatactcgggtggctgcgtgacgacagtcaccatggaaaccagggctggacaggaagatgccagccccttccagcagggaccctggcctgagggcaaagggaggagcggcactggcggcggctgcctttgcgcttccagctcgggccctgctcatttgaacaatatccaacctcggactggagtttaggctacagtgaaatggattacgttatgccgaaacagaaacatcaaactgccaacgtttataaaaaaagaggggactggaaaagcgcctaagaaaagcagaaaaagtgttttggggctaggcccttgagttcacacctccccaggggacccagcggaaggagagggattacctgctggagagaggcctgatggaaatttaagtcaaagcccaaacagcctcagattctatattaaaaaaaaaaaggcctataaataaatatcctttgactctaaaagga

SEQ ID NO: 126807 - DNA, 918 bp, Homo sapiens
  misc_feature (1)...(918): n = a,t,c or g
ccttttagcgtggtggaattcgtgaggagacacgcaggaagattgtgattctgggagacaactggaagcatgagctgacaaaattcatcagccccgaccagctgcctgtggagtttggggggaccatgactgaccccgatggcaaccccaagtgcctgaccaagatcaactatgggggtgaggtgcccaagagctactacctgtgcgagcaggtgaggctgcagtatgagcacacgaggtccgtgggccgcggctcctccctgcaggtggagaacgagatcctgttcccgggctgtgtgctcaggtggcagtttgcttcagatggtggggacatcggctttggggttttcctgaagaccaagatgggggagcagcagagtgctagggagatgacggaggtgctgcccagccagcgctacaatgcccacatggtgcctgaggatgggagcctcacctgcctccaggctggcgtctatgtcctgcgcttcgacaacacctacagccggatgcatgccaagaagctcagctacactgtggaggtgctgcttcccgacaaggcctctgaggagacgctgcagagtctcaaggcgatgagaccctccccaacacagctcacctggcacagtggccaagcaggaaggggccaccagtgcatagcccatgctgaagattcagacaggaacctctttccctgttcccagaagaatgcggctgagaatgagaacgcttgagatgatccaatccactgaggatgggtccttgctgcagaagcttgcccttcacccatcttgacaggatccaacccacccaggactcaacccatgccctgggggttcaagcttcaggggggtgggcgtggntttctaaggccttgtggacaataacaagcttcaggccctgaagaagcaaaaaaaccct

SEQ ID NO: 126808 - DNA, 753 bp, Homo sapiens
ccgggtcgacgatttcgaataaagaccctgcttctccctggctcgtcctctactcgggcactacccctggcctgaccctggtgagcctgcacacgcacgggcaatgccttgggtcctagaccgtgggctgggagccacataaaggtcttgggtactcttaggagtaggtgcccgggggagcacgcccaggacatatcaggttccctcaccaagcttagccccctctgccctctgttgagtctcctgagtccctttggagtccctctcttgctcccatgcagacaactggaagcaggagctgacaaaattcatcagccccgaccagctgcctgtggagtttggggggaccatgactgaccccgatggcaaccccaagtgcctgaccaagatcaactatgggggtgaggtgcccaagagctactacctgtgcaagcaggtgaggctgcagtatgagcacacgaggtccgtgggccgcggctcctccctgcaggtggagaacgagatcctgttcccgggctgtgggctcagatgtcctgaggttttacaacacctacagcctggttcattctaaacgcatcagctacaccgtggaggtactgctcccagaccaaaccttcatggagaagatggagaaattctaggtgaacctcatggtccccacaccctcctctttgatctctgaatccacaatgagttcacagccttccctggccagaccctgttcaacctctcaggaacagggattctacaaca

SEQ ID NO: 126809 - DNA, 1638 bp, Homo sapiens
atgagcagccgagtcggggacctgagcccccagcagcaggaagcgctggccaggttccgggagaacctccaggacctgctgcccatactgcccaatgctgatgactacttcctcctgcgctggctgcgagctcgaaactttgacctgcagaaatccgaagacatgctccgaaggcacatggagttccggaagcaacaagacctggacaacattgtcacatggcagccccctgaggtcatccagctgtatgactcgggtggtctttgtggctacgactacgaaggctgccctgtgtacttcaacatcattgggtccctcgaccccaagggtctcctgctgtcagcctccaagcaggatatgatccggaagcgcatcaaagtctgtgagctgctgttgcatgagtgtgagctgcaaactcagaagctgggcaggaagatcgagatggcgctgatggtgtttgacatggaggggctgagcctgaaacacctgtggaagccagctgtggaggtctaccagcagcttctcaagagatttacatgtgtttcagccccaaaactgttccccgtggccttcaacttggtcaagtcgttcatgagtgaggagacacgcaggaagattgtgattctgggagacaactggaagcaggagctgacaaaattcatcagccccgaccagctgcctgtggagtttggggggaccatgactgaccccgatggcaaccccaagtgcctgaccaagatcaactatgggggtgaggtgcccaagagctactacctgtgcgagcaggtgaggctgcagtatgagcacacgaggtccgtgggccgcggctcctccctgcaggtggagaacgagatcctgttcccgggctgtgtgctcaggtggcagtttgcttcagatggtggggacatcggctttggggttttcctgaagaccaagatgggggagcagcagagtgctagggagatgacggaggtgctgcccagccagcgctacaatgcccacatggtgcctgaggatgggagcctcacctgcctccaggctggcgtctatgtcctgcgcttcgacaacacctacagccggatgcatgccaagaagctcaacttccacccggggaggtgctggcttcccgacaaggcctgtgaggagacgctgcaaagtctcaagccgatggagaccctccccaacacagtgaagacccccagccacttttacctgggggactccaacccttttacacccacccttttgacccttgccttcccaggcagggtggtgctggaggtggctgcaaaaagccacttgtcccacgtcaccatttcatctcattgtaggctcacctggcacagtggccaagcaggaaggggccaccagtgcatagcccatgctgaagattcagacaggaacctctttccctgttcccagagaatgcggctgagaatgagaacgctgaagatgatcaatccactgaggatggtcctgcttgcagaacttgccctttacccttcttgacagatccagcacccaggactcaccatgcttgtggtccaacttaaaggggggggcggggtccttaggcttgggacatccaactcaggccttaaaccagaaaccctgtttttcttttggaggcaccagggg

SEQ ID NO: 126810 - DNA, 877 bp, Homo sapiens
atgccagcccgtgagggcagccaggagcggggctgtactctgcaagccacaggggcagagctgcctgacgtcatgggaacacacctcttgcaacagtgtgacccgcatccacaggtggaagtggtcggagaaacagaaggaggagcaagagatgcagaactggagagaatcagcttcctgtctgggtacccacaagacatcttaagttgtgccatgagccagaacccaaggaagaggaaaagacctcggaatgtctctgcacccccagttcatcagatggctcagatgaacatctctgttgagcagatggaaaccagtaaaactcaccaagcaactccactgacctgggggcagatgaagagactagctcacgttgcagaagagaacctgaggtctcagaacaagccgctgaccaccagtaatctaatggtagctatgatggtggtaatctccttggcggtgagtctccccgtagctggggcagatcaaaattacatttattgggcctacattccattcccccactgattaggtctgttacatggttagaccccctggtggaggtttatattaatgatagtgtctggatgcctggaccaacagataactgaggtcctactcatccagaggaggaaggaatgttaatgaatgtttccattggttatcgctttcctcccatctgcctggggccagcagcaggatttttaaattatgataaacaaatttggatggtttatgtccctgcacataatggatcaaaagcctctattcatgcaatcagtggaagaacatttcaatctttggacactattaaataccttgagcatggctatgttatgacacatcgccagattaataaatttaaacctaataagaa

SEQ ID NO: 126811 - DNA, 1446 bp, Homo sapiens
atgggaaaatgcagaatgaagggaatgtacaagaagaaaagacttaagaagaacacagtgtacatggagatggaaaagaacaagaaagaagaaagaaaaaggaggaagaaagagagacaagagagtttgcctgcatcaggtagagattgtaaccagaaagtgattgctggaggttttgtctgtgtccatattatgactgtatcagataaagcctctctcctgggaatcattactagagatacagccatgtactgcagtgtgactataccagtttcagccactgttaatggatttattcctggcaacagatcctgggtctatgatgtgactattttagttttaaactatctctattgttttactgctacacaaacattcttagccaatggtgtcactctatcaaatagagtgtatgtgcagggattgttgattttagaatgggcctgggtccacagtatgacaatttctgtttcaagatttgtggagggatttactcctacagattcagcttggtttggtggtataactgtagctgcactgcagcctttccacactgaggaggaggaggagaagtttcaggatgacatagaaaagtttaataatcaggagtctgctaatcagcaaagtgaactgtcacagtctagttttaaaaagggggagaaatgggaagttatatatcctaacctccaaaaacttatgaaagaaacagtgctacctactgcgcctttaggggaagaatgtcaggcagcaattagacctattaagggaaaggcagatctaaatgaggaaaaatctttaagcgaatacattaaagcctaccatggcattgtggggcacttacataaggccagcctcctagctctggcagtggatgaactaaagattaagagactagctcacattgcagaagagaacctgaggtctcagaacaagccgctgaccaccagtaatctaatgttagctatgatggtggtaatctccttggtgctacagattctgtccagtaaactactgctgaagattcagccttacgccatggagtgtctgtgtcatatacaggctgtgtccaaagatttcctactgcagattcagactgtgcatagtgtgatagtagcagcccgtggcagtatccatggatatcccgctattaattcagcccggttccatagtgtgatggtattggctatggacattgtccaggtatttactgatggacattcaacctgggtccaaggtacaattatggaaggtataggctgtgtccatggaattactgctggagatacagcccgggcccatggtgtgactttggaagttgcagcctctgtgcacagatttaccattggagactcagcttgtgtccacaggataatgctatcagattcagggagtgtacagagatttactgctgaagattcatctggggcccatggtttgattgtataa

SEQ ID NO: 126812 - DNA, 767 bp, Homo sapiens
ccccgatgagctccccggtgcgcgagccgccccagctggaggaggagcggcaggtgcggatcagcgagagcggccagttcagcgacgggctggaggaccgaggcttactagaaagcagcacccgcctgaaacctcacgaagcccagaactacaggaagaaggcattgtgggtgtcctggttctccatcattgtcaccctggccctcgcggtggctgcctttactgtctccgttatgaggtacagcgcctctgcttttgggtttgcatttgatgccatcctggacgtcctgtcatcggcgattgtcctgtggcgttacagcaacgcggccgctgtgcactctgcccatagggagtacatgctgtataatcatggcaccaacatctgctggacttctagtgagggcctgaggatgcttacaatcatggtagaagatgacagtttgttattccattcaccagtagttggacatttaggttatttccagtttttgactattatgaaattagcagctgagaacactggtgtgcaagtcttcgtgtggacgtatgccttcatttctcttggagtagaattgctgaatcctatggtggcccccaagcacatctgccaggtagagtaccatggggaggcctctgccctgagcatcatcacaggggcgcctccagacctggctgagaatagcctctgcttgggcctaggaagaagggcagaagtccaaaggaaaccttgtccagtattgagtggaagtgcgccggagttccactga

SEQ ID NO: 126813 - DNA, 789 bp, Homo sapiens
atgcatgaggatgaaaccaaggggatgacagctgacccactggctctcaccaccaagagagctttggaccagaagctctatgtggatgcagcagataaggaggaaaactgcccctgcttctgcccggagtgcctctcgcagaaattgctcagaagacctcttatgtatcctgaaaagggctccattcaagaagtcatgggcctacctccaagctacctaccaatttcagcaaagtacacagtccttttcctaatgcaagggaggcaggcacttaatctctgcctctatgaagttattcacaagggaaccataaaattgccttgtccccagattgacagcttaatgaacatgtcagcacagggccgatttgcatattgcagtgtgcttcagcacccagagaaactctccacaccacggctgctgcagggtgggggaggggtgacatcagcaattcagagctgttttttctatctcctgagtgcctctttcagcaatttgaagttagaaccaggtactaaaacacctgaaactagtgatcagcagcttcctggagttgggaaagtggactcaagcatgtgcatgcagacagcccaacccaagggaagaatcaaaggagaagtgacgcaagaccccggaagtatgccaacatataaagccaaagttaaacataaaaccaaaccttggaaacaaggtgaagaacagcctgtatgcaacttcagacagggggttaccaaaacaaagctgaagcagttgaccatggacacctcaaaagaatttcggagaacctga

SEQ ID NO: 126814 - DNA, 705 bp, Homo sapiens
cttttttttttttttttttttttttttaaatagcttaagtattttatttgtttgcaactaagcttgttaacactatataatgaaaatgtacaaagaataatgttgcagtttttggttagatttaagtcaaagacattcattaataaggaatcttcgaatgtgaatattccagaaatttctctaagccatctgatcacaacaactgtctctgaatattaccttactttggaaggtattggcatacatttgaattaaactcagaatttttcaaaataagcccctaattaaaaaaactattctatattcaaagtaaaacaatattaatagaactttcctttccagaaacaatgaaggaaacaaggcattttgtaaaatgtggtcctgaacaagtcacagtaayayaataaatgtatacttaacttccacctcctcaaaabcagaggctactttctgttcctcaagccttggaaacaaggtgaagaacagcctatatgcgacttcgggcagggggttgccaaaacaaagctgaagcagttgaccatggacacctcaaaagaatttgggagaacccgaccaaaggatccaaattctatggtttttttttttttttttttgagacgaagtctcgttttgttgcccaggctggagtgcagtggcatgatctgtgctcactgcaaccgccacctccagggttcaagctcgtgc

SEQ ID NO: 126815 - DNA, 1614 bp, Homo sapiens
atgactgactgtaccgggaaaattgggacactgccacctaaatactgtgctgttcccacggttttagcaaacagcacaccaggaaattatatcccacacatggctcagcaggattgcagctcttcaccagcaatggaacaaagctggacagagaatgactttgacaagttgacagaagtagccttcagaaagtcagtaataacaaacttctctgagctaaaggaggatgttcgaacccattgcaagggagctaaaaaccttgaaaacagattagatgaatggctaactaaaataaacagtgtagggaagcccttaaatgacctgaggaagctgaaaaccatggcaagagaactaccaccacatcacacttattccaaaattgaccacatagttggaagtaaagcactcctcagcaaatgtaaaagaacagaaattacaacaaactgtctctcagaccacagtgcaatcaaatttgaactcaggattaagaaactcactcaaaagcacacaactacatggaaactaaacaacctgctcctgaatgactactgggtaaataatgaaatgaaggcagaaataaagatgttctttgaaaccaatgagaacaaagacaaaatgtaccagaatctctgggacacatttaaagcagtgtgtagagggaaattcatagcactaaatgcccacaagagaaagcaggaaagatctaaaatcgacatcctaacatcacaattaaaagaactagagaagcaagagcaaacaaattcaaatgctagcagaaggcaagaaataactaagatcagagcagaactgaaggagataaagatacaagaaactcttcaaaaaatcagtgaatccagcagttggttttttgaaaagatcagcaaaattgatagaccattagcaagattaataaagaagaaaaaagagaagaatcaaatagacacaataaaagttgataaaggggatatcaccactgatcccacagaaatacaaactaccatcagagaatactataaacacctctacgcaaatgaagtagaaaatctagaagaaatggataaattcctggacacatacaccctcccaaggctacaccaggaagaagtcaaatccctaaatagaccaataacaagttctgaaatggaggtagtaattaatagcttaccaaccgaaaaaaaaagcccaggaccagatggattcacagtcaaattctaccagaggtacaaagaggagctgagacacaacaacaacaaaaaagagaattttagaccaatatccctgatgaacatcaatgagaaaatcctcaatagaatactggcaaaccgaatccagcagcacatcaaaaagcttatccactatgatcaagcgtgcttcatccctgggatgcaaggctcgttcaacatacgcaaatcaatacacattatccatcacataaacagaaccaatgacaaaaaccacatgattatctcaatagatgcagaaaaggcctttgacaaaattcaacaggacttcatgctaaaaactctcaataaactaggtattgatggaacgtatctcaaaatagtaagagctacttatgacaaacccacagccagtatcatactgaatgggtaa

SEQ ID NO: 126816 - DNA, 1755 bp, Homo sapiens; identical to SEQ ID NO: 119024

SEQ ID NO: 126817 - DNA, 2112 bp, Homo sapiens
atggggaaaaaacagaacagaaaaactggaaactctaaaatgcagagcgcctctcctcctccaaaggaatgcagttcctcaccagcaatggaacaaagctggatggagaatgactttgacgagctgagagaagaaggcttcagactatcaaattactctgagctacaggaggacattcaaaccaaaggcaaagaagttgaaaactttgaaagaaatttagaagaatgtataagtagaataaccaatacagagaagtgcttaaaggagctgatggagctgaaaaccaaggctcgagaactacgtgaagaatgcagaagcctcaggagccgatgcgatcaactggaagaaagggtatcagcgatggaagacgaaatgaatgaaatgaaactaaaccaggaagaagttgaatctctgaatagaccaataacgggagctgaaattgtggcaataatcaatagtttaccaaccaaaaagagtccaggaccagatggattcacagccgaattctaccagaggtacaaggaggaacagcatataaacagagccaaagacaaaaaccacatgattatctcaatagatgcagaaaaggcctttgacaaaattcaacaacacttcatgctaaaaactctcaataaattaggtattgatgggacgtattttcgcaaatcaataaatgtaatccagcatataaacagagccaaagacaaaaaccacatgattatctcaatagatgcagaaaaggcctttgacaaaattcaacaacccttcatgctaaaaactctcaataaattagacaacatcatcgtatatctcgaaaaccccattgtctcagccccaaatctccttaagctgataagcaacttcagcaaagtctcaggatacaaaatcaatgtacaaaaatcacaagcattcttatacaccaacaacagccaaacagagagccaaatcatgagtgaactcccattcacaattgcttcaaagagaataaaatacctaggaatccaacttacaagggatgtgaaggacctcttcaaggagaactacaaaccactgctcaaggaaataaaagaggatacaaagaaatggaagaacattccatgctcatgggtaggaagaatcaatatcgtgaaaatggccatactgcgcaaggtaatttacagattcaatgccatccccatcaagctaccaatgactttcttcacagaattggaaaaaactactttaaagttcatatggaaccaaaaaagagcccccgtcgccaaggcaatcctaagccaaaagaacaaagctggaggcatcacactacctgacttcaaactatactacaaggctacagtaaccaaaacagcatggtactggtaccaaaacagagatataggtcaatggaacagaacagagccctcagaaataacaccgcatgtctacaactatctgatctttgacaaacctgagaaaaccaagcaatggggaaaggattccctatttaataaatggtgctgggaaaactggctagccatatgtagaaagctgaaactggatcccttccttacaccttatacaaaaatcaattcaagatggattaaagacttaaacgttagacctaaaaccataaaaaccctagaagaaaacctaggcattaccattcaggacataggcatgggcaaggacttcatgtctaaaacaccaaaagcaatggcaacaaaagacaaaattgacaaatgggatctaattaaactaaagagcttctgcacagcaaaagaaactaccatcagagtgaacaggcaacctacggaatgggagaaaacttttgcaacctactcatctgacaaagggctaatatccagaatctacaatgaactcaaactaatttacaagaaaaaaacaaacaaccccatcaaaaagtgggcgaaggacatgaacagacacttctcaaaagaagacatttatgcagccaaaaaacacatgaaaaaatgctcatcatcactggccatcagagaaatgcaaatcaaaaccacagtgagataccatctcacaccagttagaatggcgatcattaaaaagtcaggaaacaacagggacatggatgaagttggaaatcatcattctcagtaa

SEQ ID NO: 126818 - DNA, 1659 bp, Homo sapiens; identical to SEQ ID NO: 119496

SEQ ID NO: 126819 - DNA, 1527 bp, Homo sapiens
atgggagactttaacatcccaatgtcaatattagacagatcaacgagacaggacctcaactcagctctgcaacaagcagacctaatagacatctacagaactctccaccccaaatcaacagaatatacattcttctcagcaccacatcgcacttattctaaaattgaccacataattggaaataaagcactcctcagcaaatgtaaaagaatagaaatcacaacaaactgtctctcagaccacagtgcaatgaaattagaactcaggattaagaagctcactcaaaactgcacaactacatggaaaatgaacaacgtgctcatgaatagctactgggtaaataatgaaatgaaggctgaaataaagatattttttgaaaccaatgagaacaaagacacaacgtatcagaatctctgggacacatttaaagcagtgtgtagagggaaatttagagcacttaatgcccacaagagaaagcaggaaagatctaaaatcgacaccctaacatcacaattaaaagaactggagaagcaagagccaataaattcaaaagccaacagaaggcaagaaataactaagatcaaagcagaactgaaggagatagagacaaaaaaacccttcaaaaaatcagtgaatccaggagctggaatacaaactatcatcagagaatactatgaacacctctatgcaaataaactagaaaatctagaagaaatggataaattcctggacacatacaccctcccaagactaaaccaatcaataggaaaagagggaatcctccctaactcattttatgaggccagcatcatcctgataccaaagcctggcagagacacaacaagaaaagataattttagaccaatatctctgatgaacactgatgtgaaaatcctcaataaaatactggcaaaccgaatccagcagcacatcaaaaagcttatccaccatgatcaagtgggcttcatccctgggatgcaaggctggttcaacatacacaaatcaataaacgtaatccatcacataaacagaaccaatcacaaaaaccacatgattatctcaatagatgcagaaaaggccttcaacaaaattcaacagccctacatgctaaagactctcaataaactaggtattgatggaatgtatctcaaaataataagagctatttatgacaaacacacagccaatattatagtgaatggggaaaaactggaagcattccctttgaaaactggcacaagacaaggatgccctctctcaccactcctattcaacatagtgttggaagttctggccagggccatcaggcaagagaaagaaataaagtgtattcgattaggaaaagtggaagtcaaattgtccctgtttgcagatgtcatgattgtagatttagaaaatcccatcatctcagccccaaatctccttaagctgataagcaatttcagcaaagtctcaggatacaaaatcaatgtgcaaaaaccacaagcattcctatacaccgttaacagacagacagccaaatcatga

SEQ ID NO: 126820 - DNA, 1746 bp, Homo sapiens; identical to SEQ ID NO: 121181

SEQ ID NO: 126821 - DNA, 2853 bp, Homo sapiens; identical to SEQ ID NO: 118426

SEQ ID NO: 126822 - DNA, 1479 bp, Homo sapiens
atgaacatcgatgcaaaaatcctcaataaaatactggcaaaccgaatccagcagcacatcaaaaagcttatccaccatgatcaagtgggcttcatccctgggatgcaaggctggttcaacatacgcaaatcaataaacgtaatctggcatataaacagaaccaaagacaaaaaccacatgattatctcaatagatgcagaaaaggtcttcgacaaaattcaacagcccttcatgctaaaaactctcaacaaattaggtattgatgggacatatctcaaaatactaagagctatttatgacaaacccacagccaatatcatactgaatgggcaaaaactggaagcattccctttgaaaactggcacaagacagggatgccctctctcaccactcctattcaacatagtgttggaagttctggccagggcaatcaggcaggagaaagaaataaagggtattcaattaggaaaagaggaagtcaaaccgtccctgtttgcagatgacgtgattgtatatttagaaaaccccatcatctcagtccaaaatctccttaagctgataagcaacttcagcaaaaataaaatacctaggaatccaacttacaaggaatgtgaagtacctcttcaaggagaactacaaatcactgctcaacgaaataaaagaggacacaaacaaatggaagaacattccatgctcatggataggaagaatcaatatcgtgaaaatggccatactgcccaagaattggaaaaaactactttaaagttcatatggaaccaaaaaagagtccgcattgccaagtcaatcctaagccaaaagaacaaagctggaggcatcacgctacctgacttcaaactatactacaaggctacagtaaccaaaacagcatgggacatggatgaagctggaaagcatcattctcagcaaactattgcacgggacaaaaaccaaatgctgcatgttctcactcataggtgggaattgaacaatgagaacacttggacccaggaaggggaacatcacacaccggggcttgttgttgtgtgccggcatgagtctgccccaaccctttttcccttaagagaagtgccacgtggaggaatgggaattggctttgtaaatgcccccttaactagtttagaggtcagaaacctgaagagggaacttaaaccactattagatgatccttttggggtcacggatcaaattgaccaatttttaggaccacaagtatacacttgggctgagttaatgtccatcttcagtattctcttttcgagggaggaaagaaccatgatccgcagggctgctatgatagtctgggagcacaaacatcctcccggtcaaaatatccctgcagcagaacaaaaatttctggcccaagacccgcaatgggataataacaatgcagcccaccgagaaaacttgaaagaccttagggaaatgatagttaaagggattcaggaatcagtgccttga

SEQ ID NO: 126823 - DNA, 1932 bp, Homo sapiens
atgaagcaggatgatgcgaaaattaataagtaccttatggaggatagatacggcatcaaagaaagagggcagcaacggtcagaggctggagccactggtgcgcagccatctcagagggactcgataaaatgggaggaaagaaaccagagggaggaggaaggaaggaaggtgggggctcggggcaagcacgcagagctcgctgctccttcaccttccaccctgcaggagcgacatttacatgaaaacagagctgaggacagtagcctccctggacctgaagtcaccatttggcccttctgggctgctgccaatgccagcagcagtatcctaccaccctttcatagccaatggccccttattgtcaggcaggaccttcgagagatcagacaatttatttcagaaaacacttactggagtcttgcaacaagcaaagcattgagggcatacacaggtggggacggggaaaacattctctacgaagactggaaattagaagatgtgaaagttaaaaacagacatctaactacattaaaaagtaacatatttgatggcaaaatataccctaaacaagggctcctctgctatcagcatgcaggaagcctgtgggaacctgcagggcatctgagtaaacctggaaatgatcacagctcctcaccaacaacggaacaaagctggatggagaatgactttgacgagttgacagaagtaggcttcagaaggtcggtaataacaaacgtctccaagctaaaggaggatgttagaacccatcgcaaggaagctaagaaccttgaaaaaatattacatgaatggctaactagaacaaacaaaatacaaactaccatcagagaatactataaacacctctatgcaaatgaactagaaaatctagaagaaatggataaattcctggacacatataccctcccaagactaaaccaggaagaaggtgaatctctgaatagaccaataacaggctctgaaattgaggcaataattaataacctaccaaccaaaaaaagtccaggaccagatggattcactgccaaattctaccagagcaccaacaataaaaaccacatgattatctcaatagatgcagaaaaggccttccacaaaattcaacagcctttcatgctaaaaactctcaataaactaggtattgatggaacttatctcaaaataataagagctatttatgacaaacccacagccaatatcatactgaatgggcaaaaactggaagcattccctttgaaaactggcacaagacagggatgccctctctcaccactcccattcaacatagtgttggaagttctggccagggcaatcaggcaggagaaagaaataaactgtattcaattacacaatgaggaagtcaaattgtctccatttgcagatgacatgattgcatatttagaaaaccccatcgtctcagcccaaaatctccttaagctgataagcaacttcagcaaagtctcaggatacaaaatcaatgtgcaaaaatcacaagcattcctatacaccattaacagacaaactgagagccaaatcatgagtgaactcccattcacaattgctacaaagagaataaagtacctaggaatccaacttacaagggatgtgaagtacctcttcaaggagaactacaaaccactgctcaatgaaataaaagaggatacaaacaaatggaagtacattccatgctcatggataggaagaatcaatatcgtgaaaatggccatactgcccaaagtaatttatagattcaatgccatccccattaagctaccaatgaccctttcttcacagaattggaaaaaaactactttaaagttcatatggaaccaaaaaagagcccgcattgccaagtcaatcctaagcaaaaagaacaaagctggaagcatcatgctacctgacttcaaactatag

SEQ ID NO: 126824 - DNA, 1584 bp, Homo sapiens; identical to SEQ ID NO: 120694

SEQ ID NO: 126825 - DNA, 4542 bp, Homo sapiens
atgggcaggaagaacaggaagctggacagccggcagcacagctacacttccccacagagcaggtcccatgaggaccctgcagctgtcctgcaagccctgagctcgtcgggggtggtcatctaccagtctctggtggcagtgcagagccccctggctgccccaggttgtgacggcagccggtgtgaggtcaggggcctgactgtgggcagcaggtatggcagctggaggctggctggatgcagggacaatgagatggtaaatgcctgccaatcagggtggtgctaccagaacctcacagttcttagaggatggaaggtgctgcttgagatgacaccacaccacacctattccaaaattgaccacatacttggaagtaaagctctcctcagcaaatgtaaaagaacagaaattataacaaactatctctcagatcacagtgcaatgaaacgagaactcaggattaagaatctcactcaaaaccgctcaactacatggaaactgaacaacctgctcctgaatgactactgggtacataacgaaatgaaggcagaaataaagatgttctttgaaaccaacgagaacaaagacacaacataccagaatctctgggacatattcaaagcagtgtgtagagggaaatttatagcactaaatgcccacaagagaaagcaggaaagatccaaaactgacaccctaacatcacaattaaaagaactagaaaagcaagagcaaacacattcaaaagctagcagaaggcaagaaataactaagatcagagcagaactgaaggaaatagagacacaaaaaacccttcaaaaaattaacgaatccaggagctggttttttgaaaggatcaacaaaattgatagaccgctagcaagactaataaagaaaaagagagagaagaatcaaatagacgcaataaaaaatgataaaggggatatcaccaccgatcccacagaaatacaaactaccatcagagaatactacaaacacctctacgcaaataaactagaagatctagaagaaatggataaattcctcaacacatacactctcccaagactaaaccaggaagaagttgaatctctgaatagaccaataacaggagctgaaattgtggcaataatcaatagcttaccaaccaaaaagagtccaggaccagatggattcacagctgaattcaaccagaggtacaaggaggaactggtatcattccttctgaaactattccaatcaatagaaaaagagggaatcctccctaactcacttgatgaggccagcatcatcctgataccaaagccaggcagagacacaaccaaaaaagagaattttagaccaatatccctgatgaacattgatgcgaaaatcctcaataaaatactggcaaaccgaatccagcagcacatcaaaaagcttatccaccacgatcaagtgggcttcatccctgggatgcaaggctggttcaatagatgcaaatcaataaatgtaatccagcatataaacagaaccaatgacaaaaaccacatgattatctcaatagatgcagaaaaggccttcaacaaaattcaacagcccttcatgctaaaaactctcaataaattaggtattgatgggacatatctcaaaataataagagctatttatgacaaacccacagccaatagcatactgaatgggcaaaaactggaagcattccctttgaaaactggcacaagacagggatgccctctctcaccactcctattcaacatagtgttggaagttctggccagggcaatcaggcaggagaaagaaataaagggtattcaattaggaaaagaggaagtcaaattgtccctgtttgcagatgacatgattgtatatctagaaaaccccatggtctcagcccaaaatctccttaagctgataagcaacttcagcaaagtctcaggatgcaaaatcaatgtgcaaaaatcacaagcattcttatacaccaataacagacaaacagagagccaaatcatgagtgaattcccattcacaattgcttcaaagagaataaaatacctaggaatccaacttacaagggaagtgaaggacctcttcaaggagaactacaaaccactgctcaaggaaataaaagaggatacaaacaaatggaagaacattccatgctcatggataggaagaatcaatatcacgaaaatggccatactgcccaaggtaatttatagattcaatgccattcccatcaagctaccaatgactttcttcacagaattggaaaaaactactctaaagttcatatggaaccaaaaaagagcccacattgccaagtcaatcctaagccaaaagaacaaagctggaggcatcacgctacctgacttcaaactatactacaaggctacagtaaccaaaacagcatggaatccatatggagccactaccaccatccctgctctcctactgcataacccaacaggccaaagtgcagtgctcacacctgtaatccgagtgctttgcaaggccatagaggaagatcacttgagctcttcaaggaataaagacttgaatgtgaaacccaaagctataaaagccctggaaggcaacctaggcgacaccctcctggacaaaggaagggacaaagatttcattacaaggacaccaaaagcaattgcaacaaaagcaaaaattgacaaatgggatctaattaaacttaagagcttctgcacagcaaaagaaactatcaacagagcatacagacagcctacagaatgggaggaaatatttgtaaactatccatctgacaacggtctaatatccagcatctcagaacaatctgtgctcctgttctatcccatcactggacggtacatggccatcatacatcccctccagccccggctgtcagccacagccaccaaagtggtcatctgtgtcatctgggtcctggctctcctgctggccttcccccagggctactactcaaccacagagaccatgcccagcagagtcgtgtgcatgatcgaatggccagagcatccgaacaagatttatgagaaagtttcatattttggtcagccttcaggtaatcagccagagatgctagcattgtatactgctctctttccacagcctccattagaggagggaattcactggaggatgctccaggtggtacagctacaagatgcagagcctccatcacctaagttcctgactaaggagaaagattctcctggcctgggcgggacttacactggtaaggagtatcggcgagttgaccatagtgtccctcccatcacactcagacccaatcttgctcagtgccctgtagcaatgtctcggcaaagctcagctaacatgttttggtcacaaactattagtctgcatgaggcagggctgttctttcaggactccccattggctgacccctcccagaagccagaaagcaagggagtcctttggtgtggtccatatagcacccacctggatgcagaagaggataaagacagagaggctctggagagggcagtggctgccaatgccttgaaaccgagtggccatcccatagccacgaagtctagtcacttgggcaaatatgtcatgggccgataccatgaccctagtgtttgtaccaaggctcctgtagctattccttttcttttatggacatacagccccttgaagagccacaaggaatctgtttggaatcttcataatgaaaacttggtggagtttctggaggtaaggtccattagagttacggctcccctaaagagagttgactccagaagttccttactctcatgctattccagtcagcctctagtaattgcgcaaacttcccatggacatgtttccctaccaattaaggattatgtgtcttctgctccagggatctatgaggaagaattgcctatgtcatcaataggaagcactgaggactccacaaaactcccggttctcaggtatcaacttgaactaacagatgactacatcattagaattaatcgactgaagatgaaaggaagaataaaagtgatgtttggatgcgccctgcaggcagtcagaccttatggttatctcctttgttccctgaacattgctgttatcctgttctttttcaagctgcccagatttcataacgctcaaacacacatgttttacaaacaatttgtgcaggaagccacttatgcagaacactttcttcatctctgctctaacgagcagcagctgcatccaggcttgatatggaagacagacagaaatagtggaagaccttgcagagaagagctaattgatgagatctctgcttatcccggcataggtgaaggcagaacaggaagagtgtgtaatgacgacatacagctcatcgataccgtccgaatccctgtgggagttcactggccctgcctgacggtacaggctggtgctatatctccacccctccctcgggtagccctatcagatctgccacgccctggccggctcatccactcactgagaacttccagctgcaagtttctgccctcctggggtctttgctttggtggttaa

SEQ ID NO: 126826 - DNA, 2162 bp, Homo sapiens
atcactgaccttcagtccagcaatttccagtgtcctgcaggctgctgatcccaagatgctcagccacacaaaggtgttgcggccaacctccgctggtgatacccaggcaaacagggttggagtggacctccagcaaactccaacagacctgcagctgagggtcctcactgttagaaagaaaactaacaaacagaaaggacatccacaccaaaaccccatctgtacgtcaccatcatcaaagaccaaagacagatccacgagacagaaagttaacaaggatatccaggacttgaactcagctctgcacaaagcggacctaatagacatctacagaactctccaccccaaatcaacagaatatacattcttcttagcaccacatcacacttattccaaaattgaccacatagttagaagtaaagcactcctcagcaaatgtaaaagcatagaaattataacaaactgtctctcagaccacagtgcaatcaaactacaactcaggattaagaaactcactcaaaaccactcaactacatggaaactggacaacctgctcctgaatgactactgggtacataacgaaatgaaggcagaaataaagatgttctttgaaaccaatgagaacaaagacacaacataccagaatctctgggacacatttaaagcagtgtgtagagggaaatttatagcactaaatgcccacaagagaaagcaggaaagatctaaaatgggtaccctaacatcacaattaaaagaactagagaagcaagagcaaacatattcaaaagctagcagaaggcaagaaataactaagatcagagcagaactgaaggagatagagacacaaaaaacccttcaaaaaaaaatcaatgactccaggagctggtttttggaaaagatcaacaaaattgataaaccgctagcaagactaataaagaagaaaggagagaagaatcaaatagatgcaataaaaaatgataaaggggatctcaccaccgatcccacagaaatacaaactaccatcagagaatactataaacacctctatgcaaataaactagaaaatctagaagaaatggataaattcctgcacccacacaccctctcaagactaaaccaggaagaagttgaatctctgaatagaccaataacaggctctgaaattgaagcaataattaatagcataccaaccaaaaaaaagtccaggaccagatggattcacagccgaattctaccacagcatcatcctgacaccaaagcctggcagagacacaacaaaaaaagagaattttagaccaatatccctgatgaacatcgatgcaaaaatcctcaataaaatactggcaaacggaatccagcagcacatcaaaaagcttatccaccatgatcaagtgggcttcatccctgggatgcaaggctggttcaacatacgcaaatcaacaaatgtaatccatcatataaacagaaccaaagacaaaaaccacatgattatctcaatagatgcagaaaaggcctttgacaaaattcaacagcccttcatgctaaaaactctcaataaactaggtattgatgggacgtatctcaaaataacaagagctatttatgacaaacccacaggcaatatcatatggaatgggcaaaaactggaagtattccctttgaaaactgccacaacacagggatgccctttctcaccactcctattcaacatagtgttggaagttctggccacggcaatcaggcaggagaaagaaataaaggttattcaattaggaaaagaggaagtcaaattgtccctgtttgcagatgacatgattgtatatttagaaaactccatcgtctcaatccaaaatcttcttaagttgataagcaacttcagcaaagtctcaggacacaaaatcaatgtgcaaaaatcacaagcattcttatacaccaataacagacaaacagagagccaaatcatgagtgaactcccattcacaattgcttcaaagagaataaaatacccaggaatccaacttacaagggatgtgaaggacctcttcaaggagaactacaaaccactgctcaacaaaataaaagagaacacaaacaaatggaagaacattccatgctcatggataggaagaatcaatattgtgaaaatggccatattgcccaag

SEQ ID NO: 126827 - DNA, 5445 bp, Homo sapiens
atggggaaaaaacagagcagaaaaactggaaactctaaaaatcagagcgcctctcctcctccaaaggaacgcagctcctcaccagcaatggaacaaagctggatggagaatgactttgatgacttgagagaagaaggcttcagacaatcaaactactctgagctaaaggaggaagttcgaacccatggcaaagaagttaaaaaccttgaaaaaaaattagacgaatggctaactagaataaccaatgcagagaagtccttaaaggacctgatggagctgaaaaccacagcccgagaactacatgatgaatgcacaagcctcaaaagggtatcagtgacggaagatcaaatgaatgaaatgaagcgagaagagaagtttagagaaaaaagaataaaaagaaatgaacaaagcctccaagaaatatgggactatgtgaaaagaccaaatctacacctgattggtgtacctgaaagtgacagggagaatggaaccaagttggaaaacactctgcaggatattatccaagagaacttccccaatctagtaaggcaggccaacattcaaattcaggaaatacagagaacgccacaaagatactcctcgagaagagcaactccaagacacataattgtcagattcaccaaagttgaaatgaaggaaaaaatgttaagggcagccagagagaaaggtcgggttacccacaaagggaagcccatcagactaacagctgatctcttggcagaaactctacaagccagaagagagtgggggccaatattcaacattcttaaagaaaagaattttcaacccagaatttcatatccagccaaactaagcttcatagacagatcaacgagacagaaagttaacaaggatacccaggaattgaactcagctctgcaccaagcggacctaatagacatctacagaactctccaccccaaatcaacagaatatacattcttttcagcaccacaccacacctattccaaaattgaccacatagttggaagtaaagcactcctcagcaaatgtaaaagaacagaaattataacaaactgtctctcagaccacagcgcaatcaaactagaactcaggattaagaaactcactcgaaaccactcaactacatggaaactgaacaacctgcttctgaatgactactgggtacataatgaaatgaaggcagaaataaagatgttctttgaaaccaacgagaacaaagacaaaacataccagaatctctgggacacattcaaaacagtgtgtagagggaaatttatagcactaaatgcccacaagagaaagcaggaaagatctaaaattgacaccctaacatcacaattaaaaggacttgagaagcaagagcaaacacattcaaaagctagcagaaggcaagaaataactaagatcagagcagaactgaaggaaatagagacacaaaaaacccttcaaaaaatcaacgaatccaggagctggttttttgaaaagatcaacaaaattgatagaccgctagcaagactaataaagaataaaagagaggagaatcaaatagacgcaataaaaaatgataaaggggatatcaccactgatcccacagaaatacaaactgccatcagcgaatactataaacacctctacgcaaataaactggaaaatctagaagaaatggataaattcctcgacacctacaccctcccaagactaaaccaggaagaagttgaatctctgaatagaccaataacaggctctgaaattgaggcaataattaatagcttaccaaccaaaaaaagtccaggaccagatggattcatggccgaattctaccagagggacaaggaggagctggtaccattccttctgaaactgttccaatcaatagaaaaagagggaatcctccctaactcattttatgaggccagcatcatgctgataccaaagcctggcagagacacaacaaaaaaagagaattttagaccaatatccctgatgaacatcgatgcaaaaatcctcaataaaatactggcaaaccgaatccagcagcacatcaaaaagcttatccaccatgatcaagtgggcttcatccctgggatgcaaggctggttcaacttacgcaaatcactaaacgtaatccagcatataaacagaaccaatgacaaaaaccacatgattatctcaatagatgcagaaaaggcctttgacaaaattcaacagcccttcatgctaaaaactctcaataaattaggtattgatgggatgtatctcaaaataataagagctatctatgacagacccacagccaatatcatactgaatgggcaaaaactggaagcattccctttgaaaactggcacaagacagggatgccctctctcaccactcctattcaatatagtgttggaagttctggccagggcaatcaggcaggagaaggaaataaagggtattcaattaggaaaagaggaagtcaaattgtccctgtttgcagatgacatgactgtatatttagaaaacgccatcgtctcagccccaaatctccttaagctgataggcaacttcagcaaagtctcaggatacaaaatcaatgtgcaaaaatcacaagcattcttatacactaataacagacaaacagagagccaaatcatgagtgaactcccattcagaattgcttcaaagagaataaaatacctaggaatccaacttacaagggatgtgaaggacctcttcaagcagaactacaaaccactgctcaatgaaataaaagaggatacaaacaaatggaagaacattccatgctcatgggtaggaagaatcaatatcgtgaaaatggccatactgcccaagctgcagcttggtcttcctctgagagctcaactccaagaggccactgataacactttcataattatagctattgctgcatttgtccttgctgcccctggagccaaggagaaaccagaactcgaagtggcaactattgccagtgaattgggaaaattacacacaaaaggaataagtagatcttcaggtggtaagaaccatgtggtgaacctcaaacagcagaggcaagataaacgagaagagaagaagaaggttaacaaggatatccaggacttgaactcagctctgctccaagcagacctaatagacatctacataactctccaccccaaatcaacagattatacattcttctcagcaacacatcacatttatttcaatactgaccacatagttggaagtaaagcacccatcagcgaatgtaaaagaacagaaatcacaacaaactgtctctcagaccacagtgcaatcaaactagaactcacgattaagaaactcactcaaaacctcacaactacatggaaactgaacaacctgctcctgaatgactactggggcacttttacctgcttcatcaagcagcagggtcccaaccagtaccctttaggccagaggtctacctcctctgctggtagggggcacagttgtggggccttggcagtgcctgatggtgccaaaggtggcaaaacacctaaacattccaaactcttctctgaccagagacatgctagacccaagataagcctcctccagctgggaagatgccagcctcgatttaaccccctccgggccgaaatacaaactaccatcagagaatactacaaacacctctatgcaagtaaactagaaaacctagaagaaatggataaattcctcgacacatacactctcccaagactaaaccaggaagaagttgaatctctgaatagaccaataacaggatctgaaattgtggcaataatcaatagcttaccaaccaaaaagagtccagaaccagatggattcacagccaaattctaccagaggtacaaggaggaattggtaccattccttctgaaactattccaatcaatagaaaaacagggaatcctccctaactcattttatgaggccagcatcatcctgataccaaagcctggcagagacacaaccaaaaaagagaattttagaccaatatccttgatgaacattgatgcaaaaatcctcaataaaatactggcaaaccgaatacagcagcacatcataaagcttatctaccatgatcaagtgggcctcatccctgggatgcaaggctggttcaatatacacaaatcaataaatgtaatccagcatataaacagaaccaaagacaaaaaccacatgattatctcaatagatgcagaaaaggcctttgacaaaattcaacagcccttcatgctaaaaactctcaataaattaggtattgatgggacgtatttcaaaataataagagctatctatgacaaacccacagccaatatcatactgaatgggaaaaaactggaagcattccctttgaaaactggcacaagacaagggtgtcctctcttaccactcctgttcaacgtagtgttggaagttctggccagggcaatcagacaaacagagagccaaatgatgagtgaactcccattcacaattgcttcaaagagaataaaatacctaggaatccaacttacaagggacgtgaaggacctcttcaaggagaactacaaaccactgctcaatgaaataaaagaggatacaaacaaatggaagaacattccatgctcatgggtaggaagaatcaatatcgtgaaaatggccatactgcccaaggtaatttacagattcaatgccatccccatcaagctaccaatgactttcttcacagaattggaaaaaactactttaaagttcatatggaaccaaaaaagagcccgcatcaccaagtcaatcctaagccaaaagaacaaagctggaggcatcacactacctgacttcaaactatactacaaggctacagtaaccaaaacagcatggtactggtaccaaaacagagatatagatcaatggaacagaacagagccctcagaaataacaccgcatatctacaactatctgatctttgacaaacctgagaaaaacaagcaatggggaaaggattccctatttaataaatggtactgggaaaactggctagccatatgtagaaagctgaaactggatcccttccttacaccttatacaaaaatcaattcaagatggattaaagacttaaacgttagacctaaaaccataaaaaccctagaagaaaacctaggcattaccattcaggacataggcatgggcaaggacttcatgtctaaaacaccaaaagcaatggcaacaaaagccaaaattgacaaatgggatctaattaaactcaagagcttctgcacagcaaaagaaactaccatcagagtgaacaggcaacctacaaaatgggagaaaattttcgcaacctactcatctgacaaagggctaatatccagaatctacaatgaacttaaacaaatttacaagaaaaaacaaacaaccccatcaaaaagtgggcgaaggacatga

SEQ ID NO: 126828 - DNA, 3859 bp, Homo sapiens
atgacaggatcaaattcacacataacaatattaactttaaatataaatggactaaattctgcaattaaaagacacagactggcaagttggataaagagtcaagacccatcagtgtgctgtattcaggaaacccatctcatgtgcagagacacacataggctcaaaataaaaggatggaggaagatctaccaagcaaatggaaaacaaaaaaaggcaggggttgcaatcctagtctctgataaaacagactttaaaccaacaaagatcaaaagagacaaagaaggccattacataatggtaaagggatcaattcaacaagaggagctaactatcctaaatatttatgcacccaatacaggagcacccagattcataaagcaagtcctgagtgacctacaaagagacttagactcccacacattaataatgggagactttaacaccccactgtcaatattagacagatcaacgagacagaaagtcaacaaggatacccaggaattgaactcagctctgcaccaagcagacctaatagacatctacagaactctccaccccaaatcaacagaatatacatttttttcagcaccacaccacacctattccaaaatcgaccacatagttggaagtaaagctctcctcagcaaatgtaaaagaacagaaattataacaaactatctctcagaccacagtgcaatcaaactagaactcaggattaagaatctcactcaaagccgctcaactacatggaaactgaacaacctgctcctgaatgactactgggtacataacgaaatgaaggcagaaataaagatgttctttgaaaccaacgagaacaaagacaccacataccagaatctctgggacgcattcaaagcagtgtgtagagggaaatttatagcactaaatgcctacaagagaaagcaggaaagatccaaaattgacaccctaacatcacaattaaaagaactagaaaagcaagagcaaacacattcaaaagctagcagaaggcaagaaataactaaaatcagagcagaactgaaggaaatagagacacaaaaaacccttcaaaaaatcaatgaatccaggagctggttttttgaaaggatcaacaaaattgatagaccgctagcaagactaataaagaaaaaaagagagaagaatcaaatagacacaataaaaaatgataaaggggatatcaccaccgatcccacagaaatacaatctggcatctagagaatactacaagcacctctatgcgcatgtactagaatttctagaagaaatggataaattcctcatcacatacgctctccccagactaaaccaggaagaagttgaatctctgaatagaacaataacaggacctgaaattgtggcaataatcaatagcttaccaaccaaaaagagtccaggaccagatggattcacagctgaattctaccagaggtacaaggaggaactggtaccattccttctgaaactattccaatcaatagaaaaagagggaatcctccctaactcattttatgaggccagcatcatcctgataccaaagccgggcagagacacaaccaaaaaagagaattttagaccaatatccttgatgaacattgatgcaaaaatcctcaataaaatactggcaaaccgaatccagcagcacatcaaaaagcttatctgccatgatcaagtgggcttcatccctgggatgcaaggctggttcaatatacgcaaatcaataaatgtaatccagcatataaacataaacagaaccaaaaataaaaaccacatgattatctcaatagatgcagaaaaggcctttgacaaaattcaacagctcttcatgctaaaaactctcaataaattaggtattgatgggatgtatctcaaaataataagagctatctatgacaaacacacagccaatatcatactgaatgggcaaaaactggaagcattccctttgaaaactggcacaagacagggatgccctctctcaccactcctattcaacatagtgttggtggaagttctggccagggcaatcaggcaggagaaggaaataaagggtattcaattaggaaaagaggaagtcaaattgtccctgtttgcagatgacatgattatatatctagaaaaccccattgtctcagcccaaaatctccttaagctgataagcaacttcagcaaagtctcaggatacaaaatcagtgagcaaaatcaatgtgcaaaaatcacaagcattcttatatacaccaaaaacagacaaacagagagccaaatcatgagtgagctcccattcacaattgcttcaaagagaataaaatacctaggaatccaccttacaagggatgtgaaggttctctacaaggagaactacaaaccactgctcaaggaaataaaagaggacacaaacaaatggaagaacattccatgctcattgataggaagaatcaataccatgaaaatggccatactgcccaagggaatttatagattcaatgccatctccatcaagttaccaatgactttcttcacagaattggaaaaaaactactttcaagttcatatggaagcaaaaaagagcccgcgtcgccaagtcaatcctaagccaaaagaacaaagctggcggcatcgcgctacctgacttcaaactctactacaagtctacagtaaccaaaacagcatggtactggtaccaaaaaaaaagatatagatcaatggaacagaacagagccctcagtaataacgccgcattatctacaactatctgatctttgacaaacctgacaaaaagaagaaatggggaaaaggattccctatttaataaatggtgctgggaaaactggctagccctatgtagaaagctgaaactggatcccttccttacaccttatacaaaaattaattcaagatggattaaagacttaaatgttagacctaaaaccataaaaaccctagaagaaaacctaggcaataccattcaggacataggcatgggcaaggacttcatgtctaaaacaacaaaagcaatggcaacaaaagccaaaattgacaaatgggatctaattaaaccaaagagcttctgcacagcaaaagaaactaccattagagtgaataggcaacctacagaatgggagaaaatttttgcaatctactcatctgacaaagggctaatatccagaatctacgaagaactcaaacaaatttacaaaaaaaaaaaaaaaacaagcccaccaaaaagtgggcaaagcatatgaacagatgcttctcaaaagaagacatttatgcagccaaaagacacgtgaaaaaatgctcatcatcactggccatcagagaaatgcaaatcaaaaccacaatgagataccatctcacgccagttagaatggcaatcattaaaaagtcaggaaacaacaggtgctggagaggatgtggagaaataagaacacttttacactgttggtggggctgtgaactagttcaaccattgtggaagtcagtgcggcgattcctcagggatctagaactagaaataccatttgacccagccatcccattactgggtatatacccaaatgagtataaatcatgctgctataaagacacatgcacacgtatgtttattgcggcactattcacaatagcaaagacttggaaccaacccaaatgtccaacaatgatagactggattaagaaaatgtggcacatatacaccatggaatactatgcagccataaaaaatgatgagttcatatcctttgtagggacatggatgaaattggaaaccatcattctcagtaaactatcgcaagaacaaaaaaccaaacaccgcatattctcactcataggtgggaattga

SEQ ID NO: 126829 - DNA, 1025 bp, Homo sapiens
ctccgtggtggacattcgcaagctataagctctgccagtggtgaccccgacgcgatcgccttgaagttacgcttgattgagtgtataactcatcaattttcggggaatcccgttcatcatctccggatccctctcagtggcagccgagaagaaccacaccagttgcctggtgaggagcagcctgggcaccaacatcctcagcgtcatggcggcctttgctgggacagccattctgctcatggattttggtgttaccaaccgggatgtggacaggggctatctggccgtgcttacttattttcactgtcctggagttcttcacagcgctcattggcatgcacttcgggtgccaagccatccatgcccaggccagtgcacctgtgatcttcctgccaaacgccttcagcgcagacttcaacattccccagctccggcattcctctgcgccccctgcctatgacaatgtgggcatatgcccaaggagtcgtctgaggagcaaaagtgagcacctgcgggtggagtccagccttttccctctgggcccagcctctccccacccccaccttgttcatcaggggccagccccatcccagctgccctccctcaccacatctacacatactccggcatctgagtgaagtgttccccagggaccatctctcccaaacttttccccagtgctttctttctaaaagtacaccgggcctgaaccgtcaggggtgtgtgtccttcagctccctgagccctgtcacccttccaggacacccaccttgtgcatctaagcatttctctgctcattggggaaatcctggcctcattggagactcaggttcgaggccctgccctgaaccttggggccttggggaagggtaaaaaaagccccggaaaccctcccaaaaggggaagaatcctggaactctgggcattcccaccagaagggtgcccgattaccagggcccaaaggcccttcaacagccatggtgtaattgggtttatggccccggtagggaccttccaaagagtcc

SEQ ID NO: 126830 - DNA, 982 bp, Homo sapiens
aggaaaaggagtggatggacaaagtggggcccaaagtctggatctagttctgaccaacaaggagaaattgatgcacaatggggaagtgaccttggcattttcaactggcagagccggtaagatttcagaggtactggatgctgggacagtcgatcccctgacaaagctggtccttgtgaatgccatttatttcaagggaaagtggaatgagcaatttgacagaaagtacacaaggggaatgctctttaaaaccaacgagctgcccaaaggattctctttgcccactgcccacatagagcctatttatctagacacgggaattgcaacagagaaagaatgcattgccttggatcctctacaaaatacaggcttgcatgccaagatgtcatctgaggatggaaattatctggttccacccctggatatgatcaaccttcatagactgtgcattatacatgggccaggcggtgaagggcaatcagctgttgcccgtctcactggtgaaaagaaaaaccaccctggcgcccaatacgcaaaccgcctctccccgcgcgttggccgattcattaatgcagctggcacgacaggtttcccgactggaaagcgggcagtgagcgcaacgcaattaataacttctagttccacattttgggagcacactgagaaagaaggacatgacagccgggtagtacccaccagtcggaggcaatcagacaccccggagcgtcaggaggaactggattttgccgatttcggaaccaccatcaaacaggattttcgcctgctggggcaaaccagcgtggaccgcttgctgcaactctctcagggccaggcggtgaagggcaatcagctgttgcccgtctcactggtgaaaagaaaaaccaccctggcgcccaatacgcaaaccgcctctccccgcgcgttggccgattcattaatgcagctggcacgacaggtttcccgactggaaagcgggcagtga

SEQ ID NO: 126831 - DNA, 381 bp, Homo sapiens
atgagtcaccgtgccaggccagagcaggtgcacggccaccagcaggcggctcaagcaggagcagggcctgctaactgggtcaccagtagaccagaacccacacgcatccagaggcccaacttctccggtgacctgatggtgttttctttgaataggtcaccctatccagggagaatgacggaaactggttggcttttgtttgttctgctgcttatcattgtgaaaatgggagaaatccagattctattagaaaacaggaacgacagatatgatgagatctgccggcactgggaaggcgatgtcctgggttacaagtctgtggctcagatcgccaagctcgaaaaggcaaaggctaaagaacttggcactaaactcggttaa

SEQ ID NO: 126832 - DNA, 363 bp, Homo sapiens
cctggcgttgctttgcctgggcggtgcagacaagcgcctgcggatcttttgccataaatgagggcatactggcctgacgtaatttactcgtttgccaatcgcagccgcttctggaagcatgagtgggaaaagcatgggacctgcgccgcccaggtggatgcgctcaactcccagaataagtactttggcacaagcctggaactctacagggagctggacctcaacagtgtgcttctaaaattggggataaaaccatccatcaattactaccaagttgcagattttaaagatgccctcgccagagtatatggagtgatacccaaaatccagtgccttccaccaagccaggatgaggatagacag

SEQ ID NO: 126833 - DNA, 655 bp, Homo sapiens
cagaggttcaaaaacgactgtagagaccctcgggatactgggccaatacatggactatggcccgataaaagtgaaggagtaatagatcgtggccttcaatttagaagagattaaggatctttgcccagaaatgagggcatactggcctgacgtaattcactcgtttcccaatcgcagccgcttctggaagcatgagtgggaaaagcatgggacctgcgccgcccaggtggatgcgctcaactcccagaagaagtactttggcagaagcctggaactctacagggagctggacctcaacaggttgcagattttaaagatgcccttgccagagtatatggagtgatacccaaaatccagtgccttccaccaagccaggatgaggaagtacagacaattggtcagatagaactgtgcctcactaagcaagaccagcagctgcaaaactgcaccgagccaggggagcagccgtcccccaagcaggaagtctggctggcaaatggggccgccgagagccggggtctgagagtctgtgaagatggcccagtcttctatcccccacctaaaaagaccaagcattgatgcccaagttttggaaatattctgttttaaaaagcaagagaaattcacaaactgcagctttctaaaaaacaaaaaa

SEQ ID NO: 126834 - DNA, 627 bp, Homo sapiens
atgcgccctgcagccctgcgcggggccctgctgggctgcctctgcctggcgttgctttgcctgggcggtgcggacaagcgcctgcgtgcgtcagtgtccaggcccttctcattggagcacccagagccaggacactgcctggatctgcacctcagggcgtaccctgctcggtgtgtcaagctgaccctggccccaggacttctgggtcagatgaccgacgtgggaatctggtcggatcttttgccagaaatgagggcatactggcctgacgtaattcactcgtttcccaatcgcagccgcttctggaagcatgagtgggaaaagcatgggacctgcgccgcccaggtggatgcgctcaactcccagaagaagtactttggcagaagcctggaactctacagggagctggacctcaacaggggtgagcgagttcccactcagttccccagagagctggttgttaacaggagcctggcaccgcccccaacccctggcttcctctctggccatgtgatctctgtacacaccagctcccctttgccttctgccatgagcggaagtttcctgaggcccttgccagaagcagaatctggttccatgcttctcggacagcctgcagacccctga

SEQ ID NO: 126835 - DNA, 801 bp, Homo sapiens
  misc_feature (1)...(801): n = a,t,c or g
atgacacattttgaggttctggctggccatgaaagtttaggggacatgattcaaaccattacagggtgtgaccaaacaattaattttatctccaaccccaatttggctgtatttggagataaagcctataagaaggtaattaagaatgccgtgtttcttaatgatagacaatggcttacaaagcactttcagtacggtccctataaaatgggtaccttagtcagtgagaagcatgagtgggaaaagcatgggacctgcgccgcccaggtggatgcgctcaactcccagaagaagtactttggcagaagcctggaactctacagggagctggacctcaacagcctgacagctggatccaggggagtgggtgtagacctcactgccctccagcagcttctgcatgtgcactattcggctactgggatcattcctgaggaatgttctgagcctaccaagcctttccagatcattctacatcacgaatcacacagagtgggtgcagagtattgggatgcccatctgggaaccattcttcattcattcagagttcggccattagggaaaacgagggacttccaaccagcatgttgccgtttttcagccatgatttcctgattaaaggatagttgcatttattaagtngttttcttaggaaaggacggaaaattttgggaagtctnttaggttttttgnccgcagaatttctngggacaagcaggcaggaaagagattttgggccagggttctttaaggcccagaattnaccccaacttgcttaattgttccttgncttgccntaag

SEQ ID NO: 126836 - DNA, 1232 bp, Homo sapiens
cggcgactgaccgtggtcgtgggcggacggcggcttgcagcgtggaggagctggggtcgctgtgggtcgcgaagcagagcccgggacgtgcgcgcttggtgcacgatcctgaaggggagctccgaggggcccgggtcgccagggctgctgcggccattcccggagcccggcgcggggcccgcgagatactggtttaggccgtcccagggctccgggcgcacccggtggccgctgctgcagcggagggagcgcggcggcgcgggggctcggagacagcgtttctcccggaagtcttcctcgggcagcaggtgggaagtgggagccggagcggcagctggcagcgttctctccgcaggtcggcaccatgcgccctgcagccctgcgcggggccctgctgggctgcctctgcctggcgttgctttgcctgggcggtgcggacaagcgcctgcgtgacaaccatgagtggaaaaaactaattatggttcagcactggcctgagacagtatgcgagaaaattcaaaacgactgtagagaccctccggattactggacaatacatggactatggcccgataaaagtgaaggatgtaatagatcgtggccctttcaatttagaagagattaaggatcttttgccagaaatgagggcatactggcctgacgtaattcactcgtttcccaatcgcagccgcttctggaagcatgagtgccgaaaaggcatgggacctgcgccgcccagggtggatgcgctcaactcccagaaagaagtactttggcagaagcctggaactctaccaggaagctggacctcaacagtgtgctttttaaaattggggataaaaccatccatcaattactaccaagttgcagattttaaagatgcccttgccagagtatatggagtgatacccaaaatccagtgccttccaacaagccagggtgagggaagtacagacaattggtcaggatagacctgtgcctcattaaggcaaggaccaggcagttgcaaaactggcaccgagccgggggagcagccgttcccccaagcaggaagtctggctggcaaatggggcccgccgagagccggggtctgagagtctgtgaagatggcccagtcttctatcccccacctaaaaagaccaagcattgatgcccaagttttggaaatattctgttttaaaaagcaagagaaattcacaaactgcagctttctaaaaaacaactccaaagtg

SEQ ID NO: 126837 - DNA, 517 bp, Homo sapiens
aaatgggtacaagttcctgtactgctcggcgcgggccattggcatggcggacctcaccaaggggtacctgcagtgggtgagcgaggggggctgtagcctccccaagggccccatccttctgtctcccagcagcctcttctctgccctccacagagaggtgatcgagaagaaaccagaggtgttcaaggtcgcctgcctgagtgacatccagcagctgtttctgccccacggacagcccttctatgctgcctttgggaataggcccaatgatgtctttgcctaccggcaggtgggcctgcctgagtcacgcatcttcacagtcaacccccggggagagctcatccaggagctcataaagaaccacaaatccacgtatgagcggcttggtgaagtggtcgagctcctcttcccacctgtggcccgtggccccagcacagacctggccaaccctgaatacagtaacttctgctactggcgggagccactgcctgctgtggaccttgataccctggactga

SEQ ID NO: 126838 - DNA, 487 bp, Homo sapiens
  misc_feature (1)...(487): n = a,t,c or g
tgggannnnngagcganngaatcgagaccatagaccagcgtggtggaattcggacccgcaggccctgcaggacagagactggcagcgcgccgtcatcgccatgaatgggatcgaagtaaagctctcggtcaagttcaacagcagggagttcagcttgaagaggatgccgtcccgaaaacagacaggggtcttcggagtcaagattgctgtggtcaccaagagagagaggtccaaggtgccctacatcatgcgccagtgcgtggaggagatcgagcgccgaggcatggaggaggtgggcatctaccgcgtgtccggtgtggccacggacatccaggcactgaaggcaggcttcaacgtcagtgagtgtcggcctgcgcaggacgggatggaggtgtgggcagtggtgtccgcgatgagatctcagagtgctccatggcccagataacaaggacgtgtcggtgatgatgagcgagatggacgtgaacgc

SEQ ID NO: 126839 - DNA, 871 bp, Homo sapiens
  misc_feature (1)...(871): n = a,t,c or g
tttttttttctcaggaaactttttaatgaaagtgtcggccacggtggtgtgtaggtggctgagctcagattgcagctgctaagacaccagccacttaccaagagaaagccaggctgcttcaaacccagggcccgcggcaaaaaagcatcacttccggccggggagtctggaagccacgccttgtgggaggtcacactggcatctaggccttcgcctgcactgcagaaggagagccgggtcccctcctggagaacgctgcgttccccagccccacaccggctttgccaccacacaggctgttgaggcaggaggcgggtaagacgtagctgtagacccaaagcaaccaccagccctgggaccctgagacatgacctccaaggacctgctgtcagtcatggtgacaggctggctggggttggcagggagcttgctctccttctcggagggccggagcagcgtggggccaaagacagtggcgaggttgtgcagggacatcttattgaccgcctccttctctgccacccgatgccctctgcgaagttggggtagaactcgtcagtgaagaggggctcgggcagctcacgggagtacagcttcagcgtgcctgcgatggcgttcacgtacatctcgctcatcatcaccgacacgtaccttgtatctactacatgcctcggcgctcgatctccttcagcactggcgcatgatgtagggcactttggacctctctctcttgtgaccacagcaatcttgacttcgaagaaccctgtctgttttcgggacggcatcctctcaagctgaactccctgctggtgaacttgaccganagcttacttcgatccattaatgcgatgacggagcgctgccggctttt

SEQ ID NO: 126840 - DNA, 3566 bp, Homo sapiens
gtaaaataaagaatttacttttccaggacctactgcctccctgttccccccccaccttttttttttttcaaacaatcttgaaccctttgtcacgagtcagttgccaagagaagcctatttgttggtttgagagcagttcatgcagacacagaccacttcctctgagaattcatttgcttccccaggatggaatctggctgggcctctgaccttgctggtcacgtgggccggggcctccatcagtcataccctggactcctatctgtgtctaaacaccacgccccacccccaactgcacggcagccactcgcatagcactctgggagggctgtgggcatgagcagcgaggactccatcagcagctcccccacataagccctgctgatgagggggcttgcgaagcagctttgatgtgctggtaaatccaggtgcaaaacagaactcaagttaaggcctccgcacagcactgcgttctaactgtgaaggattcttactctagtgtcctgtgtggaggtattggaattgtccattgctaagactcagaggagaaaagcacttagcatcgcaggacttggagcaccggtgctgaggcaacccttcattcattcgtcggatgtgtgttaaggcccagggcaggggtcagggtttctcctctcacacagcacgtgggtggcaggaccaacaccgggtctgacctcccagccgggggcacaggctgctaaccccaggcctggaatctgtcagatgcccttcccgtgctgacttgacttagacaggcctcctgaccttcccgcaaaggtcatgtgtgattcgcaggggttctggccgcttgaaaggttcctgagaaagtacatgcaatgaggacagagcttgcagagggaggacaggcatgcagaaggctctgtgtgcagccccagacctgggtaccttcgtcaccgtcctcaccccacctccgggtgcgcagatagggagcaggtctcctgtgttatggcccaagcagggctgttaggacactgagaacattccctcctcccgcaggagagagaggtccaaggtgccctacatcgtgcgccagtgcgtggaggagatcgagcgccgaggcatggaggaggtgggcatctaccacgtgtccggccggtgtggccgcagacatccaggcactgaaggcagccttcaacgtcagtgagtgtcggcctgcgcaggacgggatggaggtgtgggcagtggtgtccgcgatgagatctcagagtgctccacggcccaggcatgtcacatccttctctgtgtcttttcttcatttatcaggatcttcaaggaggccgctgcatttccgtgctctttccagataacaaggacgtgtcagtgatgatgagcgagatggacgtgaacgccatcgcaggctcgctgaagctgtacttccgtgagctgcccgagcccctcttcactgacgagttctaccccaacttcgcagagggcatcggtgagcactggaggccttggcctcatgggagacgtctcctccatgtgcactgctgccctcagaggctgtgaaaagtgaggtgtgggaacccgagctgtgcttcctctgccatggtcggaattttaacccaacctcaaaaagcaggggaccaaaactgagcctatcctggaaggccttgcccatccccagagagctccccatccctattcctcaaggaggccaagtgggtgaaatggtcagcactgccgtgctgtggggtcctaaagtctgctgtcctccttcctgcagaccagggctaaacactggtgcccaggtgctcttgccatgggtcctggtccagccaagcatggtttcaaacatgacctgacccttagtcaacctggaggctgatgtctagagtgggtgctgatgcgtgcagtacctgtggcctgtgcatcacccttagggcaggtctgcctcccgggcccatgcacagaggacctggtctcccagcctgcaggtgcccctgtggtgtccaggacaactagggggtctctgcgtacttggtggggctgggaccctcccacttcccacctccttgtgtccctcactcccctgtttcattccatgctgagcctcccctgccttgggctccctggggagggggtggtggcaggagttgcccaagggctgctctgcccatcagcagctgctctagcggctcctcctgctgctgttcgccgggtgctgctgaccccaaggctggagtcagcttgcagcacagccagggtcgaggtcactccctccctgaggactctagcacggcacagcccctctgcctctctcctggtggtggcgttgaaacagcaccctctgcttcggtcctcgacaggatggcagagaaggaggcagtcaataagatgtccctgcacaaccttggcacggtctttggccccacgctgctccggccctccgagaaggagagcaagctccctgccaaccccaagcaagcccatcaccatgactgacagctggtccttgaaggtcatgtcccaggtatgggaagacaggctccagcccatgcaaccccagcctgacagaggtggcctctgcctgccccacccccagtcctgcccatcttccgacttgcattgtatgtggtggtggctgagattcagagacagggacttgcctaggtttgcatggatgggagtgatagggggtgcccaggccacctcctggtcctgctggtgcaccttgctgggggcttaaaaccaccccaagtgttccggtgtggtggctcatgcctgtaatcccagcactttgggaggccgaggcaggacaactgaacccaggtgtttgagaccagtctgggcaatgtagcaaacctcatctccagaaaaaatacaaagaaaaattagtcaggcattgtggcacacatctgtaatcctaggtatctgggaggctgacacaggaggattgcttgagcccaggagttagaggctgcagtgatccatgatggagccactgtactccagcctgggggacagagcaaggccctgtgcatctctaaaataaataaccacccctcacccaacaagtcatgccttgtcaggaccccaccccacccccgtcccactgtaaggggttcatgacaccagcaggggtttctagcacctgaggtggacttgggagcttgggccccaaagacctccccaccagcagctgtgagccccgctctgagccactctcctcttccccactccgcgagggcaggtcgaggtgctgctgtacttcttgcggctggaggccatccctgccctggacagcaagggacagagcatcctgttctccaccgatgtctaaaggtcccagtccatctcctggaggcggacagacggcctggaaacctctggctaatcaggccatctaataagatgctggaatgtaatcctggacaatccgtgtcctggcagcatttggtcttcctctaagcgcctggctccgctgttctcaggagtgggttctgaagtctctatctgggcccggtaggctcccttgtcctggcttccatctctgtctcagcgaccattcagccccgcctccc

SEQ ID NO: 126841 - DNA, 1379 bp, Homo sapiens
gggttcaaatctgtactgcaccctggagggggattcctttgggtattttgtgaataaagcaaagacgcgcgtctacagggacatcatgctgatccaaactggaacgaggaatttgagatagagctggagggctcccagaccctgaggatactgtgctatgaaaagtgttacaacaagacgaagatccccaaggaggacggcgagagcacggacagactcatggggaagggccaggtccagctggacccgcaggccctgcaggacagagactggcagcgcaccgtcatcgccatgaatgggatcgaagtaaagctctcggtcaagttcaacagcagggagttcagcttgaagaggatgccgtcccgaaaacagacaggggtcttcggagtcaagattgctgtggtcaccaagagagagaggtccaaggttgccctacatcggtgcgccagtgcgtggaggagatcgagccgccgaaggcattggaaggaggttgggcatctaccgcgtgtccggccggtgtggccacggacatccaggcactgaaggcagccttcgacggcaataacaaggacgtgtcggtgatgatgagcgagatggacgtgaacgccatcgcaggcacgctgaatctgtactttcgtgagctgcccgagcccctcttcacttgacgagttctaccccaacttcgcagagggcatcgggtggcagagaaggaggcggtcaataatatgttctctgcacaacctcgccacggtctttggccccacgctgctccggccctccgagaaggagagcaagctccctgccaaccccagcccagcctatcaccatgactgacagctggtccttggaggtcatgtcccaggtccaggtgctgctgtacttcctgcagctggaggccatccctgccccggacagcaagagacagagcatcctgttctccaccgaagtctaaaggtcccagtccatctcctggaggcggacagatggcctggaaacctctggctaatcgggccatccgtagagcgggaaccttcctgaggtgtccttgggccacccccaagtgttgggccatctgccaagagacagcgacccaaagccgaaggacaggtggcctggaaagatcccgcccaggtctgggagccccaggctggcctcagactgtggttttttatgtggccaccccaggggggccccaagccagtttcatcttcagaggccaggcctgaccctgggagacagggtgaagggagtggtttttatgaacttaacttagagtctaaaagatttctactggtttcaattgtcaagatgcggcctctctggggagaagggaacgtgacttggatttcctcaatgttgtatctttgaataaaacgttg

SEQ ID NO: 126842 - DNA, 1365 bp, Homo sapiens
ataacaaggacgtgtcagtgatgatgagcgagatggacgtgaacgccatcgcaggcacgctgaagctgtatttccgtgagctgcccgagcccctcttcactgacgagttctaccccaacttcgcagagggcatcgggtcctcactggcggccagcgctgtgggtgtgacgatgatgacaagcctaaactgcgcaaggactcgtgtcccgggcgctccatgtgaccacctcgggagaggtctccggcttgtcgtaacccagaggagtgacccactgcctcctgcagctctttcagacccagttgcaaagaagagctgcatgctcaacctgttgtcgtccctgccggaggccaacctgctcaccttccttttccttctagaccgcctggaaaggatggcagagaaggaggcagtcaataagatgtccctgcacaaccttggcacggtgtttggccccacgctgctccggccctccgagaaggagagcaagctccctgccaaccccagccagcccatcaccatgactgacagctggtccttggaggtcatgtcccaggtcgaggtgctgctgtacttcctgcagctggaggccatccctgccccggacagcaagagacagagcatcctgttctccaccgaagtctaaagggtccccagggctggtggttgcctttgggtctacagctacgtcttacccgcctcctgcctcaacagcctgtgtggtggcaaagccggtgtggggctggggaacgcaggcgttctcccaggagggggaccctggctctcccttctgcaatgccaggcgaaggcctagatgcccagtgtgaccttcccacaaggcgtggcttccagacttccccggccggaagtgatgctttttttgccttgggccctgggtttgaagcagcctggctttctcttggtaagtggctggtgtcttagcagctgcaatctgagctcagccacctacacaccaccgtgggccgacactttcatttaaaaagttttcctgagacgacttgcgtgcatgttgacttcatgatcagcgccgctgggaagaacccctgagccggtggggtggggctgtggccaccgctctggcacgagcccctcagtcttgggtggtttctgcctggtccgggatttggtgttgctgctgagtccagcctttccaccacctccgcatgggctgtgggtgttgtcagctgcctcccgccttggcttcagtagctcacccagcttacaggggagctgccctgggctggagatgggcatgcaccctgggtcctacttgaatgaatgcagtttgaggagacccggccatatacactgggccacgggttaccttcggcaatgcccacatcagc

SEQ ID NO: 126843 - DNA, 400 bp, Homo sapiens; identical to SEQ ID NO: 112913
  misc_feature (1)...(400): n = a,t,c or g

SEQ ID NO: 126844 - DNA, 489 bp, Homo sapiens
atggtcaaccccaccgtgtccttcaacatcactgtcaatggtgagcccttgggctgtgtctccttcaagctgtttgcagacaagtttccaaagacagcagaaaactttcgtgctctgagcactggagagaaaggatttgattataaatgttcctcctttcacagaattattccagggtttatgtgtcagggtggtgacttcacacgccataatggcactggtggcaagtccatctacggggagaaatttgatgatgagaacttcatcctaaagcatacagtgctgggattacggcatgagccacctagcccgggcaattcccagtttttcatctgcactgccaagactgagtggttggatggcaagcccatggtctttggcaaggtgaaagatggcatgaatattgtggaggccatggagcacttcgggtctgggaatggcaagaccatcaagaagatcaccatcgctgactgtacacaacttgactaa

SEQ ID NO: 126845 - DNA, 949 bp, Homo sapiens
ggcacgagggacgccaccgccgaggaaaaccgtgtactattagccatggtcaaccccaccgtgttcttcgacattgccgtcgacggcgagcccttgggccgcgtctcctttgaggtaaggggcctggataccaagaagtgactgctcatctaatccataaagctatgttaacagattggaggtagtagcattttcattacaagtgactaaaagaacagctgtttacccctgatcgtgcagcagtgcttgctgttccttagaattttgccttctgtttgcagacaaggtcccaaagacagcagaaaattttcgtgctctgagcactggagagaaaggatttgggttataaggggttccctgctttcacagaattattccagggtttatgtgtcagggtggtgactgtgaagtcaccataatggcactggtggcaagtccatctacacggagaaatttgaagatgagaaacttcatcctaaaagcatacggggtcctgggatctttgtccatggcaaatgcttggacccaacacaaattggttcccagtttttcatctgcactgccaagactgagtggttgggatggcaagccttgtggtgtttggcaaagtgaaagaaggcatgaatattgtggaggccatggagcgctttgggtccaggaatggcaagaccagcaagaagatcatcagcattgctgactgtggacaactcgaataagtttgacttgtgtttttatcttaaccaccagatcatttctttttgtagctcaggagagcacccctccaccccatttgctcgcaggatcctaagaattttgtggctctcgctgcagttcctttggggttccatgttttccttgttccctcccatgcctagctggattgcagcagttaagcttatgattatgaaataaaaactaaataactcacctacaacggatgtaattaacg

SEQ ID NO: 126846 - DNA, 536 bp, Homo sapiens
gcggccgcagctccagctcccggtgtccgggactcgggtctcccgccagggggcgccactccctcgcgctttgcagccctgagcgggggaggggcccaggcggcgggagcccccttggccagccccccagatctgccctgcgggaaggggtggaggaggtacccgtgcgggaggaggcgctggccgaagctcaggcaggggcggggaggggtacggtgaccttagagtcgccgccccgctgcgggctgagccgccgctactctcaacctgccgccccgcttaccccgcaggactgccgggacctcgaggggaccccgggccgcgaggagaggcgggacccgcggggcccaccgggcctgccggggagtgctcggtgcctccgcgatccgccttcagcgccaagcgctccgagagccgggtgcctccgccgtctgacgcacccttgcccttcgaccgcgtgctggtgaacgagcagggacattacgacgccgtcaccggcaagttcacctgccaggtgcctggggtctactacttcg

SEQ ID NO: 126847 - DNA, 1082 bp, Homo sapiens
cccagcctctgcccggggcaccccggccttccaggcacgccgggccaccatggcagccagggcttgccgggccgcgatggccgcgacggccgcgacggcgcgcccggggctccgggagagaaaggcgagggcgggaggccgggactgccgggacctcgaggggaccccgggccgcgaggagaggcgggacccgcggggcccaccgggcctgccggggagtgctcggtgcctccgcgatccgccttcagcgccaagcgctccgagagccgggtgcctccgccgtctgacgcacccttgcccttcgaccgcgtgctggtgaacgagcagggacattacgacgccgtcaccggcaagttcacctgccaggtgcctggggtctactacttcgccgtccatgccaccgtctaccgggccagcctgcagtttgatctggtgaagaatggcgaatccattgcctctttcttccagtttttcggggggtggcccaagccagcctcgctctcggggggggccatggtgaggctggagcctgaggaccaagtgtgggtgcaggtgggtgtgggtgactacattggcatctatgccagcatcaagacagacagcaccttctccggatttctggtgtactccgactggcatcagctcccccagtctttagcttagtgccccactgcaaaagtgagctcatgctctcaactcctagaaggagggtgtgaggctgacaaccaggtcatccaaggagggctggcccccctggaatattgtgaatgactagggaggttgggggtagagcactctccagtcctgctgctggcaaggaatggggaacagtggctgtctgcgatcaggtctggcagcatggggcagtggctggatttctgcccaagaccagaggagtgtgctgtggtgggaagttgtaagtcccccagttgctttggtccaggagcccacggtggggtgctctcttcctggtcctctgcttctctggatcctccccaccccctcctgctcctggggccggcccttttctcaagagatccactcaataaacctaagaaccctcaaaaaaaaaaaaaaaaagg

SEQ ID NO: 126848 - DNA, 357 bp, Homo sapiens
cattgttgaaataccccattaaccacttttggggggtatcatctatatatcgaatgattctgcagcaggatttcaccagcatcaggttccctgccctggagcactgctatactggcggggaggtcgtgttgcccaaggatcaggaggagtggaaaagacggacgggccttctgctctacgagaactatgggcagtcggaaacgggactaatttgtgccacctactggggaatgaagatcaagccgggtttcatggggaaggccactccaccctatgacgtccaggtcattgatgacaagggcagcatcctgccacctaacacagaaggaaacattggcatcagaatcaaacctgtca

SEQ ID NO: 126849 - DNA, 432 bp, Homo sapiens
ctccagggcagggaacctgatgctggtgaaatcctgctgcagaatcattcgatatatagatgataccccccaaaagtggttaatggggtatttcaacaatgtctgtatgatgaccttggtgtcaaactgtggcagatggtggataaagactgtacaacccgctgtccatggttctaccagggtccaaatggtagccacaatccatcctgagtccgacaggcaccaggagacatcagatgtcttcaggctccgtaatttcctacttcctgggaaggagggttgtaaggccaacccatgggagtgttttgccatcttggggaagcctgtggtcccactggtgaagaagatgaccattgggtccaaggtctttgacttaacacaggtgtgttctggggatgctgatctgagaaggagaaattagctcgtgccgaa

SEQ ID NO: 126850 - DNA, 1141 bp, Homo sapiens
aatagttcgcagggactggcaggaagtgagtgacatccacttggccatggccaactgtaaaatgaccaaaagcatcaggttccctgccctggagcactgctatactggcggggaggtcgtgttgcccaaggatcaggaggagtggaaaagacggacgggccttctgctctacgagaactatgggcagtcggaaacgggactaatttgtgccacctactggggaatgaagatcaagccgggtttcatggggaaggccactccaccctatgacgtccagtttcatatggaggcctcagttgaaaactgcattattgtgagcatgaacaccgctgaccctggcagccagggcatcacacacagcctcttgctacaggtcattgatgacaagggcagcatcctgccacctaacacagaaggaaacattggcatcagaatcaaacctgtcaggcctgtgagcctcttcatgtgctatgagggtgacccagagaagacagctaaagtggaatgtggggacttctacaacactggggacagaggaaagatggatgaagagggctacatttgtttcctggggaggagtgatgacatcattaatgcctctgggtatcgcatcgggcctgcagaggttgaaagcgctttggtggagcacccagcggtggcggagtcagccgtggtgggcagcccagacccgattcgaggggaggtggtgaaggcctttattgtcctgaccccacagttcctgtcccatgacaaggatcagctgaccaaggaactgcagcagcatgtcaagtcagtgacagccccatacaagtacccaaggaaggtggagtttgtctcagagctgccaaaaaccatcactggcaagattgaacggaaggaacttcggaaaaaggagactggtcagatgtaatcggcagtgaactcagaacgcactgcacacctaaggcaaatccctggccactttagtctccccactatggtgaggacgagggtggggcattgagagtgttgatttgggaaagtatcaggagtgccatgattccaatgttttccttcttttaaattaaattcagttgctctgcttcctccaagtcctctgtatctttagaatttccgcaggtgagcactcaataacgcaagt

SEQ ID NO: 126851 - DNA, 849 bp, Homo sapiens
atgtatgcaaatgtacatagcagctttactctaaatagtcaaaacctgaagacaacaatccagatggctttcaacaggctctatgtgaatgctgagcttatagcaggtgacccagagaagacagctaaagtggaatgtggggacttctacaacactggggacagaggtaagatggatgaagagggctacatttgtttcctggggaggagtgatgacatcattaatgcctctgggtatcgcatcgggcctgcagaggttgaaagcgctttggtggagcacccagcggtggcggagtcagccgtggtgggcagcccagacccgattcgaggggagagtaaggggtggaggcagaatggcatctcagcaatgtggctcccgaacatacatgcattgaaaacgggtatccttttgagggacagccgaaattaccgtggatcccctgacgctagtgtcctcgtttccagaagctccctgtcccgtggaaaccttgggtctgacagcatagggcaactggcagccagcattcagcgacagtcccccgtcgcagtagcagtccgaatttgggttgatcagacccaacacaaggccgtggaggctacaaagtccggcggagtcaaaggaatcagaaaagacaagttaagagtgcataaggtgggtccaggggaccaacactggtatggaggctgtgaagaccccaagctctgggagcccacactatttattggtgatcaaacaaagaagcaggtgacattgttgaaataccccattaaccacttttggggggtatcatctatatatcgaatgattctgcagcaggatttcaccaggtatggtagaagtggcttgtaa

SEQ ID NO: 126852 - DNA, 715 bp, Homo sapiens
  misc_feature (1)...(715): n = a,t,c or g
actttactagtgactctgcatcccaaagtttggcaaaggggttcaggaggggtggggagccatttaagagctgctcacggatcgtgatggcaataaccatgataatcacaggcagcacttaccttggctcgccccagattggatctggtctaggccacttacaagcatcagctccttcacttacaaaaggactggaggaggttagtgcagggagcaccctgattttacacgatttnnnnnnnnnnnnnnnnnnnnnnnnnnnnnnnnnnnnnnnnnnnnnnnnnnnnnnnnnnnnnnncccactgccactccgactgggagccctgccccgtgccctgctgatgttgacactgaccccggctctattatttcagtttttccttgtaatttctgagaatctagcaacaaggtgagcaatgaaaaaaagtacaataggtaaaaatgtgttagaaattatgactgtgatgaaattttcaaactaatgaagaaaatattgccacaattgccaaagcttttaggactcttaaaaatataggaacattgagtattatgaactaaagactcatactattaaaacgggacgggaccaacaaacccgggaaagaagaaaaaaaagaaannnnnnnnnnngggcggcgcgggttatctccttttgagggggtaatttataggggggatggggctgttaaaaccggggcggggaaaaccccggctc

SEQ ID NO: 126853 - DNA, 660 bp, Homo sapiens
atgtgccaaggggacacctacgcctgggggggacacatgtgccggggaggacacctgcgccgaggacactcgcacgagcgggatactccacggggtccggaacggcctccccgccctccagccagagacagggagagcaaggatgaaagacggcgaccacctcccaaggacccgccggccgtcaggacctgccaccgactcaccctctacggctacgccgccgccgccgccgccgccgccgccgccgccgccgccgccgccgcccccagccgccccctccgccttcgctgcactccgcctccggggtcccggccggaagtggacagcgcgcgggcaacttccgcttccggcaacggcgccggaagcacgggtccgggccctcccgcggggcgggtactcgtctcccggccgagcgacttcagctcggggacctgccccatggccgctccccagcaggacagggaaaccgccgagaccatgttctgcgaacacccaggagcactgctgagtgcaagcatcatgtcgattgcacaagtggattcacgaacaggcaaggacgtgaccagggacaaatgtgggaaggggagaggacgtgaatcagaagcagagatgcttgccgtcctacagcaggcaggacgggtcaggtctgggacgtcctga

SEQ ID NO: 126854 - DNA, 1248 bp, Homo sapiens
gaattcgaagcacgggtccgggccctcccgcggggcgggtactcgtctcccggccgagcgacttcagctcggggacctgccccatggccgctgcccagcaggacagggaaaccgccgaggtggggggcttcttgtccgtcccagcccccccaactcaggccctctcgctgcccctggcgaccaccgcgtgcgcccttccccagggcgggcgcagtcctggacgcctccgccgagcgtgactgcgtgcattttctctcctttcccttcccaacctgcggagagaagacagccccagagccgctgtctccatcctctgctgatgcctgctgtctttatgttggcctcgtcgtccgcactgcagtgtggcaggggcgtccctcgtttcccgcggactgaggtgggcgccgggcattcagtaaacgaagaaaccaaagcggagaaggttgggaatcaaacgtctgtcatacctgccaccagcagacaagcggctttgggtacctcctggacccaaagacgaactcagcccctccaggagcgcagtcattggcaccctcgtgggaacaatgccagtgggatgggtggccaccggatgtttccggggcccctcagaggcccagcagcgcaggtcttggagaatgaatgtgggtcactgggccgcgctgcagagggccggtcctgagtcgcttcctggaggagaggcccatggccagcacttggcttcgcctggaggaagaagcacgtgctaaaccacgagcgttcatggtttgtctgtttgataaaagatgctggctttgacacaccaactgacaaagtctttcataggttggagctgctaggttgtgcccctgcccctcctgaaaattagccacacgaaaggaagggtctggaaggtggcagggaagccagcagagaccagggaagtggcagcatcatggtgcaggggcacacaagaaggagatggagcttgcgggagcccccactgccactccgacagggagccctggcccgtgccctgctgatgttgacactgaccccggctctattatttcagtttttccttgtaatttctgagaatctagcaacaagttgagcaatgaaaaaaagtaaaaaagttaaaattgtgttagaaattatgactgtaaagaaattttgaaactaatgaagaaaaaattgccaaaattgccaaagcttttaggactcttaaaaatacagtaacattgagtattatgaactaaagactcatactat

SEQ ID NO: 126855 - DNA, 585 bp, Homo sapiens
atgccagtggcccggagctgggtttgtcgcaaaacttacgtgaccccgcggagatcctttgagaaatctcgtctcgaccaagagctgaagctgatcgaagagtatgggctccggaataaacgtgaggtctggagggtcaaatttaccctggccaagatccgcaaggccgcccgggaactgctgacgcttgatcagaaggacccacggcgtctgttcgaaggcaatgccctgctgtggcggctggtctgcattggggtgctggatgagggcaagatgaagctggattacatcctgggcctgaagatagaggatttcttagagagacgcctacagacccaggtcttcaagctgggcttggccaagtccatccaccacgctcgcgtgctgatccgccagcgccatttcagggtccgcaagcaggtggtgaacatcccgtccttcattgtccgcctggattcccagaagcacatcgacttctctctgtgctctccctatgggggtggccgcccgggccgcgtgaagaggaagaatgccaagaagggccagggtggggctggggctggagaccacaaggaggaggattaa

SEQ ID NO: 126856 - DNA, 1425 bp, Homo sapiens
atggccttcctgatgcacctgctggtctgcgtcttcggaatgggctcctgggtgaccatcaatgggctctgggtagagctgcccctgctggtgatggagctgcccgagggctggtacctgccctcctacctcacggtggtcatccagctggccaacatcgggcccctcctggtcaccctgctccatcacttccggcccagctgcctttccgaagtgcccatcatcttcaccctgctgggcgtgggaaccgtcacctgcatcatctttgccttcctctggaatatgacctcctgggtgctggacggccaccacagcatcgccttcttggtcctcaccttcttcctggccctggtggactgcacctcttcagtgaccttcctgccgttcatgagccggctgcccacctactacctcaccaccttctttgtgggtgaaggactcagcggcctcttgcccgccctggtggctcttgcccagggctccggtctcactacctgcgtcaatgtcactgagatatcagacagcgtaccaagccctgtacccacgagggagactgacatcgcacagggagttcccagagctttggtgtccgccctccccggaatggaagcacccttgtcccacctggagagccgctaccttcccgcccacttctcacccctggtcttcttcctcctcctatccatcatgatggcctgctgcctcgtggcgttctttgtcctccagcgtcaacccaggtgctgggaggcttccgtggaagacctcctcaatgaccaggtcaccctccactccatccggccgcgggaagagaatgacttgggccctgcaggcacggtggacagcagccagggccaggggtatctagaggagaaagcagccccctgctgcccggcgcacctggccttcatctataccctggtggccttcgtcaacgcgctcaccaacggcatgctgccctctgtgcagacctactcctgcctgtcctatgggccagttgcctaccacctggctgccaccctcagcattgtggccaaccctcttgcctcgttggtctccatgttcctgcctaacaggtctctgctgttcctgggggtcctctccgtgcttgggacctgctttgggggctacaacatggccatggcggtgatgagcccctgccccctcttgcagggccactggggtggggaagtcctcattgtgagtatccggccggtggcctcgtgggtgcttttcagcggctgcctcagttacgtcaaggtgatgctgggcgtggtcctgcgcgacctcagccgcagcgccctcttgtggtgcggggcggcggtgcagctgggctcgctgctcggagcgctgctcatgttccctctggtcaacgtgctgcggctcttctcgtccgcggacttctgcaatctgcactgtccagcctag

SEQ ID NO: 126857 - DNA, 1083 bp, Homo sapiens
atggcggaggctgcagctctcagaccaacagccacaacatcaggggcggcagtggcggcagcggcggcggcagcagcggcctcccctaccaggatccccacagtcaccattctgtccccagggggcaggcgagggggccgcggcagcgatggcagcggcggcagctggactaaacaggtcacctgcaggtattttatgcatggggtttataaggaaggagataactgttgcaagttgcatgacctctctgacagtccgtataatgtagtgtacaagagtttgcagccagggtactgtatttatggagactgctgcagatatgaacatagcaagccattgaaacagaaagaagcaactgctacagagctaactacaaagtcatcccttgctgcttcctcaagtctctcatggatagtcggaccacttgttgaaatgaatacgggtgaagctgagtcaagaaattcaaactttgtaactgtaggagcaggttcagagggctgggtgaatgctgttgagtttgttcctgggcaaccctactgtggccgcactgcaccttcctgcactgaagcacccctgcagggctcagtgaccaaggaagaatcagagaaagagcaaactgctgtggaaacaaagaagcagctgtgcccctatgctgcagtgggagagtgccgatatcgggagaacttgtgtgtatatggagattcgtgtgacatgtgtggctgcagtgagtactgtgtggaggagaaagaagagaagcagaaactcattctgaaatacaaggaggcaatgagcaacaaggcgtgcaggtattttgatgaaggacatgggagctgcccgtttggagggaacggtttttataagcatgtgtaccctgatggccatagagaggagccacagagacagaaggaaagagagaacagcagcccctttgacaacgatgaagaagaggttgtcacctttgagctgggtgagttgttgcttatgcttttggctgcagttggggacgatgaactaacagactctgaagatgagagcgacttgtttcatgaggagctggaagatttttatgacttggatctatag

SEQ ID NO: 126858 - DNA, 565 bp, Homo sapiens
gagctgcccatttggagggaactgtttttacaagcatgcgtaccctgatggccgtagagaggagccacagagacagaaagtgggaacatcaagcagataccgggcccaacgaaggaaccacttctgggaactcattgaggaaagagagaacagcaacccctttgacaacgatgaagaagaggttgtcacctttgagctgggcgaggatgttgcttatgcttttggctgcaggtggggacgacgaactaacaaactcttaagatgagtgggacttgtttcatgatgagctggaagatttttatgacttggatctatagcaaccttgcgtggcgtgtgaactggtctgctgacctcagacagcagctgtcccctgtggtggtgtggcagtgcctgtgttctctcctaggcaggcctctcaactccaggtgctgtcctaagaatttttacccagggcctgttttctcaacccctcacctttccctgaggagtgtgttgttttccctgttgaaaaaagttacaaaaataaatctttaaagttagttttttgtaacacgaatttaaaaaa

SEQ ID NO: 126859 - DNA, 823 bp, Homo sapiens
agaccagtgcggtggaattcaagagacaactgccgctactcgcatgacctctctgacagtccgtatagcgttgtgtttaagtattctcagcgagggtactgtatgtatggagaccgctgcagatatgaacatagcaaaccattgaaacaggaagaagcaactgctacagagctaactacaaagtcatcccttgctgcttcctcaagtctctcatcgatagttggaccacttgttgaaatgaatacaggcgaagctgagtcaagaaattcaaactttgcaactgtaggagcaggttcagaggactgggcgaatgctattgagtttgttcctggacaaccctactgtggccgtactgcgccttcctgcactgaagcacccctgcagggctcagtgaccaaggaagaatcagagaaagagcaaaccgcccgtggagacaaagaagcagctgtgcccctatgctgcagtgggagagtgccgatacggggagaacttgtgtgtatctccacgggagattcttgtgacatgtgtgggctgcaggtcctgcattccaatggatcttgcccagagattcgcaggcattatcaaatcgtgcatttgaggcccatgagaaggacatggagctctcatttgccgtgcagcgcagcaaggacatggtgtgtgggatctgcatggaggtggtctatgagaaagccaaccccagtgagcgccgcttcgggatcctctccaactgcaaccacacctactgtctcaagtgcattcgcaagtggaggagtgctaagcaatttgagagcaagatcataaagtcctgcccagaatgccggat

SEQ ID NO: 126860 - DNA, 540 bp, Homo sapiens
ttcagccccatgcccacctccagtctcttcctgctgtggttccagctctgggggctgctgcagctctgagggtggtggctgctgcctgagccaccacaggccccgccagtccctccgacgccgacctcagagttccagctgctgtggcagtggcagtggccagcagtctgggggctccagctgctgccacagctctgggggctctggctgctgccacagctctggaggctgctgctgacctgggccatgaggagcacggaggagaaggactggcagatcccaggtgctgaagatgtgtgtcagcctgaggcttcttttctctcatttcccatggaaggacttcggaaatgccttaagttcccctctttatcctgctcatgttcactccattgtagggttgaagtctagcttgtgatattttctggcctggctttccctctcagacatagctctttggagaactaggtgttgtaattcagttatgaagctattttctctgtaacaataaagctttttattcctgaaaaaaaaaaaaaaaaa

SEQ ID NO: 126861 - DNA, 1020 bp, Homo sapiens
atggagatgccagcttccgacgcccaaatccctgccccgcaggtgcggggcgccccggccatagccctggtgggctgtctcagcctcgccgtggagctgcaggcgggcgccgggggaccgggactcgccgcgctcgtggccttcgtgcgcgacaagctgagcttcctcgtcaccgcccggcccaccgctgtcaacatggcccgcgccgcccgcgacctggctgatgttgcagcccgggaggccgaacgggagggcgctacggaagaggcggtccgggagagagtgatctgctgcaccgaggacatgctggagaaagacctcagagacaaccgaagcattggggacctaggagcccgccacctcctggagcgggtggcccccagcggtggcaaggtgactgtgctgacccactgtaacactggtgctctggccaccgctggctatggtacagccctaggtgtgattcgctcactgcacagcctgggccgcctggagcatgccttctgcacagagacccggccctacaaccagggagcccggctgacggcctttgagctggtctatgagcagatccccgccacccttatcaccgacagcatggtggctgctgccatggcccataggggcgtgtcagctgtggtcgtgggagctgaccgcgtggttgccaacggcgacacagccaacaaggtgggcacctaccagctggccattgtcgccaagcaccatggcattcccttctacgtggctgcccccagctcttcatgtgacctccgtctggagaccggcaaggagatcattattgaagagcgaccgggccaggagctgaccgatgttaatggggtccggattgcagcacctgggattggagtttggaatcctgccttcgatgtcaccccccacgacctcatcactggtggcatcatcacagaactgggggtctttgcccctgaggagctccggacagccctaaccaccaccatctcttccagggatggaaccctagatggaccccagatgtaa

SEQ ID NO: 126862 - DNA, 939 bp, Homo sapiens
atggaatactatgcagccataaaaaaggatgagttcatgccctttgtagggacatggatgaagctggaaaccatcattctcagcaaactatcacaaggacaaaaaaccaagcaccacatgttctcactcatagcagcagcccgccagccccacgcggagtgttctactctttccaaagacagcccacatttcggggtctcctgcacccccaaatgtgggattgctgaatccatccacaggggctgcccagaaaaagacaatgacttctgcagggctggggaggctgtccttgtgaaaataactgaatctacccgagtgtgtggcctgtgctggggaaacgtgggtgacttcaatgatgtcaggcaatcagtgcaattgaaatatgtcaaaaatggctccatcaacgcacccggctcatatttagctataaaatcacaaccatctcatccctggaaccaagcatccctggaaccaagcaagatcagtgctgttgatcttcattttgcaattgagaagaagatcctctccactcacaggaaacagcagcaagatggtttccaggcaccagctgtcactgggcttgtactgttacagtccaagctgagcacgcaaggcaggagccacaaggctcggtccccagtgagccgcccgaggacatcttgtggcaccatctgttcgcccccacccaccctcaccaactgccaggctccgattgttgttggtggtggtggccctttcttcgctgggatggtggatggctcggtgagacatcagagagcaactgctcagctctcacacttgacggtggaatcatcaaatgctttagcgatgccatcggccaaaatggggaaatcgaggcaatcagagacgtacgtgacttgttcaacatctccaggctccccattcatccagcggcttgagaagccagcctttggctag

SEQ ID NO: 126863 - DNA, 711 bp, Homo sapiens; identical to SEQ ID NO: 126080

SEQ ID NO: 126864 - DNA, 2763 bp, Homo sapiens; identical to SEQ ID NO: 121561

SEQ ID NO: 126865 - DNA, 2748 bp, Homo sapiens; identical to SEQ ID NO: 116383

SEQ ID NO: 126866 - DNA, 1965 bp, Homo sapiens; identical to SEQ ID NO: 121511

SEQ ID NO: 126867 - DNA, 1833 bp, Homo sapiens; identical to SEQ ID NO: 126447

SEQ ID NO: 126868 - DNA, 1101 bp, Homo sapiens
atgtctaatctctgctctgccctgcacattgcaggcactttacagctgtataacgacatctccaccgtggtggtggccacatttattggctttgtgacattcatcagggcttccttcttattaaaaatgcatgggctgcagctatttggaaggacaccagatatattcactctagcagcagcccgccagccccacgcggagtgttctactctttccaaagacagcccacatttcggggtctcctgcacccccaaatgtgggattgctgaatccatccacaggggctgcccagaaaaagacaatgacttctgcagggctggggaggctgtccttgtgaaaataactgaatctacccgagtgtgtggcctgtgctggggaaacgtgggtgacttcaatgatgtcaggcaatcagtgcaattgaaatatgtcaaaaatggctccatcaacgcacccggctcatatttagctataaaatcacaaccatctcatccctggaaccaagcatccctggaaccaagcaagatcagtgctgttgatcttcattttgcaattgagaagaagatcctctccactcacaggaaacagcagcaagatggtttccaggcaccagctgtcactgggcttgtactgttacagtccaagctgagcacgcaaggcaggagccacaaggctcggtccccagtgagccgcccgaggacatcttgtggcaccatctgttcgcccccacccaccctcaccaactgccaggctccgattgttgttggtggtggtggaagaaagaaaggtgaaacacttgtcaatcaacaaacattcaacatggtgctcgattccacaatgaacacaagaaatatacaaatgattcttgacttcatgaagctcatcgtctgcatgggccctttcttcgctgggatggtggatggctcggtgagacatcagagagcaactgctcagctctcacacttgacggtggaatcatcaaatgctttagcgatgccatcggccaaaatggggaaatcgaggcaatcagagacgtacgtgacttgttcaacatctccaggctccccattcatccagcggcttgagaagccagcctttggctag

SEQ ID NO: 126869 - DNA, 1725 bp, Homo sapiens
ctaataagcaacttcagcaaagtctcaggatacaaaatcaatgtgcaaaaatcacaagcattcttatataccaacaacagacaaacagagagccaaatcatgagtgaactcccattcacaattgcttcaaagagaatgaaatacctaggaatccaacctacaagggacatgaaggacctcttcaaggagaactacaaaccactgctcaatgaaataaaagaggatacaaacaaatggaagaacattccatgctcatgggtaggaagaatcaatattgtgaaaatggccatactgcccaagaattggaaaaaaactactttaaagttcatatggaaccaaaaaagagcccgcattgccaagtcaatcctcagccaaaagaacaaagctggaggcatcatgctacctgacttcaaactatactacaaggctacaataacgaaaacagcatggtactggtatcaaaacagagatatagatcaatggaacagaacagagccctcagaaataatgccacatatctacaaccatctgatctttgacaaacctgataaaaacaagaaatggggaaaggattccctatttaataaatggtgctgggaaaactggctagccatatgtagaaagctgaaactggatcccttccttacaccttatacaaaaattaattcaagatggattaaagacttaaatgttagacctaaaaccataaaaaccctagaagaaaacccaggcaataccattcaggacataggcatgggcgaggacttcatgtctaaaacaccagaagcaatggcaacaaaagccaaaattgacaaatgggatctaattaaactaaagagcttctgcacagcaaaagaaactaccatcagactgaacaggccacctacagaatgggagaaaatttttgcaatctactcatctgacaaagggctaatatccagaatctacaatgaactccaacaaatttacgagaaaaaaacaaacaaccccatcaaaaagtgggcaaaggatatgaacagacacctctcaaaagaagacatttatgcagccaaaagacacatgaaaaaatgcgcatcatcactggccatcagagaaatacaaatcaaaaccacaatgagataccacctcacaccagttagaatggcaatcattaaaaagtcaggaaacaacaggtgctggagaggatgtggagaaataggaacacttttacactgttggtgggactgtaaactagttcaaccattgtggaagtcagtgtggcgattcctcagggatctagaactagaaataccatttgacccagccatcccattactgggtatatacccaaaggattataaatcatgctgctatgaagacacatgcacacatatgtttattgtggcactattcacaatagcaaagacttggaaccaacccaaatgtccaacgatgatagactggattaagaaaatgtggcacatatacaccatggaatactatgcagacataaaaaaggatgagttcatgtcctttgtacggacacggatgaagctggaaaccatcattctcagcaaaatatcacaaggagaaaaaaaccaaacaccgcatgttctcactcataggtgggaattgaacaataagaacacatggacacaggaaggggaacatcgcacagcggggcctgttgtggggtggggcgaggggggagggatagctttaggagatatacctaatgttaagtga

SEQ ID NO: 126870 - DNA, 999 bp, Homo sapiens; identical to SEQ ID NO: 126084

SEQ ID NO: 126871 - DNA, 759 bp, Homo sapiens; identical to SEQ ID NO: 126451

SEQ ID NO: 126872 - DNA, 1431 bp, Homo sapiens; identical to SEQ ID NO: 116402

SEQ ID NO: 126873 - DNA, 2657 bp, Homo sapiens
atgaacatcgatgcaaaaatcctcaataaaatactggcaaaccgaatccagcagcacatcaaaaagcttatccaccatgatcaagtgggcttcatccctgggatgcaaggctggttcaacatacgaaaatcaataaacatagtccagcatataaacagaaccaatgacaaaaaccacatgattatctcaatagatgcagaaaaggcctttgacaaaattcaacaacgcttcatgctaaaaactctcaataaattaggtattgatgggacgtatctcaaaataataagagctatctatgacaaatccacagccaatattgtactgaatgggcaaaaactggaagcattccctttgaaaactggcacaagacagggatgccctctctcaccacttctattcaacatagtgttggaagttctggccagggcaatcaggcaggagaaggaaataaagggtattcaattacgaaaagaggaaatcaaattgtccctgtttgcagatgacatgattgtacatctagaaaaccccattgtctcagcccaaaatctccttaagctgatagacaatttcagcaaagtctcaggatacaaaatcaatgtgcaaaaatcacaagcattcttatacaccaataacagacaaacagagagccaaatcatgagtgaactcccattcacaattgcttcagagagaataaaatacctaggaatacaacttacaagggacgtgaaggacctcttcaaggagaactacaaaccactgctcaatgacataaaagaggatacaaacaaatggaagaacactccacgctcatgggtaggaagaatcaatatcatgaaaatggccatactgcccaaggtaatttatagattcaatgccatccccatcaagctaccaatgactttcttcacagaattggaaaaaactactttaaagttcatatggaaccaaaaaggagcccgcattgccaagtcaatcctaatttatagattcaatgcccaagaattggaaaaaactactttaaagttcatatggaaccaaaaaggagcccgcattgccaagtcaatcctaagccaaaagaacaaagctggaggcatcacgctacctgacttcaaactatactacaaggctacagtaatcaaaacagcatggtactggtaccaaaacagagatatagaccaatggaacagaacagagccctcagaaataatgccacatatctacaaccatctgatctttgacaaacctgacaaaaacaagaaatggggaaatgattccctatttaataaatggtgctgggaaaactggctagccatatgtagaaagctgaaactggatcccttccttataccttatacaaaaattaattcaagatggattaaagacttaaatgttagacctaaaaccataaaaaccctagaagaaaacctaggcaataccattcaggacatagccatgggcaaggactttatgtctaaaacaccaaaagcaatggcaacaaaagccaaaattgacaaatgggatctaattaatctaaagagcttctgcacagcaaaagaaaccaccatcagagtgaacaggcaacctatagaatgggagaaaatttttgcaatctactcatctgacaaagggcgaatatccagaatctacaatgaactcaaacaaatttacaagaaaaaaacaaacaaccccatcaaaaagtgggcaaaggatatgaacagacacttctcaaaagaagacatttatgcagccaaaagacacatgaaaaaatgctcatcatcactggccattagagaaatgcatatcaaaaccacaatgagacaccatctcacatcagttagaatggcgatcattaaaaagttaggaaacgactggtgctggaggggatgtggagaaataggaagacttttacactgttggtgggactgtaaactagttcaaccattgtggaagtcagtgtggcgattcctcagggatctagaactagaaacaccatttgacccagccacccccattactgggtatatacccaaaggattataaatcatgctgctataaagacatatgcaccaagtatgtgtacctgcggcactattcacaatagcaaacacttggaacccaaccccaaaatgtccatccaatgatagactggattaagaaaatgtggcacatatacacccatggaatactatgcagccataaaaaaggatgagttcatgtcctttgcagggacatggatgaagctggaaaccatcattctgagaaaactatcacaaggacagaaaaccaaacaccgcatgtcctcactcataggtgggaatttaacaatgagaacatttggacacagtgcagggaacatcacacaccagggcctatcatgaggtgtggggctgggggagggatagcattaggagaaataactaatgtaaatgaccagttaatgggcacagcaaaccaacatggcacatgtatacctatgcaacaaacccgcacattgtgcacatgtaccctagaacttaaagtatagtaataaaaaaaattcaccaaacaccacaaaaaaaatcaagattgtcaaagaaaatttccacgtcccccgaaatcaaataaatagttagacaagcaggagttaaccagatatggccccattggcaaagtgtcca

SEQ ID NO: 126874 - DNA, 6334 bp, Homo sapiens
atgggcaaggacttcgtgtctaaaacaccaaaagcaatggctacaaaagccaaaattgacaaatgggatctaattaaactgaagagcttctgcacagcaaaagaaactaccatcagagtgaacaggcaacctacagaatgggagaaaatttttgcaatctactcatctgacaaagggctaatatccaaaatctacaaagaactcaaacaaatttacaagaaaaaaaacaaccccatcaaaaaggaggcgaaggatatgaacaggcacttctcaagagaagacatttatgcagccaacagacacatgaaaaaatgctcaccatcactggccgtcagagaaatgcaaatcaaaaccacaatgagataccatctcataccagttagaatggcgatcattaaaaagtcaggaaacaacaggtgctggagagggtgtggagaaataggaacacttttacactgttggtgggactgtaaactagttcaaccattgtggaagacagtgtggcgattcctcaaggatctagaactggaaataccatttgacccagccaccccattactgaatatatactcaaaggagtataaatcatgctgctataaagacacatgcacatgtatgtttattgtggaactattcacaatagcaaagacttggaaccaagccaaatgtgcaacaatgatagactggattaagaaagtgtggcgcatatacagcatggaatactatgcagccataaaaaaggatgagtttatgtcctttgtagggacatggatgaagctggaaaccatcattctcagcaaactatcgtcttcgctgaaacatgggcactcgtgggaagtgctttctgttccccaggctcagttattttcatatcttcagctgctgctattacattcccatctcttggaaggagccagagccagagaaatacagggttcctctgtggccaagggaaaaatgcctgccaagaatgctgaacttctggtgaagaaccagatgatttcttggattggccagattaattccaggcccaaggagcaaaagaatcctaaaacagagacagaggctgtgagaagcgaaaggcgctgtggatgttgctgccctagcgtttggaagcccgaacattcacatgacttgcttcaatctcatagagagccagcagctgagctgtgggtccaagtgtcaggacacctcgcccatatctctgtgtgcgaaaggatgtgcatgatgtggtcccaatcctcaggcccagtgctacttctctattcatgccgagagcagcaggccagggaggccagaaagcaggtgggacagagaaatcttcaggcccatgaaaagatgatgtgtagagattacagccaccaaatggcttcagaattattcactgagtgcaatagacctgtcgaaaagggtgtccacatttgtcaaaaaggaacactttccagttccaaaattagaggtgaaacctgttgtacccagctctgccgaacattccacactcctcagtggaggaaggagttggctccatctaggcgaggtctgaggatctggaaggtgctcagctcccatagctattggcacgtttatttacatgcagatctaacacctacagaggacttaagttcacagaggcatgaggtggagagtaacaaagcatctgctattcaacaagaagagctaactatcctaaatatatatgcacccaatacaggaggacccagattcataaagcaagtcctgagtgacctacaaggagacgtagactcccacacaataataatgggagactttaacaccccactgtcaacattagacagatcaacaagacagaaagttaacaaggatacccaggaattgaactcagctctgcaccaagcagacctaatagacatctacagaactctccaccccaaatcaaaagaatttacatttttttcagcaccacaccacacctattccaaaattgaccacatacttggaagtaaagctctcctcagcaaatgtaaaagaacagaaattataacaaactgtctctcagaccacagtgcaatcaaactagaactcaggattaagaaactcactcaaaactgctcaactacatggaaactgaacaacctgctcctgaatgactactgggtacataacgaaatgaaagcagaaataaagatgttctttgaaaccaacgagaacaaagacacaacataccagaatctctgggacacattcaaagcagtgtgtagagggaaatttatagcactaaatgcccacaagagaaagcaggaaagatccaaaattgacaccctaacatcacaattaaaagaactagaaaagcaagagcaaacacattcaaaagctagcagaaggcaagaaataactaaaatcagagcagaactgaaggaaataaagacaaaaaaaaaaaccctccaaaaaattaatgaatccaggagctggttttttgaaaggatcaacaaaattgatagaccgctagcaagactaataaacaagaaaagagagaagcatcaaatagacgcaataaaaaatgataaaggggatatcaccaccgatcccacagaaatacaaactaccatcagagaatactacaaacacctctacgccaataaactagaaaatctaggagaaatggataaattcctcgacacatacaccctcccaagactaaaccaggaagaagttgaatctctgaatagaccaataacaggctctgaaattgtggcaataatcaatagtttaccaacaaaaaagagtccaggaccagatggattcacagccgaattctaccagaggtacaaggaggaactggtaccattccttctgaaactattccaatcaatagaaaaagagggaatcctccctaactcatttcaggaggccagcatcatcctgataccaaagccaggcagagacacaaccaaaaaagagaattttagaccaatatccttgatgaacattgatgcaaaaatcctcaataaaatactggcaaaccgaatccagcagcacatcaaaaagcttatccaccatgatcaactgggcttcatccctgggatgcaaggctggttcaacatacacaacatacacaaattaataaacgtaatccatcacataaacagaaccaacgacaaaaaccacatgattgtctcaatagatgcagaaaaagcctttgacaaaattcaacaacccttcatgctaaaaactatcaataaaataggtattgatgggatgtatttcaaaataataagagctatctatgacaaaaccacagccaatatcatactgaatgggcaaaaactggaagcattccctttgaaaaccggcacaagacagggatgccctctctcaccgctcctattcaacatagtgttggaatttctggccagggcaatcaggcaggagaaggaaataaagggtattcaattaggaaaagaggaagtcaaattgtccctgtttgcagatgacatgattgttgatctagaaaaccccatcgtctcagcccaaaatctccttaagctgataagcaacttcagcaaagtctcaggatacaaaatcaatgtgcaaaaatcacaagcattcttatacaccaataacacagacaaacaagagagccaaatcatgagtgaactcccattcacaactgcttcaaagagaataaaatacctaggaatccaacttacaagggatgtgaaggacctcttcaaggagaactacaaaccactgctcaatgaaataaaagaggatacaaacaaatggaagaacgttccatgttcatgggtaggaagaatcagtatcgtgaaaatggccatactgcccaaggtaatttatagattcaatgccatccccatcaagctaccaatgactttcttcacagaattggaaaaaactactttaaagttcatatggaaccaaaaaagagcccacatcaccaagtcaatcctaagccaaaagaacaaagctggaggcatcacgctacctgacttcaaactatactacaaggctacagtaaccaaaacagcatggtactggtaccaaaacagatatatagaccaatggaacagaatagagccctcagaaataatgccgcatatctacaactatctgatctttgacaaacctgacaaaaacaagaaatggggaaaggattccctatttaataaatggtgctgggaaaactggctagccatatgtagaaagctgaaactggatcccttccttacaccttatacaaaaattaattcaagatggattaaagacttaaatgttagacctaaaaccataaaaaccctagaagaaaacctaggcaataccattcaggacacaggcatgggcaaggacttcatgtccaaaacaccaaaagcaatggcaacaaaagccaaaattgacaaatgggatctaattaaactaaagagcttctgttctttgctggggtatctgaagactgaaaacacagcaaaagaaactaccatcagactgaacaggcaacctacagaatgggagaaaatttttgcaatctactcatctgacaaagggctaatatccagaatctacaaagaactcaaacaaatttacaagaaaaaaacaaacaaccccatcaaaaagtgggtgaaggatatcaacagacacttctcaaaagaagacatttatgcagccaaaaaacacatgaaaaaatgctcatcatcactggccatcagggaaatacaaatcaaaaccacaatgagataccatctcacaccagttagaatggcgatcattaaaaagtcaggaaacaacaggtgctggagaggatgtggagaaataggaacacttttacactgtttggtgggactgtaaactagttcaaccattgtggaagtcagtgtggcgattcctcagggatctagaactagaaataccatttgacccagccatcccattactgggtatatactgggtgtatacccaaaggattataaatcatgctgctataaagacacatgccacaccgtatgtttattgcagcactattcacacaatagcaaaaacttgggacccaaccccaaatgtcccatccaatggatagactggattaagaaaatgtggcacatacacacccatggaatactatgcagccataaaaaataatcgagttcatgtcctttgtagggacatggatgaagctggaaaccatcattctcagcaaactatcacaaggacaaaaaaaccaaacaccgcatgcttctcactcatagggacacggatgaagctggaaaccatcattctcagcaaactattgcaaggacaaaaaaaccaaacaccgtatattctcactcatagaatcagttttgaggatgtgaggaattacatgccactggcagtaattcactcagatgagagtccaattcttcctctccatgaacagcaagatgccagtgagaatggatggattaaggatacagagagggatgcggatttggagatatatattgtgtctggaattggttcctttcggtgggttcttggtctcgctgacttcaagagtgaagccgcagacccttgcggaatgaagctgcagaccttcgcagtgagtgttacagctcttaaaggtggcgcatccagagttgttcattcctcctggtgggtttgtgttctcactgacttcaggagtgaagctgcatacctgagcgttacagctcttgaaggtggcgcatccagagttgctcattcctcccggttcgtggtctcactgacttcaggagtgaagctgcagaccttcaccgtgaatgctacagctcataaaggtagtgcggacccaaagagtgagcagcatcaagatttattgcaaagagcgaaaaaacacaccttccacagcatgaaaggggaaccaaggcgtgttgttgctgctggctgggggggtgcaatcaaggctgattccaataaccttattctcttatttcagactattgaaaaatattgtccttggttccctgacaaaggttctgtggacctgttagactgggatagagttggcaccactctctgccaactcatgagagatggtgttttacttcctatttctgtttggactgactgggctcttattcgtgttgctttacttccttttcagtctggtgatactcttcaactgccacaagttaacgcggatgttgaaccactccctttacctcggtgcattggcggcatcacgggaccagaaggcggtgacccccctggacccagctttcactatcttgtgggtgtctattatttcttgacctgccgatccacctgggaacaaagaaagagccccgttgcattgcgggctgctggccagatcccgcaataa

SEQ ID NO: 126875 - DNA, 1230 bp, Homo sapiens
ggaccaagaggaacaggcccaaaaggaaaagcgagatcagagaaaggctgcagccttagtcatggccctcagacaaacaaacctttggtggttcagaaaggacagaaaatggagcaggccaatcacccggtagggcttgttatcagtgtggtttacaaagacattttaaaaaagattgtccaacgagaaacaagccaccccctcatccatgtccgctatgccgaggcaatcactggaaggcgcactgccccggaggacaaaggttctctggggagggatatgttagccaaagctggagctattatctacatgaatatggggaacaagttacccatttggtgtcacctacttgaggaaggaatctaccttgaagtctgggcattggaaggacaatttggaagggcaaaaaatgcctgcccagtccaaatcaggttaaaagatcccaccacatttccttatcaaaggcaatatcccttaaggcctgaagctcataaaggattacaggatattgttaaacatgtaaaagctcaaggcttagtaaagaaatgcagcagtccctgcaacaccccaattctaggagtacaaaaaccgaacggtcagtggagtctagtgcaagatcttagactcatcagtgaggcagtaattcctctatatccagttgtacccaacccctataccctgctctctcaaataccagaggaagcagaatggttccctgttctggacctcaaggatgccttcttctgtattcccctgcactatgactcccatgactcccagtttctctttgcctttgaggatcccacagaccacacatcccaacttatatggaccgtcttgccccaagggtttagggatagccctcatctgtttggtcaggcactggcccaagatctaggccacttctcaagtccaggcactctggtccttcagtatgtggatgatttacttttggctaccagttcggaagcctcatgccagcaggctactctagatctcttgaattttctagctaatcaagggtacaaggcatctaggtcaaaggcccagctttgcctacagcaggtcaaatatctaggcctaatcttagccagagggaccaggacccttggcaaggaacgaatacagcctatactggcttatcctcaccctaagactttaaaacagttgtgggggttccttcaaatcaccgcttttgccaactatggatccccagatagagcaagatag

SEQ ID NO: 126876 - DNA, 411 bp, Homo sapiens; identical to SEQ ID NO: 124679

SEQ ID NO: 126877 - DNA, 307 bp, Homo sapiens
tatctgtagaaaagtctcccaattacaactgaggaggtgggagaaatacctggttacaggctgtcccaggattccccggatggtaacggaccttgaggacagctgtctgggacaggagattaacactgagaaagccgcaccattgtccaggaggaagtcaatttcctggccctcaacggcaagtgattggcctgctccattttctgtcctctctgaatcaccaaggttggtttgtctgagggccatgactaatgctgcagcctttctctgatcttgcttttccttttgggcctcttcctcttgatcc

SEQ ID NO: 126878 - DNA, 691 bp, Homo sapiens
atgtccaccataactcagcgaaaggaagaaaatccttctgtcttccttgagtggctatgggaggccttaagaaaatatactcccctgtcacccgactcactcgagggtcaattgatcctaaaagataagtttattacgcaatcagccacagatatcagcagaaagctccaaaaccgagccctggtccctgaacaaaatctggaggtattattaaacctggcaaccttggtgttctatactagggaccaagaggaacaggccaaaaaggaaaagcgagatcagagaaaggctgcagccttagtcatggccctcaaacaaacaaaccttggtggttcagagaggacagaaaatggagcaggccaatcacctggtatggctttttatcagtgtggtttgcaaggacaccttagaaaagactgtccaacaagaaacaagctgccccctcgcccatgtccactatgccgaggcaatcactggaaggcgactgcaccagaggacaaagaggatggagaaccaatcaagcatgactgccaacaaattatagtccagagttatgctccccaagaggatcgcttagaagtccccttagctaatcctgaccttaacctatatactgatggaagttcatttgtggagaatgggatacgaagagcaggttatgccatagttagtgatgtaacaatacttgaaa

SEQ ID NO: 126879 - DNA, 626 bp, Homo sapiens
atggaatactatgcagccatgaaaaggaacaagatcatgtcctttgcagggacatggatggagctggaagccattatcctcagcaaactaatgcaggaacagaaaacgaaagactgcatgctctcagttctaagtgggagccgaaggatgagaacacatggacacatggaggggagcaacacacaccagggcctgcttgggggagatccatctgccccaccagcaccggctaacctccggctggccaactccaccgtcaacagtgatgggagtgtgaccgtcactatagtttgggatctccccgaggagccggacatccctgtgcatcattacaaggtcttttggagctggatggtcagcagtaagtctcttgtcccaacaaagaagaagcggagaaagactacggatgggtttcaaaattctgtgatcctggagaaactccagccagactgtgactatgttgtggaattgcaagccataacgtactggggacagacacggctgaagagtgcaaaggtgtcccttcacttcacatcgacacatgcaaccaacaacaacagaactacaggaaacagtggaagcagaaatgaccaacatggagttggggaatgagagtcacatcatcc

SEQ ID NO: 126880 - DNA, 2997 bp, Homo sapiens
tcactccaggggtcctcggtagaagttgttagctgagcttatttggggttccatttgtaagatcatctgtagcttgatggccttgatcctagaggaaacaaatttgacaagagggttaaaaatacagggcccaaaggcgaatgatagcaagatggctgccacaggacctagaaaggggagaagccatgttgcccaactccagtggttggtataagagtttgaaaggcattgtctgatttcagaagccttttcctgtaaatgccgggcagcatctcttactatcgctgactggttagtataaaaacaacactcttcgcctaagaaggtgcagagtcctcctttctcagcagtgaggaggtctaagccttggcagttttggagagtcactgctgccaaacagtctatttgggattgtagagtaaggatagattttgttatttcttgcaaactgagaaatcctttgagagtgtgtggtagtaggatactgaagtagataaactggctattccagttcctgtagcagtagccattcctagcccttctgatggctttggcagtgtaagactgccacctctttgggtttttgcactgtgtgcaataactccataatttccttgtggtatttaatggggtgcccccagaggttaggaactccctttctttccatattgcagcatgggcatgtaggattagataagcatacttgctatctgtatacacatttattctttttccttttcccagttctaaggctcgggtaagtgccactagttctgctaactgggtgctagtccttaggtatgccactggttgtggggttgtcctgtgagtctgagtaaggactccaagagctatccctgctctctctatgacatataaagcgaagttttgtcctgtgggaaggcttaaagctggagcttgtactagggcctgctttaaggtttcgaaggctgtttctgcctctggttcccattctactaggtgagtatttgccctctccatctccttgattagagtatagagggtcttggctatctcgctgtattgaaggaccagagtgcctggacttgagaagtggcctagatcttgggcctgtgcctgaccaaacagatgagggctatctctaaacctttggggcaagaccatccacataagttgggatgtgtggtctgtgggatcctcaaaggcaaaaagaaactgggagtcagagtgcaggggaatacagaagaaggcatccttgaggtccagaacagtgaaccattctgcttcctctggtacttgagagagaagggtataggggttgcgtacaactggatatagaggaattactgcctcattgatgagtctaagatcttgcactagtctccactgactgttcagtttttgtactcctagaattggggtgttgcagggactgctgcattttcttactgagtcttgagcttttaaatgtttaacaatatcctgtaatcctttatgagcttcaggccttaagggatattgcctttgataaggaaaactgatggggtcttttagcctgatttggagtggatgggcattttttgcccttccaaattgtccttccaatgcccagacttcagggttgattccctcaagtaggggacaacaaatgggtaacttgttccctgtcttcatggagataatagctccagctttggctaatatatccctccctaataagggtgtgggactttcaggcataacaagaaaggcatgtgaaaagagcaaagtctcccaattacaactgaggaggtgggagaaatacctggttacaggctgtcccaggattccttggatggtaacggaccttgaggacagtcgtccaagacaggggattaacactgagaaggtcgtgccagtgtccaggaggaagtcaatttcctggccctcaatgattaaacatacccagggctcagtgagggggtgatgacatgaacgggtgcttgccgcagtcatcctcagtcctgtcattggatcatctggttgggggcttctggcccagagaagctttgccctctgggtagtgtgacttccagtgattgcctccgtatagtggacatggacgatggggcggcttgtttctcgttggacaatcttttttaaggtgtccttgcaaaccacactggtaacaagccccaccaggtgattggcctgctccattttctgtcctctttgaaccaccaaggtttgtctgagggccatgactaaggctatggcctttctctgatctcgcttttccttttgggcctgttcctcttggtccctattttggagctgtctcctgatatctgcagctgactgggtaataaacttatcttttagaatcaattgaccctcgagtgattcgggtgacaggggagtatattttcttaaggcctctcttagccgctcgaggaaggcagaaggcttttcttcttgtccctgagttatagtggacatcattgaataattcatgggctttttcctaattccctttagtccttcaagaacacaggtcaacagatgtttatgactccagtccccatgatctgagtcaaagtcccagtggggatccatagtggggatggcttgctgaccagtaaggaatttgtccctttctttggctgtcattctatcatttacttgactaagataccaggtatctccaaactctcgggctgcagctaaagctgcattcttttcaataaaggctaggatttgatctaacaatagcatgacatctctccaagcgagatcgaatgtttgccctagaccctgtaggacatctttgtacctatcaggatcatctgaaaacttccccaggtctgccttgatctgctttaaatcagagagggagaaggggacatggagaacttttgtgtctagcgtgaaggtctgcagcttcactcctgaagtcagcgagaccacgaacccaacagaaggaagaaactctggacacatccgtacatcagaaggaacaaactctggacacaccat

SEQ ID NO: 126881 - DNA, 4195 bp, Homo sapiens
gtcggcgaggagggtccggccggagttgaaggattgaactttccggctcagtcgcggcggctgcctggtcctcagcagtgcagccccggcgcggagcagggagcctcggcccgcgcccggcgccctcgccctcgccctcgacccgcagccatggtgcccggggtgcccggcgcggtcctgaccctctgcctctggctggcggcctccagcggctgcctggcggccggccccggcgcggctgctgcgcggcggctggacgagtcgctgtctgccgggagcgtccagcgcgctccgtgcgcctccaggtgcctgagcctgcagatcactcgcatctccgccttcttccagcacttccagaacaatggttccctggtttggtgccagaatcacaagcaatgttctaagtgcctggagccctgcaaggaatcaggggacctgaggaaacaccagtgccaaagcttttgtgagcctctcttccccaagaagagctacgaatgcttgaccagctgtgagttcctcaaatacatcctgttggtgaagcagggggactgtccggctcctgagaaagccagtggatttgcggccgcctgtgttgaaagctgcgaagttgacaatgagtgctctggggtgaagaaatgttgttcgaatgggtgtggacacacctgtcaagtacccaagactctgtacaaaggtgtccccctgaagcccagaaaagagttacgatttacagaactgcagtctggacagctggaggttaagtggtcctcgaaattcaatatttctattgagcctgtgatctatgtggtacaaagaagatggaattatggaatccatcctagcgaagatgacgccactcactggcagacagtggcccagaccacagacgagcgagttcaactgactgacataagacccagccgatggtaccagtttcgagtggctgctgtgaatgtgcatggaactcgaggcttcactgcccccagcaaacacttccgttcttccaaagatccatctgccccaccagcaccggctaacctccggctggccaactccaccgtcaacagtgatggggagtgtgaaccgtcactatagtttggggatctccccgaggagccggacatccctgtgcatcattacaaggtcttttggagctggatggtcagcagtaagtctcttgtcccaacaaagaagaagcggagaaagactacggatgggtttcaaaattctgtgatcctggagaaactccagccagactgtgactatgttgtggaattgcaagccataacgtactggggacagacacggctgaagagtgcaaaggtgtcccttcacttcacatcgacacatgcaaccaacaacaaagaacagctggtgaaaaactagaaaaggtggaattcaaacacaactcccttttcaaagacgacgacccactcgcccgctggaagtcggagctcccttctatcaggatggccaactgcaagttaaagtctactggaagaagacagaagatcccactgtcaaccgatatcatgtgcggtggtttcctgaagcgtgtgcccacaacagaacaaccggatcagaggcatcatctggcatgacccacgaaaattacataattcttcaagatctgtcattttcctgcaagtataaggtgactgtccaaccaatacggccaaaaagtcactccaaggcagaagctgttttcttcactactccaccatgctctgctcttaaggggaagagccacaagcctattggctgcctgggcgaagcaggtcatgttctttctaaggtgctagctaagcctgagaacctttctgcttcattcatcgtccaggatgtgaacatcaccggtcacttttcttggaagatggccaaggccaatctctatcagcccatgactgggtttcaagtgacttgggctgaggtcactacggaaagcagacagaacagcctacccaacagcattatttcacagtcccagattctgccttccgatcattatgtcctaacagtgcccaatctgagaccatctactctttaccgactggaagtgcaagtgctgaccccaggaggggaggggccggccaccatcaagacgttccggacgccggagctcccaccctcttcagcacacagatctcatcttaagcatcgtcatccacatcattacaagccttctccagaaagatactaaactgttcaaaaagattttgtgaaattgcacagatgtgtaagcttgttgaacttcggccacgagacatgcacacttccagaggcagtgggaactgctcagaggcccggactctcctatgtgactttagtgcaggaagaacttctgtcaatcatggacgcatctggagacaagtgagaaacagtagattggtgaagacagacaccagttccctacaagcatggagaaaatgaagaataggcctgtttaatgctaaattttgttttcatgtatggtgtcgctcatttctattgaattacaacagaactcagttttccctgaatttggagcaccaaactccgccccaaaaaggagagtaacaaatacacaattcacacataacactaagcgtaaatctaatcaataaaatatatttttgactaaattattgattcgatatgaaaaatcaactaagattacacagctttgtttttttgaatctttcctaagatcatttttatcctaggtgatttttaaatgaaaatgtgtaatctaaaatataccagcgaatttaaatctaaaaatgctcctactttaagtaccttgtgctgctctttatgcaaaggtaaatcaaagttccctctataaattatgatttacaaaagacacccaagccagaggaactcaatgaaataagctgctaatcagattttaccttggagaaatgaaaattatttcttggggatgccttttaatatttgatcctattatgtgagagattttcctgatatgttatcttatttatattttcccttattttcctcaatgcagataatagcttttggtgcacttttgtttcaccatctgaaaattcacaaaacttcttgcttcaaatgaaaaaatcccaactattgagcatgtttaaatctttgcagagatttgccttttcttaatcaaagaaaggtctttgtgtgctagaatattattggtaatgttttaaaaattcctttgattgatagagaaggacagttatttgcatttaattcacccatatgctttcaaatctagtatatcttactttttggaaatgttttatgctacaaattagtgccttgtagcatgaacttaagtcaaaacgtgttatcaatatagagtgttgcagtgtatattgtaacaacctaaaacgcagagaagtttaatttaatactgttttttttcttgaaggaatactcacatacatggtttgaaatgtgcatagatatgcatgtctatataattataaatgcatgtgtatatatatgcaaatatatgtacatatacatgtatatacacacagacacatgcatatacatgaatataccttgagcatgaatccctggagaaatcgttttcgtaggctcaccaatggtgagtaaagatacagctcttttaaaggtcataaggataatatattttccccatcaatgctgattctgagaaaagagcaatttatcaaaattaaacactgtaaaagaaaggtgtccatatgtctttacctacctaagtaaaacaggaagaaaatcagtaacattatccttaggttttgacaatggtacttgcttcttgttgttttattgtttcctgaattcatgcagatgcctggccattcctgggaagagtggataactcagaagtcactgtactccacagagcctcactgcagtgtcttaaaggtagatgcaaattaaaatgcaggaaaaaaaaacttttctgatgttgatgcatgtctttgggaaacacatttataaacatggatacctgataatagatattgaaacccatttcctgtgtgttaaaatatttaaaaagtggatattccaggaatgttttgcagctttgtacaagtaacataaattggagacctcagaatgaaagttcatgttggttctgaatggttcactgcagctcctgtcacaagctgggatggatttatcacattgagttatgaaattacctggttctaagaatttttgagggaattcc

SEQ ID NO: 126882 - DNA, 1413 bp, Homo sapiens
atggagacaccagggaaagcatttaggcaaatagacaggaaaacgtcagcagcatcatggttttcctttccaagaaccagtgtgactgggctgaggggtggaggtgataaaatgaaaggtgctctgggagatccatctgccccaccagtgccagctaacctccggctggccaactccaccgtcaacagtgatgggagtgtgaccgtcactatagtttggggtctccccgaggagccggacatccttgtgcatcactacaatgtcttttggagctggacaatcagcagtaagtctcttgtaccaacaaagaagaagcagagaaagactacggatggggactggcaggcagcaccacctgcgactgggtgcaggatccactgggtgaagccagctgtgctcctgagtctggtgggaacttggagaacctttatgtctagccaagggattgtaaatacaccagtcagcactctgcatctagctcaagtgagaccaagaacccaccaattctggacagattttggtgaccacgaagggaccatcaccaatcgccaagcgagttcagggactaaataccaggcacctgtcggccagttaaaagcgactagcatggccgctggactaaagacacaggtgtcatgctttctgggaaagggctctctaatgacccccggactgttcggcgttgggaccgttggaggacaggcaagggtgcaggttttcaagaatgtgtcagtaagtgctgctaaatccgaccttccctggtcctccatctggtctgggaggaaaactagtgtttctgctgctgcgtcgctgttaggaggaggagaatttggcccaacccggatacatatccccttctccctctctgatttaaagcagatcaaggcaggcctggggagattttcagatgatcctgatagggaccaagaggaacaggcccaaaaggaaaagcgagatcagagaaaggctgcagccttagtcatggccctcagacaaacaaaccttggtggttcagagaggacagaaaatggagcaggccagtcacctgagagagcagggatagctcttggagaccttattcagactcgtgggaaaaccccacaaccagtggcatacctaagtaaggaaatagatgcagtagcaaaagtctggcctcactgtttaaagttagttgctgcagtggccgtctttgtgtcagaggctatcaaaataatacaaggaaaggatctcactgtctggactactcatgaggaacctgtgggatcatcagctcagcagtcccaacatcagccagaccagcctcgatacacctgtaaactgttggaggacttgcacctcctatttcggaaagaaatatcccagacgaaaaaggctcctatcctttttgatcctgtgatcaaaagagaaaagtag

SEQ ID NO: 126883 - DNA, 460 bp, Homo sapiens
  misc_feature (1)...(460): n = a,t,c or g
ttcccgggtcgagatcttctcttacctcccggtacgggaccggatccgcatctccagggtctgtcaccgctggaagaggctggtggacgaccggtggctgtggcgacatgtcgacctgacgctctacacggtacgcgcagctggccgggcgggcctgggccgcggtcgcggtgcccggaccccgaagaccacctctcccaccctgggactgtgtgtcggggcccgggctggggatttagagccaggcgatccggggcctatctcggcatcatcgcttaccagctcctcttcgacctcaggnnnnnnnnnnnnnnnnnnnnnnnnnnnnnnnnnnnnnnnnnnnnnnnnnnnnnnnnnnnnnnnnnnnnnnnnnnnnnnnnnnnnnnnnnnnnnnnnnnnnnnnnnnnnnnnnnnntttatcattcgataaatgctaatttatgactatgttatcaagttt

SEQ ID NO: 126884 - DNA, 571 bp, Homo sapiens
gcgactttggcgaactgccggactcggtcctgctcgagagtttctcttacctcccggtacgaccggatccgcatctccagggtctgtcaccgctggaagaggctggtggacgaccggtggctgtggcgacatgtcgacctgacgctctacacgatgcgacctacagtcatgtggcacctccttcgaaggtacatggcatcccggctccattccctgcggatgggtggctacctgttctctggctcccaggccccccagttgtcccctgctctgttgagagccctgggccagaagtgccccaacctgaagcgcctctgcctgcacgtggccgacctgagcatggtgcccatcaccagcctgcccagcaccttgaggaccctggagctgcacagctgcgagatctccatggcctggctccacaagcagcaggaccccaccgtgctgcccctgcttgaatgcatcgtgctggaccgcgtcccgccttccgtgacgagcacctgcagggcctgacgcgcttccgggccttgcgctcgctggtgctgggtggtacctacgtgtgacgagacagggt

SEQ ID NO: 126885 - DNA, 515 bp, Homo sapiens
aaccggaagcggaagtgcgtgtcggcgggatcatggcgactttggtcgaactgccggactcggtcctgctcgagatcttctcttacctcccggtacgggaccggatccgcatctccagggtctgtcaccgctggaagaggctggtggacgaccggtggctgtggcgacatgtcgacctgacgctctacacggtacgcgcagctggccgggcgggcctgggccgcggtcgcggtgcccggaccccgaagaccacctctcccaccctgggactgtgtgtcggggcccgggctggggatttagagccaggcgatccggggcctatctcggcatcatcgcttaccagctcctcttcgacctcagggcctcaatttcctcatccctgcaatggggataaaggacagtacctgcctcacggggctattatgggacttcactgagatcacgcagggaaagggcttagaacagtctggcacatatttatcattcgataaatgctaatttatgactatgttatc

SEQ ID NO: 126886 - DNA, 1111 bp, Homo sapiens
atggcgactttggtcgaactgccggactcggtcctgctcgagatcttctcttacctcccggtacgggaccggatccgcatctccagggtctgtcaccgctggaagaggctggtggacgaccggtggctgtggcgacatgtcgacctgacgctctacacgactctagagtttaacgtcttcagtgggaatcagcatggacgttcagaacagtccctccttaaacacaaagacatttcctacctcatacctcataatcacatgatagaagggcctgtgcgacagaggaagaccctgacctataaaaacgcaaacaaagtagtgaagagagatgtatcagttatctactgccgtataacaaaccaccaggaaacagcgcatcctcgtacaagccgcatgaatgcagaggaaagcgagcagaggcatttcgaggtcccgcccaacagactccctccatcgtggtcccgcccccaccccaagccgccgccgggttctgcccccacggtgcccagtgaagccggagggacggggtccaaccgttgtcggctgcgcggaaactgggacttctccccagggtcgtggaggacgcggccgccgaccctcccaccgcctcacgcctcggagaccgggtccagagccctcagccgcttccgagccccgagaggggaatcagaagtgcgcgtgatcagagcggcacccccttcccaggaaccgcagctgaaccaacggtttcccctgcaccagcctttgcgaccagaccagaagaccatgtagcaccaaaaagatagctgcaaagcggaataaagttggggaaaacaatctgctggccggaagagagtaagatgcaggaggatgattgccggttctccgcagcacgagtcagggaggccatgagatggaagagccaccccacaatgggaagaacctggagacaaggttctcccttgtctatgcccaagagaagccacccttcaggagagagtttctgagtttcatgaacttggggaacattctaaacctattcaaaatatgcttactcacagagaggtctcacaagtaggcacgtcgtccataaatgagactcgcatgttgaatatttacacagaattcagtt

SEQ ID NO: 126887 - DNA, 413 bp, Homo sapiens
gggggaacaggtgagagaggatgtgtgctgggccttggaggaagggggccgagaccgggccttacttctgtaacgatactgtgaggcatcggaaggccagcctgttgtgtccgttttgaagaatgaacggagaccagaattcagatgtttatgcccaagaaaagcaggatttcgttcagcacttctcccagatcgttagggtgctgactgaggatgagatggggcacccagagataggagatgctattgcccggctcaaggaggtcctggagtacaatgccattggaggcaagtataaccggggtttgacggtggtagtagcattccgggagctggtggagccaaggaaacaggatgctgatagtctccagcgggcctggactgtgggctggtgtgtggaactgctgcaagcg

SEQ ID NO: 126888 - DNA, 798 bp, Homo sapiens
atgaatggggaccagaaatcagatgtttatgcccaagaaaagcaggatttctttcagcacttctcccagatcgttggggtgctgactgaggatgagatggggcactcagagataggagatgctattgcccggctcaaggacgtcctggagtacaatgccattggaggcaagtatcaccggggtttgacggtgctagtagcgttccaggagctggatgccatcaattatgctatccttctggaagcatgtatctactacctgctgaagctctattgccaagcacagccctattacctgaacctgatcgagctcttcctgcagatttcctgtcagcctgagattgggcagaccctggacctcatcacagcccctaggacaatgtggattttggcagattcactgaaaacagcacgccaatgcttagaagatcctactggagatcgagagttttttcaaattcaggatggttaccttgacctctttggggaccccactgtgacccgcaaagttggcactgacatccaggacaacaaatgcagctggctggtggttcagtgtctgcaacgatccactctggaacagtaccagatcctgaaggaaaattacggacagaagaaggccaagaaggtagtccaggtgaaggcactgtatgaggagctggatctgccggccgtgttcttgcagtatgaggaagacggttacagccacattatgggtctcactgaacagtacgcagcgcccctgctcccagccatgtttctggggcttgtgtacaaaatctacaagcagaaaaagtga

SEQ ID NO: 126889 - DNA, 409 bp, Homo sapiens
atgaatggggaccagaaatcagatgtttatgcccaagaaaagcaggatttctttcagcacttctcccagatcgttggggtgctgactgaggatgagatggggcactcagagataggagatgctattgcccggctcaaggacgtcctggagtacaatgccattggaggcaagtatcaccggggtttgacggtgctagtagcgttccaggagctggatgccatcaattatgctatccttctggaagcatgtatctactacctgctgaagctctattgccaagcacagccctattacctgaacctgatcgagctcttcctgcagatttcctgtcagcctgagattgggcagaccctggacctcatcacagcccctaggacaatgtggattttggcagattcactgaaaacag

SEQ ID NO: 126890 - DNA, 876 bp, Homo sapiens
agaccagaaatcagatgtttatgcccaagaaaagcaggatttcgttcagcacttcccccagatcattagggtgctgagtgaggatgagatggggcactcagagacaggagatgctgttgaccggctcaaggaggtcctggagtacaatgccattggaggcaagtatcaccaggatttgatggtgctagtagcattctgggagctggtggagccgaggaaacaggatgctgatagtctccagcaggccctgaccgtgggctggtgtgtggaactgctgcaagctttcttcctggtggcagatgacatcatggattcatccgtctcccgccggggacagatctggtggtatcagaagccgggcatgggtttggatgccatcaatgatgctatgcttctggaagtatgtatatgtacagcaggaattgatggcgacaaggagcatgctaatggcaagaagatcctgctggagatgggagagttctttcagattcaggatgattaccttgacctctttggggaccccagtgtgaccagcaaagttggcactgacatccaggacaacaaatgcggttggctggtggttcacctgaaggagaactaccggcagaagaaggccaagaaggtggcccaggttaaggcactatctgaggagctgaatctgctggccgtgttcttgcaatatgaggaagacagttacagccacattatgggtctcattgaacagtacgcagcacccctgaccccagccatctttctggggctggtgcgcaacagaggctcctcttggcttctagaggctatccacattcccttccatgtggcctccgccatcttcaaagccagcaatgaagaacctgccttgtgttgaatccctct

SEQ ID NO: 126891 - DNA, 1190 bp, Homo sapiens
  misc_feature (1)...(1190): n = a,t,c or g
aacaggtgagagaggatgtgtgctgggccttggaggaagggggccgagaccgggccttacttctgtaacgatactgtgaggcatcggaaggccagcctgttgtgtccgttttgaaggatgcccctgtcccgctggttgagatctgtgggggtcttcctgctgccagccccctactgggcaccccgggagaggtggctgggttccctacggcggccctccctggtgcacgggtacccagtcctggcctggtacagtgcccgctgctggtgccaagcgtggacagaggaacctcgagccctttgctcctccctcagaatgaacggagaccagaattcagatgtttatgcccaagaaaagcaggatttcgttcagcacttctcccagatcgttagggtgctggacttgaggatgagatggggcacccagagataggagatgctattgcccggctcaaggaggtcctgggagtacaatgccattggaggcaagtataaccggggtttgacggtggtagtagcattccgggagctggtggagccaaggaaacaggatgctgatagtcttccagcggggccctggactgtgggctggtgtgtggaactgctgcaagctttcttcctggtggcagatgacatcatggattcatcccttaccccgccggggaacagatcttgctggtatcagaagccgggcgtgggtttggatgccatcaatgatggtnaacctcctggaagcatgtatctaccgcctgctgaagctctattgccgggagcagccctattacctgaacctgatcgagctcttcctgcagagttcctatcagactgagattgggcagaccctggacctcctcacagccccccagggcaatgtggatctttgtcagattcactgaaaagaggtacaaatctattgtcaagtacaagacagctttctactccttctaccttcctatagctgcagccatgtacatggcaggaattgatggcgagaaggagcacgccaatgcccaagaagatcctgctggagatgggggagttctttcagattcaggatgattaccttgacctctttggggaccccagtgtgaccggcaaaattggcactgacatccaggacaacaaatgcagctggcttggtgggttcagtgtctgcaacgggccactccagaacagtccagatcctgaggg

SEQ ID NO: 126892 - DNA, 464 bp, Homo sapiens
  misc_feature (1)...(464): n = a,t,c or g
atttgaaatcgattatcactctgaatacgccaagcttggcacgaggggcactcgagcttaatgatgactgttttttttgattgcttgaagctttgttaaaaacacatttcaccggctctgaaagctcttgagttgccatttgaaagaaatcttataatactttacagttacttaaagtcagaattttaaaggaaggggaaatgctggtatataacattggtttctttaatagggaatgggtactgttcaaaaaggaatgccccacaagtgttaccatggcaaaactggaagagtctacaatgttacccagcatgctgttggcattgttgtaaacaaacaagttaagtaagtagtgttgtagttctttgtggctaaccagtattccctcatatacccccttttcactttgccagttggacttatgtctttattggtcattcaagnggggcaaaggaaatatcctt

SEQ ID NO: 126893 - DNA, 1038 bp, Homo sapiens; identical to SEQ ID NO: 120543

SEQ ID NO: 126894 - DNA, 665 bp, Homo sapiens
atccttaattaaattaatcccccccccccgccctttcggccggaactgccatcttccagtaattcgccaaaaatgacggaccacaaaggggaaagaggagaggcaacccgatatatgttctctaggccttttaagaaaacaatgggagttgttcctttgggccacaataattagcgattctaataagaagggtgatattgtagacactcaagggaatggggtactgtgtccaaaacggaatgcccccacaagtgttacccatggccaaaactggaaggagtcttacaattgttaccccagcatgcttgttgccattgttgtaaaccaaccagttttagggcaaagttttttcccaagagaataaattgtgcgtattgagcacattaagcacttctaagagcccgagataagcttcctgaaaccgttttgaaggaaaatgattcagaaaaagaaagaagcccaaatgagaaaggtacctggggttccaacttaaagcgccaccttgctccaccccagaagaagcacactttgtgaagaaccaatgggaaggagcctgagcttgctggaacctattccctatgaatttcatgggcataattaggtgttaaagaaataaaataaaagacctctggactatttaaaaaaaaaaaaaaaaaaaggccagg

SEQ ID NO: 126895 - DNA, 457 bp, Homo sapiens
cagaggccatctgaagccaaagagataaaactttatgcccagattccccctatagagaagatggatgcatccttgtccatgcttgctaattgcgagaagctttcactgtctacaaactgcattgaaaaaattgccaacctgaatggcttaagaggcagtaggggacacattagaagaactgtggatctcctacaattttattgagaagttgaaagggatccacataatgaagaaattgaagattctctacatgtctaataacctggtaaaagactggggtactccagtaattaaaggggatgaggaagaagacaactaatgccacgctttccactgtgtgttaacttatttaaatgtcataagaacaatagataaattttatataattgtctattttaaagattctgtatgggccaaaagtttcttaagataaaacagatcactcattctcaaaaaa

SEQ ID NO: 126896 - DNA, 719 bp, Homo sapiens
gcggccgccacgcagtcccacaatgccccgctcgcaccaccctgagggcggagagaaaggaccgctgccggggatagggcttccgccgagagcgccgagaagtgcgcacgcgcactgaccccgcgggccctagcaaccagagcagtgacagtagcaaccgccggaatggaagctttcactgtctacaaactgcattgaaaaaattgccaacctgaatggcttaaaaaacttgaggatattatctttaggaagaaacaacataaagaacttaaatggactggaggcagtaggggacacattagaagaactgtggatctcctacaattttattgagaagttgaaagggatccacataatgaagaaattgaagattctctacatgtctaataacctggtaaaagactgggctgagtttgtgaagctggcagaactgccatgcctcgaagacctggtgtttgtaggcaatcccttggaagagaaacattctgctgagaataactggattgaagaagcaaccaagagagtgcccaaactgaaaaagctggatggtactccagtaattaaaggggatgaggaagaagacaactaatgccacgctttccactgtgtgttaacttatttaaatgtcataagaacaatagataagttttagagggttgtccgttttacagattaatgtatgcaacaacagtttcttaagataaaacagatcactcatt

SEQ ID NO: 126897 - DNA, 957 bp, Homo sapiens
atggccaatgagcctttcctgaggaagaatgggaagcgggcccggggcatgcggcacgccactccccgcagagtgctccacacgacccagattgcaggcctgctggggaggaagaagctccaggcaccatcccctgagccccagcagtcctgtgacatggtgccgttcccccccaccattggacaggagagccaactgaggaaccgggaggggggcctggccctggtgattgcccccagcttggcgggcgtggtcagatggggagagggctgtgcccagcccaaccggcctggcatctacacccgtgtcacgtactacttggactggatccaccagtatgtccccaaaaagccgtgtgcggctgccgtgagggaggagggtgcccggccgtgggtgcactgctggccccgcatgctggtgttgtccttattggtcaccaggaaaaacactgaacctccagttctgagccttggctaccccacgtgctggcgtgcaggcggccacgtctgtgcctgggaggccacatcctggctgggcagacactacccccaactcggctccgtctccgagcgccagctgggtctgaggcgtctgttctggctcttctcgcccacagacgagagggtcagggcagagcaaggccagggagcagtgtccacgggtgggggcatgttcacagcaggcggcgcaggacgacctggggtcaagtgcggatggggttccgtgggcccccgccagtgctgtggagtccgagtgggtcggctcaaggtcctgggtccccagcagccttcactgaactctgaagccagcctgcaggtgtcagacgtcaccgggatgatgctggggtggacggggccccgggcgcagggcgtgggccgcacacggtgggtgtcaggggcgagagtggctgcgtgctcgatccggctggcccagggcgagtctgcctttcctgcctga

SEQ ID NO: 126898 - DNA, 489 bp, Homo sapiens
atggaagaccaagtgaaaaagacaaggaaagagcaaccagtaagagacctagatatccaaatacaacaagctcaaagaacatctgggaaattcatcacaaaaagatcattgccgaggcacattatcatcaggttatctgaagtcaacacaaaggaaagaatcttaagagctgtgagacaaaagcaccaggtaacctataaaagaaaacctatcaaattaacagcaaatttctcatcagaaacccttcaagctagaagggattggggctttaccttcagctcccttaaacaaaacaattatcagccaagaattttgtatccagtgaaacaaagcttcataaatgaaggaaagatacaatcttttacagaccaacaaatgctgagagaatatgccattaccaagccagcgctacaagaactgctgaaaggagctctgagccttgaaacaaaacctggaaacacatcaaaacagaacctctttaaagcataa

SEQ ID NO: 126899 - DNA, 367 bp, Homo sapiens
ccacggaccaaggactaccggccggtacaggatttgcgcttgctccatcaagctacactgactttacatccaacagtacctaacccgtccacattattggtgttgccgccagctgaagacagctggttcaccttctggaacctgaaagacgctttctttcctatcagattagcccctgagaggcagaagctgtttgcctttcagtgggaagatccggagtcagagagccctgtcgagcctgattgtgtagaagtgttggattcagttgactctagcagacctgacctccgggaccaagcttgggcatcagtagactgggaactatacgtgtatgggagcagcttcttcaacccccaaggagagagag

SEQ ID NO: 126900 - DNA, 190 bp, Homo sapiens
ctaatatccagagcgaaagaggatgatatgactctcaatatcgcagagggtgtacacccctcctataatattgttctgaataccctccacactttggcatctctgtgaagtccacttggagaccttcaaagggggctgctccataagctcgtatgccgggcggaacggctggaccttgcctcgcatcatg

SEQ ID NO: 126901 - DNA, 2379 bp, Homo sapiens; identical to SEQ ID NO: 117674

SEQ ID NO: 126902 - DNA, 977 bp, Homo sapiens
atgaggggagctcagaaggccacaaacgttaacaagctctctgaggacattcagggtaaagaagaaagtccaacacaattctacgagagactgtgggaggcctatcgtatgtatactccctttgatcctgatagccctgaaaatcagcgcatgattcccatggctttagtccgtcaaagcgcagaagacatgagaagaaaactgcagaaacaggctgggcttgcagggatgaatccatcccaattactagaaatagctagccaggtgtttgtaaacagggatgcagtaagccgtaaggaaaacggcaaagagaatggaggtcaggcccggcgatatgccgacctgttttcacggaccaagaactaccagccggtacaggatttgcgcttgcttcatcaagctaaactgactttccatccaacagtacctaacccgtccacattgttggggttcccgccagctgaggacagctggttcacctgcttggacctgaaagatgctttctttcctatcagattagcccctgagaggcagaagctgtttgcctttcagtgggaagatccggagtcaggatggcccccctgttggagggccttggcagcaactgccctgctagtacaagaagcaaataagctgactcttgggcaaaaactgaacattaaggcctcccgtgctgtcgtgactttaatgaatactaaaggacatcattggctaacgaatgccacactcaccgactaccagactttgctctgtgaaaatccccgtataaccattgaagtttgtaacaccctccaccccgccaccttgctcccggtatcaaagagccctgtcaagcctggttgtgtagaagtgttggactcaattgactctagcagacctgacctctgggaccagccttgggcatcagtagactgggaactatacttggatgggagcagcttcttcaacccccaaggagaggtggagggtatgcaggg

SEQ ID NO: 126903 - DNA, 811 bp, Homo sapiens
ctaatatccagggacggagaggatgatatcactcccaatatagccgggggtgtacaccccttgtgtgacattgctcctaaagcgcagcgggggagaggaagatattacagccaatatcgcaggggatgtacacccccttgtgacattcttccttctatccctgactttccatccaacagtacctagcccgtccacattgttggggttgctgccagccgaggacagctggttcacctgcttggacctgagagacgctttctttcctatcagattagccccggagagccagaagctgtttgcctttcagtgggaagatccggagtcagcccttgccaaaacggtgaggcagcgttgtgtcagctgccgacagcatcatgcgaggcaaggtccagccgttccgcccggcatacaagcttatggagcagccgcctttgaagatctccaggtagacttcacagagatgccagagtgtggagggaataagtatttaccagttcttgggcgtacctactctgggtgggtggagacctatccaacaagagctgagaaagctcgtgaagtaacccgtgtgcttcttcgagatctgattcctagattggaactgcccttccggatcggctcagataacgggcctgcgtttgtggctgacttgctacagaagacggcaacggtattggggatcacacggaaactgcatgccgcctcccggcctcagagttccggaaagggtattcagaacaataggacaggaggggtgtacaccccctgtgatattgagagtcatgtcatcctctttcgctctggatattag

SEQ ID NO: 126904 - DNA, 1267 bp, Homo sapiens
atgaggggagctcagaaggccacaaacgttaacaagctctctgaggtcattcagggtaaagaagaaagtccagcacaattctaccagagactgtgtgaggtctatcgtatgtatactccctgtgatcccgatagccctgaaaatcagcacatgattcacatggctttagtccgtcaaagcccagaagacatgagaagaaaactgcagaaacaggctgggcttgcagggatgaatccatcccaattactagaaatagctagccaggtgtttgtaaacagggatgcagtaagccgtaaggaaaacggcaaagagaatggaggtcaggcccggcgatatgccgacctgtttagccctgtcgagcctgattgtgtagaagtgttggactcaattcactctagcagacctgacctccgggaccagccttggccatcaggagactgggaactatatgtggatgggagcagcttcttcaacccccaaggagagagaggtgcagggtatgcagtgataaccctggacactgttgttgaagccacatcgttgccccaggccacttcaggccagaaagctgaactcattgctttcattggggccttagaactcagtgaagcacctgatcttgtacctacttattctaaagaagaaaatgactttctccaggcagagggaggacaagtgatggaggaaggattgattcggttaccagatgggagagtagctgtgccacagctgctaggagctgcagttgtactggctgtccatgaaaccacccatctaggtcaggaatcacttgaaaagttgttaggctggtatttctacatctcgcatttgtcagcccttgccaaaacggtgacccagcggtgtgttacctgccgacagcataatgcgaggcaaggtctagctgttccacctggcatacaagcttatggagaagccccctttgaagatctggatccaggtggacttcacagagatgccaaagtgtggaggtaacaagtatgtactagttcttgggcgtacctactctgggtgggtggaggcctatccaacacgaactgagaaaactcgtgaagtaacccctgtccttcttcgagatctgattcgtagatttcgaccgcccttatggatcggctcagacaacgggcctgcatttttggctgccttggtacagaagacggcaaagggtattcagaacaatattacaggaggggtgtacaccctctgcgatattgacagtcatatcatcctctttcgctctggatattag

SEQ ID NO: 126905 - DNA, 996 bp, Homo sapiens
atgctgacaggaggcgtgagagactcccgaatccgagacaaaggactttattatcacagcaacagcaatagccagacaatcaaggtttttgcaccagtgccctcagcctcagtttccacaggaccacatgaagagggccagccacggaccaaggactaccggccagtacaggatttgtgcttgcttaatcaagctacactgactttacatccaacagtacctaacccgtccacattgttgggtttgctgccagctgaggacagctggttcacctgcttggacctgaaagacgctttctttcctatcagattatcccctgagaggcagaagctgtttgcctttcagtgggaagatccggagtcaggtgtcactaatcagtacacttggaccgggcttccccaagggttcaagaactcccccaccatcttcgggaaggcgttggctcgagaccatcagaagtttcccaccagagacctaggctgcgtgttgctccagacccccatcgcattggcgggaggcatcccccaggaggaggggactgagagccagcccctcttccccccctggctcttaggacccccatcacagcggggggaggcaccccccgggaggcggggactgagaaccagcccctattccccccctggctttgggaccctcatcgcagagagccctgtcgagcctgattgtgtagaagtgttggactcaattgactctagcagacctgacctccgggaccagccttgggcatcagtagactgggaactatacgtggatgggagcagcttcttcaacccccaaggagagagagaggctcgaaaagcagcatctgccccctttcgggcatcagtgctccctcaagcacctgatcttggacctacttcttctaaagaagaaaaggactttctccagggtattcagaacaataggacaggaggggtgtacaccctctgcgatattgagagtcatatcatcctctttcgctctggatattag

SEQ ID NO: 126906 - DNA, 1950 bp, Homo sapiens
ccatcctaatacgactcactatagggctcgagcggccgcccgggcaggtgttggctggaggggctgctgctgggaacacctggagtctccgcgggcagatctcatattttggattctggatatattataatgagtgacactttgacagcggatgtcattggtcgaagagttgaagttaatggagaacatgcaacagtacgttttgctggtgttgtccctcccgtggcaggaccctggttaggagtagaatgggacaatcccgagagaggaaagcatgatgggagccacgaagggactgtgtattttaaatgcaggcacccgacaggaggatcctttattcgtccgaacaaggtaaattttggaacagactttcttactgcaattaagaaccgctatgtgttagaagatggaccagaggaagatagaaaagagcaaattgttacaattggaaataaacctgtggagactatcggttttgactctattatgaaacagcaaagtcagctgagcaagttgcaagaagtttctctgaggaactgtgcagtaagttgtgctggtgaaaaaggaggagttgctgaagcatgtcctaatatcagaaaggtagatttgtcaaaaaacctgttgtcatcatgggatgaagtgatacacattgctgatcagctcagacacctggaagtccttaatgtcagtgaaaataaactaaaatttccctccggttcagtattaactggaacgctttctgtactgaaggttttagtcctcaatcaaacaggaataacgtgggctgaggtgctgcggtgtgtcgcggggtgcccaggcctggaggaactctaccttgagtctaacaacattttcatttccgaaaggccaacagatgttctccagacagtcaagttattagatctttcctctaatcaattaattgatgaaaatcagctgtatctgatagcccacctgcccaggttagaacaattaatcctctctgacactggaatttcttctctacattttccggatgctggaattgggtgcaaaacggtccatgttcccatccttgaagtacctggtagtaagacgacaatcagatatcacaatggtcgtttttcaatgagctagagaagttaccaagtctacgggctttggtcctggcctaagaaaccccctgaccaaagaggacaaagaaagcagagacggcgcgactactcattatcgccagccattgggcagctgaagacgctgaacaaatgtgagattctccccgaggagaggcggagagctgagcttgactacccgaaaagcttttggaaatgagtggaaacaggctggtggacaataaggatcccggaaaaaaacagactcagcgaagaattcctcacagcccatcccagataccagttcctctgcctgaaatatggtgcacctgaagatttgggacttcaaaacacagcaaccacttatgctgaaaaaccagctactaacactgaagataaaattaccctcatcaactttgattcagaaagtcctgggagaaacaactgccgggggttccatgacaattcaaaaggtgaaggggattgctgtcacgtcttctcaaagttcctgtgtcagaccttctggttgtcctatgaaagtcccaaaaagccgggcagagaaatcgagcttggaaaatgacctaaagtcattacagttttattctgtggaaaatggagattgtctattagtgcgatggtgacaaccaactaataaaatttaaagaccacactgcttatcgtgtctggggttcaccggaaataaatgattcactggaacaattctactgtcaaaacaaagggggtttacaacttgtcctaagtataacaagggatgtattttttgttgggaagtgaccatttctaggcttatacataatagcaataataaaggctttgaacctacagaaaaaaaaaaaaa

SEQ ID NO: 126907 - DNA, 1709 bp, Homo sapiens
atgatggcaattcaatgtgataagtgctctgagaaaggaatgcacaggatgtttgagcagcccaaagcagggggctccatgacaattcaaaaggtgaagggattgctgtcacgtcttctcaaagttcctgtgtcagaccttctgttgtcctatgaaagtcccaaaggcaagcccttaaagaagaagacaagagatacagggaaagctaaagtagtgttcagggtggtggaacccactaacaaaacaatccgctgggcaccgctacctgccctttttcactcatgggagatttctgagactcagagggataagagatttgcaaagcgtgagacacaaacagttgcagatacagacagaacacttgctttctcagaccggcagatgcatacaatggcaaggccacctgatacaccagtcctgttcatttggaaaagggacaactccttcacattcacaagctgggctgaaggtgatgctctcttacacaaccttcattctcgccctcaaagacttattgatcatataaggaatctccatgaggaagatgccttactgaaggaggaaagcagcatctatgatgatattgtttttgtggatgttgtcgacacttatcgtaatgttcctgcaaaattattgaacttctatagatggactgtggaaacaacgagcttcaatttgttgctgaagacagatgatgactgttacatagacctcgaagctgtatttaataggattgtccaaaagaatctggatgggcctaatttttggtggggaaaactgaattgggcagttgaccgaaccggaaagtggcaggagttggagtacccgagccccgcttaccctgcctttgcatgtgggtcaggatatgtgatctccaaggacatcgtcaagtggctggcaagcaactcggggaggttaaagacctatcagggtgaagatgtaagcatgggcatctggatggctgccataggacctaaaagataccaggacagtctgtggctgtgtgagaagacctgtgagacaggaatgctgtcttctcctcagtattctccgtgggaactgacggaactgtggaaactgaaggaacggtgcggtgatccttgtcgatgtcaagcaagataacagggacttgaattagcagagtctaaattcaggggcaggcaaacgataatctgagtgcaagtctgaggagtcccagggtttagcagtagactgtatggtctttcaagagagttccagactggcactttcacccagaaccaatgcggtgtttcttaatgtttgcacaaatttccttaaaaatcaacttgtactgtagcataagaaaagtttttatttatctattggaagattatcagaaaaataccaagttattttataaaagaaaaaatatttctaaatcctgatgcattgtggctaattagtaattcaccattacctatagtttttggttaaaacttggcctagttcagaaatctgtagtagtaactgagagtttgaatttcaacctggattgcaggatagctctgtagagctaattaggataattatcagacaaaaaggaactcacaggaatgctgtgtgatcatgtgatcacatatttgagcagtggtcacttataccaaagtttggggtttctggaaataatgtcagattttgtggatctctgaagtgggcaacttgaactaacttgaagaggaacctcgtgc

SEQ ID NO: 126908 - DNA, 621 bp, Homo sapiens
tcaggtttttgttccacttccctgactcatgtccagttttgaaattgcattccgaagagttatgcagtcatcattcttgtcttcattcatatcagtttcaattgctgacattgtaaagacgctcctcattcgcccctcccagtaggggctgactgacacctcatacaggcaggtgccctctgggatgaagcttccagaggaaggatcaggcagcaatatttgctgttctgcagcctccactggtgatacccaggcaaacagggtctggagtggacctccagcaaactccaacagacctgcagctgaggaaccatctgactggtgacgagcaagtgattccaggatcaaactctcattggcaccttcccctccaggcccgtaggtctttttctctgtggagacagagacttctgcctcaccagcaaggttcctcagtggtagaaatttattccaggagccatccaaaatgtcacaggaaggtgcctttagtgattgaggaaaagctattggctgatcaagaagctgcaattcacaaagaaactgcaacatgcatttgttttcatgcagttgaccatttttatttcttctttcgaaaaatgtcaattcaggtcctttgtccat

SEQ ID NO: 126909 - DNA, 2505 bp, Homo sapiens
ttaagtaaggatatcaaacagatagatggtaccggctcggtgcaaaaataggtggtacccccccacattagtgagtgtactagtccgggatgcagctccttgtccggcagccggttgcccgccgggtccgtggcatacgggatgcggatgtacaggtctggtgcgagggtgcgcacactctccagcctgcccgtaggcgctgtagccgtattcccgcgtctgtcgcgggccgctgatgcgcaccaggtcgccgttgtcactccacccgtagtcacggtcatataccaggctgttcaggtgctggctctgtaactggcctgcgggggtgtatgtgctggtcagttcgtatgcggcattactgcctgccatgctgccgaagctgcgcaccgtctcacggtgcagcctgtcccgcgtatactcgaccagcggcgttccgcccagcttcattcccgccaggtaaccgctgccatacgtcagccactccaccggcggcaggctgtccggcgtgacgcggtttgccagcccctgctcgttgtatgcgtgtttcgtctcatgctgccacagcagttcccccgtctccgggttctccaccgtctggcattcgccggtcaggcggcctttatcgtcatagccatcgtggacggcaacacggtggccttcgctcaggtggctgatgtctgtcagccagccgtggccatcatactggcactgctctgccggttcgccgttcaccgtgcggtgagtgatacggtccgattcatcgtagtacccagaggatgacaagtccctcatcctcacagccggtccagcgcatcgtaactgaagacgctgtggctgccgttctcgttggtcaggctgatgacacgtccggcagcatcgtactccatactgcgcgtcagcccgccctgcgtggtgctgaccgcctttccgccacgcatcgtactgtgtctcgctccggttgccgtccggggtgataacggcagtcaggtcgcctgcggcgttgtattcataccgcttgaactccatggatgcacgttcactgccgagtttttctgccagcgcttcaaattttcgcggcttatcctgaccaacaacaaataaaagcgtattgtgacgtaatgattccggtaacgatgccaaagcttcaattgagcgatctacacctttacggccaaaatctgatccaacctgcagtaataagttttgttgctcttttatgccatttttctggcgataaatttcacggctgtttgggatttgctcactgtattttctgtccggataaataccgggaggaagaatttgaaaacgttcaggttcagtttgataatgcttctggaaatcggcgatttgcttatcggtcagcatcataagtttcgtcgatttaccctgctcgaaagtcgctcgctcaaatgcggcataatggcgatatcgtgatgttaaacgatataaaaaacctttttcttgcgcaactttctcggcgtaacaaacatcagcggcaaaataaaaatccaggccaggcatcttaattaaacccacaacgcgatctgcgggatgctctttgaaatgaatttgtacccaacctaaaattctgcattgcgtccacgccacacactcgccgggggcaccacaggggctttttccccccttaaacgttttcaacacccaaaaaatcgtgctagccctcccagagccttcaacttgaactggttgctccttaactttgttatacaactgtagcctttctatgtctttcactgtcatcttgtgttgaagtgcccatttcccaaattccattatcttccactttctttgcttgtacatcaagtagcttccagccatggccctgggcaggtcccatacgttttcaagcccgtgtctaggttccaccaagtctttagcccatttgtgtacaaatttctttctcttggaaatcatcgacggtccagaagaacaggccggaagcaaccaggggccaccgccaacaccagagaccaccgcggtcgcgagacactgacaccagcgggttcgacaacacacgccatcacatccgaccagacccattgttctccaagttgttggaatctgcaccgtgcaaagatcatctgcagattcatctgctgaactgccaatgaagtcaaagttaaggcagttaaggaccagtttcaagacctgcattaccagattttgctgacattgatcctgaagatttaaaggtttggcaaacacctcctgtccaagcttgcagaggtggcagggggtggatgtgatgggtctgtatgagctccctgcagagatgccacgatgacctagcaacagattcaccctgaggcagcagccgagagccagagcagggaatcctggctgtgaggtgtagaagtcttcctccttgttttgtaaacttctccgagttgtgccgttagtcaatttccttcgaccatgccgacgatgtagaaagcccggctcttgtttacactgccagtttacactgtttctccaagccat

SEQ ID NO: 126910 - DNA, 765 bp, Homo sapiens
atgaataatactaaacttattaatcagcagagtgaaaactctgaagaaagcagtggttctctcagcacacgttcaaactccgagaacgaacagaccacctcctcaagcgggtccctcaccctgtgtagcctgactgggaaacacctcccagtaggggctgacagacactcaaacaggcaggtgaccctctgggatgaagcttccagaggaaggatcggcagcaatatttgctgttatgcagcctctgctgttaataccaagacaacagggtctggagtggacctccggcaaactccaacagacctgcagctgagggggagtgaacgcttacgtcttgctggcggcgttccaggtgtttgccaaacctttaaatcttcaggatcaatgtcagcaaaattggtaatgcaggtcttgaaactggtccttaactgccttaactttgacttattggcagttcagcagatgaatctgcagatgatctttgcacggtgcagatccaacaacttggagaacaacaaagaagtggaagataatggaatttgggaaatgggcacttcaacacaagatgacatgaaagacatagaaaggctacagttgtataacaaagttaaggagcaaccgttcaagttgaaggctctgggagcctggaacttggtgccctgtgtcgcagctgctccagctgtggctgaaaggggcaatgtagagctcaggccacggcttcagagggtgcaagccccaagccttgcaccttccatgtggtgttga

SEQ ID NO: 126911 - DNA, 681 bp, Homo sapiens
atgtgggaaaatttggaacctcctagagacttgctgaatgactttgacaaaaatgctgatagtgttttgaacaataaggtccaggcagaggtggtctcagatggagatgaggaacttgttgtgaactggagcaaaggtcatgattcctttgatggatctgggcaaagtcaattcggaaccttctggaaaggattcactatgatagatgccactaaggacattcatgattcaccagaggaggtaaaaatagcagcattaataggagtctggaagaagttgattctgaccctcataaatgactttgaggggttcgcgcccttagcagaggaagtaaccacagttgtggtgaagatagcaagaaaactagaattacaagtggagcctgaagatgtcatgctgatgcaagatgtgggctcccatggacttgggcagctctgcccctgtggctttgaaaggccacaactcttacgtgggaccttgcagaagagattccccaaccaatacctttacggcgctgcctccctgatgggctgggttctaaacagcagtgccttccccatctgctcagtccttactcacctgggcaccatcctcccggttggtgttgagtgcctgcagcttttccaggtcaccaggcctgtgatggaaggggctgccatgaagacctctggcatgccttag

SEQ ID NO: 126912 - DNA, 497 bp, Homo sapiens
tgaaccgcacactctgccacgccctagcgaccgctactttcgcttacatccattctcttatcgccacgttcgccgacttcacccgtcaagctctacatcggcgctacactttaggtctccgatatagtgctctaccgcacctcgaccccacaaaacttgatttgggtgatggttcacaatatgaaaaaatcttcgaaatgcttgaaggagtgcaaggacctactgcagtcaggaaacgattttttgaatccatcatcaaggaagcagcaagatgttctcatcgcagcagacacccaagctcaactggccgctgttacgagtatgtcaccgtatactctgagattgcgccgaataccgcctcacagcgatccatgacgtgtctgtcctggtacagccagtacgccctccgcagtgacacggttagcgacgcccccgcgagatcgaggatccaccagagaaaagcactgtcatatgtcgcttacacgcgctccgtgtaa

SEQ ID NO: 126913 - DNA, 533 bp, Homo sapiens
ctgcagaaaccacgactgtaatagtatttacctaatgggttaataatatctaccagcacaggtgggaatacaaaataaccaaaacacaagttatcctttcaaataaaatgctttgggaaaaagaacatcttttactaacagaaatttcttagcctctggaaggctatttgattcggtaacatatgccaggagacttcagcaatatcctgctccattgtagaaaacagcaatctgatccttttctctcctcaatcattaacgagattatgcatttggggtgtgataatcctccagggacaagtattctcaaatcatacgtttcagtttcttcttaaggtgcttaacaaagtctcgtctcatacatcttgctgcttccttgatgatggattcaaaaaatcgcttcctgactgcagtaggtccttgcactccttcaagcatttcgaagattttttcatatttttgtccaacgcatcggagttccttcactaatttacgttttatatcagcattaatttctcgttggcttttgggag

SEQ ID NO: 126914 - DNA, 410 bp, Homo sapiens
atcaccggacccttgggtctccacatacaagtctacttgtcacattgcccaagaaattgctgagaaaattcatcttcgaaatcagtatgaacgaaaaggtgaataggctccaaaggtccaacctgatgagcgaagacgctaatggaggagcacccaacccttggctctttgaggagccagaggagaccataggctggggttttgatgaaatccgtcaacagcagcacaatattatccgctaacaggacgcaggccttgatgccctttcctctatcataagtcgccaaaaacaaatggtgcatagaaattggtaatgaattgcatgaacaaaatgagataattgacgaccttgccaacctaatggagaacacagatgaaaaacttcgtaatgaaaccaggcgggtaaacat

SEQ ID NO: 126915 - DNA, 1403 bp, Homo sapiens
agataattgacgaccttgccaacctagtggagaacacagatgaaaaacttcgcaatgaaaccaggcgggcccttgttagtgtaaaccttggagagctccaacctggctctggagcaggggtgcccaacccctgggccaggactggtaccggtctgtggccttttaggaactgggccgcacagcagcagctgctaaaagggggaaaaattaaagcaattcatactcctggtgacttactgctgcagaataattggtttctgtttgcaaggaacattatcacagcaaagcccagaaaacagaaagatgtcatggaactcaatctgtcagcatctcagtcttacccaactatctgggcttcgtcagagatctcctataagaaagagaaatatggagaaaccaaggtaagaaagatgctcttcttgagcatcataagcaaggagaacagcacagaagaagctggcttcttcactgcacgccctgttttgaccacatctttctccaatcagtgggttgtgactggtgctcagaaaacaagtcctgctgatctcctacctcataaccttgaaaataagttggagggtgacactaataaccaagataaagaacaaaaggaatggaacaggtttgtggggaaagatactgagccgtgttttagacatgttgcatttgaaggaccgttcagcaatggctgcttttgcactgtaactgcaatggtgaatagctgcaacacagatcacactttctggggcacaaagcttactatctggccctttggtgacaaggtcagtgatcctccaaagataaaagaaaaacactgtgccacagggagctgcaaggaactcccgcagatcaaagtggagcctctgggaaccacccaggctttggggacacagggaaagctcctttgcctggcagaaattccccttggccacactcgctcacaccttatacacagccagatgggccagttcaaagtactcagcatgccaaagtgccatactctggggtatcgcgttctgatccctgacgggcacctaagaataaacaatagtgggaaactgttaattccaccccgcttccaggccctaaggaagttgaaaagcgtgtctgctgcctgtgaggttctttcctttcttgctgaaggctgtaactctactccggcaattcctgctcctctggccaaagaaaaactgcttctggatcaatctaacctccaggatatactgacatcattcctctgcttttcagttgagctgactcgtgctatggacccaagggctgtagcacacagaactgcactcctaggaccagtggctgctgactcctcagagttctcacctgaacagcaacaaaagaaaggccctaaaagcttccagagtgaaaaacgaacaatacggcagtaa

SEQ ID NO: 126916 - DNA, 846 bp, Homo sapiens
atggccccggacccctggttctccacatacgattctacttgtcaaattgcccaagaaattgctgagaaaattcaacaacgaaatcaatatgaaagaaaaggtgaaaaggcaccaaagcttaccgtgacaatcagagctttgttgcagaacctgaaggaaaagatcgcccttttgaaggacttattgctaagagctgtgtcaacacatcagataacacagcttgaaggggaccgaagacagaacctcttggatgatcttgtaactcgagagagactacttctggcatcctttaagaatgagggtgccgaaccagatctaatcaggtccagcctgatgagtgaagaggctaagcgaggagcacccaacccttggctctttgaggagccagaggagaccagaggcttgggtttttgatgaaatccggcaacagccgcagaaaattattccaagaacaggacgcacgccttgatgcactttcctctatcataagtagccaaaaacaacatggggcaggaaattgggaatgaattggatgaacaaaatgagataattgacgaccttgccaacctagtggagaacacagatgaaaaacttcgcaatgaaaccaggcgggtaaacatggtggacagaaagtcagcctcttgtgggatgatcatggtgattttactgctgcttgtggctatcgtggttgttgcagtctggccgaccaactgatggcagtaaagagaccaccagcagtgacacctggcaatgacagatgcaagcccaacacccttttggtacgcaaaacctgctctcaataaattcccccaaagctctgaaaaaaaaaaaaaaaaaactcgtgcc

SEQ ID NO: 126917 - DNA, 939 bp, Homo sapiens
atggcggcgctctacgcctgcaccaagtgccaccagcgcttccccttcgaggcgctgtctcaggggcagcagctgtgcaaggaatgtcggattgcacaccctgttgtgaagtgcacctactgcaggactgagtaccagcaggagaggctagagtgcaatggcacgatctcggctcactgcaacctccacctcccaggttcaagcgattctcctgcctcatcctcccgagtagctgggattacaggcattaaaaccaatacaatatgcaagaaatgtgctcagaacgtgcagttgtatggaacgcccaaaccttgtcagtattgcaacataattgcagcatttattgggaataaatgccagcgctgcacaaattcagaaaagaagtatggaccaccctattcttgtgaacagtgcaagcagcagtgtgcatttgacaggaaagatgatagaaagaaggtagatgggaaattgctgtgctggctgtgcacactttcatacaaacgggtccttcagaagaccaaagagcagaggaaacacctgagtagctcttctcgtgctggccaccaggagaaggagcagtatagtcgcctgagtggtggtggccattataacagcttctccccagacctggctctggactcaccaggcactgaccactttgtcatcattgcccaactgaaggaagaagtggctaccctgaagaagatgttgcatcaaaaggatcaaatgattttagagaaagagaagaagattacagagttgaaggctgattttcagtaccaggaatcgcagatgagagccaaaatgaaccagatggagaaaacccacaaagaagtcacagaacaactgcaggccaaaaaccgagagctcctgaagcaggcagctgctttgtccaagagcaagaagtcagagaagtcaggagctataacctctccatga

SEQ ID NO: 126918 - DNA, 1026 bp, Homo sapiens
atggcggcgctctacgcctgcaccaagtgccaccagcgcttccccttcgaggcgctgtctcaggggcagcagctgtgcaaggaatgtcggattgcacaccctgttgtgaagtgcacctactgcaggactgagtaccagcaggagaggctagagtgcaatggcacgatctcggctcactgcaacctccacctcccaggttcaagcgattctcctgcctcatcctcccgagtagctgggattacaggcattaaaaccaatacaatatgcaagaaatgtgctcagaacgtgcagttgtatggaacgcccaaaccttgtcagtattgcaacataattgcagcatttattgggaataaatgccagcgctgcacaaattcagaaaagaagtatggaccaccctattcttgtgaacagtgcaagcagcagtgtgcatttgacaggaaagatgatagaaagaaggtagatgggaaattgctgtgctggctgtgcacactttcatacaaacgggtccttcagaagaccaaagagcagaggaaacacctgagtagctcttctcgtgctggccaccaggagaaggagcagtatagtcgcctgagtggtggtggccattataacagccagaaaacactttctacatcttcaattcaaaatgaaatcccaaagaaaaagtccaagtttgagtcaatcacaactaatggagacagcttctccccagacctggctctggactcaccaggcactgaccactttgtcatcattgcccaactgaaggaagaagtggctaccctgaagaagatgttgcatcaaaaggatcaaatgattttagagaaagagaagaagattacagagttgaaggctgattttcagtaccaggaatcgcagatgagagccaaaatgaaccagatggagaaaacccacaaagaagtcacagaacaactgcaggccaaaaaccgagagctcctgaagcaggcagctgctttgtccaagagcaagaagtcagagaagtcaggagctataacctctccatga

SEQ ID NO: 126919 - DNA, 3405 bp, Homo sapiens
  misc_feature (1)...(3405): n = a,t,c or g
gcggtgcgagcggcagatagctcccatatcgccctttgagcaaaacggacgctcacctgcggttgggccgagtgttatcaacaagagcggcctggatgtggtcaagaggaccactctcctccaaacccacagcactgttattcttgaccaagtcccgagcgaccaggacgctctccaatacctgaggctccgcgaccaacgccaggcgacacacgtgatggcggaaccggctgagggaggctcggagaccgtcgcgctcccgccttcaccgccttcagaggaggggggcgtaccccaggatcccgtgggccgcggcggtactccccaaatccgagttgttgggggtcgcggtcatgtggcgatcaaagccgggcaggaagagggccaggctcccgccgaaggcctggcagccgcttctgtggtgatggcagccgaccgcagcctgaaaaagggcgttcagggtggagagaaggccctagaaatctgtggcgcccagagatccgcgtctgagctgacggcgggggcggaggctgaggcggaggaggtgaagacaggaaagtgcgccaccgtctcagcagccgtggctgagagggagagcgctgaggtggtggtgaaggaaggcctggcggagaaggaggtaatggaggagcagatggaggtagaggagcagccgccagaaggtgaagaaatagaagtggcggaggaggatagattggaggaggaggcgagggagtaagaagggccctggcctttgcatgaggctgtctgcatgggccctgtggaggccatgcagctggaactgtacactgtgaatgtgtcaggccgacagggctttccatcagggggagcccaagtttgggcggatgcgtcgacactacctggagcggaggaactacatcattcagaatatcccgggcttctggatgactgcttttcgaaaccacccccagttgtccgccatgattaggggccaagatgcagagatgttaaggtacataaccaatttagaggtgaaggaactcagacaccctagaaccggttgcaagttcaagttcttctttagaagaaacccctacttcagaaacaagctgattgtcaaggaatatgaggtaagatcctccggccgagtggtgtctctttctactccaattatatggcgcagggggcatgaaccccagtccttcattcgcagaaaccaagacctcatctgcagcttcttcacttggttttcagaccacagtctttcagagaccaattaacttgccgagactcatcaacgacgctctgtggccaaatccactgcaatactacctgttgcgtgaaggagtccgtagagcccgacgtcgcccgctaagggagcctgtagagatccccagggccctttgggtatccagtctggttaaacatttgcccttggggaattactcctgcacaaggtctccttaccaccttctgctggacctgtgcttgggcatcagcaatgagtatgccttctattgtgctttgtttttgctgacttttctgcaccctgtttcctttggatattcagttctctcaacctcaagattgagacggtggtgggtatgcttctccacttccatatgaccttcatgctgttctggaatatcacatgctacgaggtcatccttcacactacttgtaagccaagcaaatgatactgtagattgtactgcctttatctgcactgcttggaccctgtttattcccagggcctctgaactggttgctgtcacttggatttctagctttgggagcctgttccacctactcagctctgcattgagcagtatgggcacatgccctgtggacagttactggacgttaatgaactcagaggagaaaagcagtgagccacttgttctgtgtgatttatggtacttcattgctcttccttcacctctagtcactttctattgctacctgccctacattggctcctgccaaggtccctctctctccctgttttccttttttttttttttttttttttttttgagacggaggacggagtcttgctctgtcgcccaggttggagtgcagtggcgcgatctcggctcactgcaacctccacctcccgggttcaagcgattctcctgcctcagcctcccgagtagctgggactacaggcgcgcgccgccacgcccggctaatttttatatttttagtagagacggggtttcaccatgctggccaggctggtctcgaaccccgatctcgtgatccgccctccttagcctcccaatcctctcttaaaaaaagtgatagctcagaaacatttgtaaaagcaaggtttttatttcattttgggctctgtcattttcagagggcaaagaagttgggcctgtaaaataggagtgctaggagctcttacggcccctcccttcttcccaactttcctatttcctaggcccttttattcaactcctaggaatagttaaagagagacacatctaggtgggggtggaaaggtgccctaagcaggagaaaactgaacaaaaggctagagggcatgggccaggttaaaaattggggcctagagtgaagactgtgctgtcgttaagagctttcgaggaaggagtacttactccccaatgatgatgaatggaaaaatacttttcagggagaattgaacggggttaaagtgttaaatatgttgcctagacaagggttctttaaagaaagaccagccgcaactttgaatgctttctttacttgttttgtgacctaattttatgtggaagattggttattcaattaggatttaagtaaaattttttttttctgatttctaaacttattgtgaaaattgagctgtacagatattccttttggatttccaattggggaacatttggaagaccaacagtctttacttgccctgtacaatatagagacatatgaatagtcgataacagttttccaaccttgttccttgtttcctgttaaactatattccctagggaacatagtttgaacaacttgggtctttgttaggcttgtcaaattgcccttcatgggaaaaataatctacaaaagtatggtttaattgattgtccttacatggatnaattttccctgggtaacaacttaggtaagggatatatcttttttcctaaattgcttaaatactgtggaaattgactctgacaaattgggaagtgtacccttgggcatatttgtcttccctttttatgcatgatggtaaaataaaagcatgttgttctgctagatttcttatttttcaccttacccataaatgtaatgcttgaatgaagttgttcatattaattaaaaattatggaatcattaaagtcctttaatccattaaagttcttaatggattaaaatcattaaagttcttaatggattaaaatcaaaaaaaaa

SEQ ID NO: 126920 - DNA, 347 bp, Homo sapiens
ggcacgaggcgagaatgaagactattctcagcaatcagactgtcgacattccagaaaatgtcgacattactctgaagggacgcacagttatcgtgaagggccccagaggaaccctgcggagggacttcaatcacatcaatgtagaactcagccttcttggaaagaaaaaaaagaggctccgggttgacaaatggtggggtaacagaaaggaactggctaccgttcggactatttgtagtcatgtacagaacatgatcaagggtgttgcttgttcagtatctcaagcccagaaagatgaattaatccttgaaggaaatgacattgagcttgtttcaaattcagcggct

SEQ ID NO: 126921 - DNA, 1668 bp, Homo sapiens
atgatcaaaggtgttacactggacttccattacaatatgaggtctgtgtatgctcacttccccatcaatgtcattatccctgagaataggtctctttttgaaatcagacatttcttggataaggccggtatatctcaagcccagaaagatgacttaatcctggaaggaaatgacattgaacttgtttcaaattcagctgctttgattcagcaagccacaacagctaaaaacaagagtatcagaaaaattttggatggcatctatgtctctgaaaaagggacagttcagcaagctgagtggctagaggcaggctcaggcctaggtacaggtgctagttcagcctgcctgattacagttcattcccacgcaggattttcaggccctggtgctctcacaataacccaaagctggcggaggtacatccgctcaaagctcccctgtcggcttaagggagatacgaggcccctgcaacagctggaagcggagccaagtgagtcaaatgtcacctcagggaacagctcagggacactgattattcacttccactgggagcggtatgccttcctcaggccattccccaggaaccgaacgggaaatcggttggccatctctctctccaccggaggcgggcagtggaaggaacacctgcgcagcccggagcctggcagcccgcccaccccgctgctgccggccctggtgctgcaggtgacacgcgtgcacaccccgaccccctcggagggccaattaagaaagcctctgggtatagtgcgggaagaatcgctgagtgggttcatggtctcactggcttcaggagtgaagctgcagacctttgcggtgagtgttacagttcataaaggtggcgcttccggagttgttcgttcctcccttctggagttgttcattcctgctggtgggttcacagtctcactggcttcaggagtgaagctgcagaccttcgagggctttgcagcacctagcccgggcactccggcagctcagagggagcttgtcccagataaccaagaagaaaagaggggaagtgagaaagagactgagacccgccatcatggccaacgaccccatgaagagggaatggcattccacgcacgggacccagtctctgatcaggcccagcaagcaccgccagccgcgctaagtgcaggccgagcccacgcccacctagaacacacactggcccatgagcaccatgcccccggagaggggcccccacagcgcagcagcgggctgaaggtctcctcgagtgcggccagagtggacgccaaggctgaggaggcaccaagggatcacaactcatcaccagcaaggggacaaaacaggacagagaatgaatttgacaaattgactgaagtaggcttcagaaggcgggtaataacaaactcctcagagctaaagaagcatgttttaacccaaagcaaggaagctaagaactttgaaaaaagattacaggaattgctaagtagaataattcgtttagagaagaacataaatgatctgaaggagctgaaaaactcagcacaagaacttcgtgaagcatacacaagtaccaatagcagaatcaatcaagtggaagaaaagatatcagagactaaagatcaacttaatgaaatgaatcatgaagagaagagaaaaaagaatgaaaaagaatga

SEQ ID NO: 126922 - DNA, 607 bp, Homo sapiens
gtcgacgcgagaatgaagactattctcagcaatcagactgtcgacattccagaaaatgtcgacattactctgaagggacgcacagttatcgtgaagggccccagaggaaccctgcggagggacttcaatcacatcaatgtagaactcagccttcttggaaagaaaaaaaagaggctccgggttgacaaatggtggggtaacagaaaggaactggctaccgttcggactatttgtagtcatgtacagaacatgatcaagggtgttacactgggcttccgttacaagatgaggtctgtgtatgctcacttccccatcaacgttgttatccaggagaatgggtctcttgttgaaatccgaaatttcttgggtgaaaaatatatccgcagggttcggatgagaccaggtgttgcttgttcagtatctcaagcccagaaagatgaattaatccttgaaggaaatgacattgagcttgtttcaaattcagcggctttgattcagcaagccacaacagttaaaaacaaggatatcaggaaatttttggatggtatctatgtctctgaaaaaggaactgttcagcaggctgatgaataagatctaagagttacct

SEQ ID NO: 126923 - DNA, 1680 bp, Homo sapiens
tctggggtttggttttagagcagggaggaccaggagtgggtagacacccaacattcgtatgcacagccacgtaatgtggtcatcagcactgtcctgctgagctgccctggccacatgctgagctgccgccactacatgctgagccgcccccgccacatgctgagccgcccctgcccccacgtgctgggctttgggatgtccctaccatgggcccatcccctcagtccgctcatgtgggccactgtccaaaccactggcctggtctcttcagaagtgtccaggcggcgaaggacagtgaaggctgagaaggcacactccagaggaaaagtggacagagccacgcggcaacaaaggagagctgttcaagacagcaatggacatgaagtggtagagggaagacaggaggggattcaaggcaggaagtactgggtggtaatcagcaagttctatgtacaggaagagatgctggttataccaggccatgcagggcacccagaactgaatagtcagatgggctctcccagacatagacagtttgtagtaagagaagacaaatgtgggcagagaagcaatggctttggccacagtatggagattgaagaagaagtcaatgacttgatgggtgaaaagatgaagaaagagttggatgaagtggatctctccacccactgtgggttcatgggtggccttcagcgcaatggcagcaccgggcagacggccccttactatgctacctcaactgtggaagtgattttccatgtttccactcgaatgccgtcagactcagatgattccctcaccaaaaaggcgtctctgcggaggtgtgccagtggaactggggaaagaccacagggagaaggaaacttccagctagactttataacaatttcaaccaaacatgaagtttcctggacagaatccaggggaggagagtctggggttggcagccaaagactagatggctgcagaaaacactctaccggtggtggagcctggatctctccccgagccccagcccagcacttgtgcagagttggtgctctggctttccaacctgagctagtgttgaccgattcaaacatgaaaacagccaacagcaagccagggctgctgccgagcccaccagggtgcttgaggactcagatgcagagtcccaggggagctaggcaggcacagatccctacacctgcaaaatcagaatgtgtggaggtagacgagggtcccagcaggaatcatggactgaacgctccgggagcagatacagaacttcagggcatctcggggcagttgactggctgcaattatttcaacataggcagggaggcagaccgaacactagttaaaggacaagtccagggaataaggcaaactgtcattatgtcagtaccaggaaggaaagagggagataagctcaaagaagtctctgatgggagggaagcagctaaccaagcagggatgaagtggggtaaggagtgtaagagcagttcgggcacagagaatgccatgagcgggaaggaagttgggatacttcaggaggagaaaggagactggagtcatggggtagtaagagggtggcaggaggtgcagctgaaagacaagctgggcctgggcacaggaggcccgaatggcttgaggcaaggaagcaacatgatgtcacttaagttgctatattgcccttag

SEQ ID NO: 126924 - DNA, 909 bp, Homo sapiens
atggtctgctatgttgctcatgctgcactcaagctcctggctcaagtgatcctcccgctgctgtctcccaaagtgctgggtttacaggtgcctagaggcctagagagaaaaatggttttgtgggccaaaccctttagcctcaccctttctcaatcctatgaggaagtaagcacacaagaaatccaaacactgccattccaggttgttttctttgtacaaatgaataccctgtttcactgtcacccagacatcagctctgcagctcagggatgtgttcagagcccggatgagagtttcatgttccaacaagtgccaatggttgagattgacgggatgaagctggtgcagaccagagccattctcaactacattgccagcaaatacaaccttgacggagagaatggaaccaagttggaaaacactctgcaggatattatccaggagaacttccccaatctagcaaggcaggccaacattcaaattcaggaaatacagagaatgccacaaagatactcctcgagaagagcaactccaagacgcataattgtcagattcaccaaagttgaaacaaaggaaaaaatgttaagggcagccagagagaaaggtcgggttacccacaaagggaagcccatcagactaactgctgatgccttggcagaaactctacaagccagaaaagagtgggggccaatattcaacattcttaaggaaaagaattttcaacccagaatttcatatccagccaaactaagcttcataagtgaaggagaaataaaatccttcacagacaaggaagtgctgagagattttgtcaccaccaggcctgccatacaagagctcctgaaggaagcactaaatgtggaaaggaacaaccagtaccagccactgcaaaaacatgccaaatcgtga

SEQ ID NO: 126925 - DNA, 231 bp, Homo sapiens
atgtccgaaggcggggctagcaaaggtggtggagaagagcccgggaagctgccggagccggcagaggaggaatcccaggttttgcgcggaactggccactgtaagtggttcaatgtgcgcatgggatttggattcatctccatgataaaccgagagggaagccccttggatattccagtcgatgtatttgtacaccaagcagcaacaaaacattatttggatttggtttaa

SEQ ID NO: 126926 - DNA, 356 bp, Homo sapiens
ctgcgaggcggctggcgcggcgaggagctagggcaccgagcgccccggcccgagccccgcaccgcagcgcgtctgcccttgtgcggcggcggcggctgcagcggccgctgggtggcccgctggctggctggttggctggctggctggctggctggctggctggctggctcgctggctggctgcccggctgactcctcactgtggcttcctgtagggctggacaaaggacatttccagacttcactggtgtcagatggggagacctggcacgtcatgggcatctcctccttgctgcccagccagcgaaaatcacccagctgagggtcagccaggacaaccaagaacacccagcccat

SEQ ID NO: 126927 - DNA, 592 bp, Homo sapiens
acttccaaagcccctggtgcacaaggggagcaaggtttcgaggaatgcttcttggcggtggccctggcagggcgccccttacccagcctgtgggccttgttccaagccactacgcctgttactgcaggggctcaaggaagctttcttcaggccagaagtgccttctccgcagggacctgcccctgctcctattccggaactcagacctctgaccctgcaatgctgccttaccatgattggcctcctggcagaggcaaggcgtgccggctgcttgtcctaccagacttcactggtgtcagatggggagacctggcacgtcatgggcatctcctccttgctgcccaagcctggaaggggtggaagcaagcatgtgactgaagccttccagttccacttctaaccttggagctcactggtccctgcctctggggcttttctgaagaaacccacccactgtgatcaatagggagagaaaatccacattcttgggctgaacgcgggcctctgacactgcttacactgcactctgaccctgtagtacagcaataaccgtctaataaagagcctacccccaactcaaaaaaaaaaaaaa

SEQ ID NO: 126928 - DNA, 437 bp, Homo sapiens
attcagccggcggttcggggcgacggactctccattccagaaccatggcccaatttgtccgtaaccttgtggagaagaccccggcgctggtgaacgctgctgtgacttactcgaagcctcgattggccacattttggtactacgccaaggttgagctggttcctcccacccctgctgagatccctagagctattcagagcctgaaaaaaatagtcaatagtgctcagactggtagcttcaaacagctcacagttaaggtaaccacgggctaaatgaaaacggatgtgcataacagaaaatgtcttcccttgggatttttctgatttgttttgattaatatatatgtttccatgagggctgaatccagcataatgaggaaaaaaattttgactgctgaggaagatacttacttttctaattttgtcacctgggtagat

SEQ ID NO: 126929 - DNA, 532 bp, Homo sapiens
aaatacatacctaaatcaatgacataagtcaataagtgaaccacgcagggtccttccggggggtgaccttccgctggccattcgggatgatggactttccatcccacaaccatggctccatttgtccgtgaccttggggagaaaaccccagcactggggaaagctgctgtgacttacttgaagcctcgattggccgcattttggtactaccaccacggttgagctggttcctcccacccctgcatgagatccctagagctattcagagcctgaaaaaaatagtcaagtagtgctcagactggtagcttcaaacagctcacagttaaggaagcatttgctgaacgatttggtggccactgaggtgtcgacgtggttttatgtcagagagatcacaggcaagcgtggcatcattggatagaatgtttgaagaccagtcttgacatctgattatataagatttattatttgagtgttattggaccaggtgtgatcagactgctacctgaataaaataagatttgtcagaaattcc

SEQ ID NO: 126930 - DNA, 794 bp, Homo sapiens
ctattggcagtttcagaaatccccctgaaaacttagaggattctgacgtttcactttttttttaggctggattctgcaaagatctttggacatttaagtatcttcgaccggcgcgaaaagaggcggcctgaccttggaagtgggacggggtcctgcagcgggtccttccggcgggtgacattccagcccggcggttccggggcgaacggacttctcccattcccagaacccatggccccaattttgtcccgtaacccttgtgggagaagacccccgggcgctggtgaacgctgctgtgactttactcgaaagcctcggattggcctacatttttggtactacgcccaaggttgagctggttccttcccaccccctgctgagatcccttagagctattcagagcctgaaaaaaaatagtcaatagtgctcagactggtacgcttgcaaacagctcacacgttaaggaagctgtgcttgaaatggtttggtggccactgaggtggttgatgtggtttttatgttcggagagattattaggcaagcgggggcattcattgggctatggatgttttgaagaccaatcctttaacatctggattatattttggattttatttattttggagttgtttgtttgggaccatgttgttgatccagactgctaatctgaaataaaaattaagaatttgtccaaactcagtgttttctccatcagatactccatgaaaggtcacaatttctcttgatattaagctgggttgtctttaaacaaccctaaatacacgtctgtttag

SEQ ID NO: 126931 - DNA, 728 bp, Homo sapiens
ctgagctgaagtattcattcttagcgatgtagccttcctcctcctcctcctcctcctcctcctccgcctccacctcctcctcctcctccgcctcctcctccgcctctgcctcctcctcacactgggcatccccttcagcttcgcttccggttgttagcagtgtgatcttggggatgataatagcatcgtacgtcgcagagttgctgtggggatcccatgagatcacctgtgtaaagcgcctggcacatagtaagtgagcagtcaggttggctgttggttatcctcttcttcaccattatccttcaatgaatggcgcctcaggtgccacctactccatgaagccttccttctgttccagtctgaggagagcatgcactaatggggctgtcacatggggtatctgccagccactcaggcagtttcacatggtagccctcagttgagtcctcatgtttcagggacaggtcaggcttaataattaaacctcgagtgactggtgtcttgatgatgaagagatgcttcagcacgccataccagattgctatataaaacctggagctcagacattctttctggcaggttaaacgtaaactcaggtgatttgctgagctgcgccacgggttgatgtttgcttcagaaagtgggcaagcctggccctcctcccgctggatttgtggaggcctttctctgctagttaactgtccctcatctccagaattctccgccat

SEQ ID NO: 126932 - DNA, 2335 bp, Homo sapiens
tcagagttggttttctggttccttctcatttgcataggctctgtcagagggaaggtctagggctgaaggctgttgttcagattctttgatgtagactctcccccttttcctatagatgtagcttcctgtgagttgaactgcagttattgttgtctctcttctgggtctgctcactagtgtgaagcggtcatagtgggagattgctacatgttccatgaaggggttgaaagggagatgggatgaagaggaatgaggtgcgttatacagcacagtcaggaaaattttctctccgagaaggtgagagttgagctgaggaattgctggtgatacaaagacagactggggggtgggggtccggtgaatgtgtgctcttttgggcacttcctcttccactatgtcatccaaagaatttggcagaagtggtggatgccactttgaataaatgcaaccatcagttccaaacacccacttctgagagtcatctccactatgtctgtaacgaaaatgtaatttagagattgacatcttctctccacagaaacacttgtaggttttaaataaaatgatcattttccagatagcctggcaggaggactgcccacactctaccaaagattctgccaccatcacttttatctcagcagctaaagctttccctaagacaaccaatttccctgctacaatgctctggtaccagactaaagatagaaaagaggtctcctttggcaggtccattagtccattgattttacatgtaggggcttttgcaaattcaaaagcttttatgggccagacaggtattagaaattcatgaagcagtgagagccagcatgagggctgccaaagggaacggtggagaatatggcaaactggaggatgtatgttccatctaaaggggacatcaccactcagttccttcctgatgggtgtcatgacagaattcagatccagtgccatttcagattttttcttggtgatcagccacacactggctacaggccacaggatcgatggcgctatttgactcctgctgcttgcttcactgcctgagaaactccactttccaatggaaacagaggcatgaaggacaatattgggatctaccttgttctgtagaaaatggttctccaagtccaccttttcaaactggtcaggtatctgttgactggtacagttgaaattaattggaaatccctcacaaacttcccaattgccacatccaggtagcagaacagcattaggatccaaaaaggtcttatatgcaaccatgatatcacctctggcaaatgcactcactcggtcaaaggtcaaacccaaagcaagatttagtggagatctgtatgctctaccataagagacccaaattttttgctcattcttcagcgaaagtggattcttaatttcttggccattctcatcaaaaagccgcattgaagaataattgaggcctggtgggttgatggaagaaccttgaagcctttgatgaatcttgagaagtaatctttccatcatatggtcagtttgaattgggctatccgatcccaaatcttttttactgataccaacagagatctctccagtgtttttaccattttcaaatacctctattttggtcaatttaacaacaaactgaaacacaatgttgtcctctacaatgaaatcttctctgttgcacatgttctcctttctcatcaccagtaagtgctccacaaacctgcaccagtaactgtatcgcattgttagtccaccaacaacaatggctggtttcctcacacctacaaaaacattttcttcacctccatatatttctagcttctcatagtctttaacttttccctccattctttttaaatttttgactttgacccatggaagcttcctccttgaccaatatctccgaccctttcctctttgccttccaacaggcatatagctcttattcttccctgcagctgcatgactgaggactttgatttcaagatgccacctgcagttgcccgctatatgacctctccgcaggcagttcacattatagcagtttgcccctttaaggccagtaggaaagtgtcccactctagtttgaagatttggttgtttaaaagtgtgtagcacctcctccttcgctctctcttcctcctgctccagccgtgtaagacatgcgtcttcctcttcaccttctgccatgattataagtttcctgaggtctccccaaccatgcttcccatacagcatgcagattttcttcctcctttgccaccctgaagacagcaacactaacttctcctcttcctcttcctcctcagcccactcaacatgaagatactcagataaggac

SEQ ID NO: 126933 - DNA, 1429 bp, Homo sapiens
gaatttcttaaatagcgagaagccttattccatgaaaaaatacggaactacaagaacattctgtacttttgtcatcttgggagctcctcatgtcaagacacggaaaagagaggcagttagtggaagggagatggtgatattggttgatccgtcattggaaacgtcagagtccagagagaagaggtggagcatcagggggcccagtgggacaagatttgctgataagcacaagtacgcctctagggacacgcagacagacttgaacaagatagtctttcagcataagggaaacacagttactttaaaattttggctaggttatatcaactccctagcccgatgtcagaatttagttaacagggatcttgatcacctttcccttccacaagatagcacactggtccattacattgatgatattgtgctgaatggatttagcgaggaagagaaagatcattctggctacaactttgacaaagaattcgatagaagcaaggctctgggggtgggggtgtgtgcagtgactagttggaaaattcagtgtattataccagtgagtgatggcagtggtctgaagtcagataggaagcagttggcatcagagaatgaaagaatggccctgaagtctgaactaagtctccagcttggggtaacactgcctgtagcgttgatgcgcttgggggtattcgtgccgaagccatcaaagagcaaaggagaaagtaaagagattgatgccaccaaagcgttttcccagctggagatagctaaagccgagggttacgatgatattaaaatcaccggtcctcgactcgatatggatactgatttcaaaacgtggatcggtgtcatctacgcgttcagcaaatacggcttgtcctcaaacaccatccagttatcgtttcaggaattcgctaaagcctgtggtttcccctcaaaacgtctggatgcgaaactgcgtttaaccattcatgaatcacttggacgcttgcgtaacaagggtatcgcttttaagcgcggaaaagatgctaaaggcggctatcagactggtctgctgaaggtcgggcgttttgatgctgaccttgatctgatagagctggaggctgattcgaagttgtgggagctgttccagcttgattatcgcgttctgttgcaacaccacgccttgcgtgcccttccgaagaaagaagctgcacaagccatttacactttcatcgaaagccttccgcagaacccgttgccgctatcgttcgcgcgaatccgtgagcgcctggctttgcagtcagctgttggcgagcaaaaccgtatcattaagaaagcgatagaacagcttaaaacaatcggctatctcgactgttctattgagaagaaaggccgggaaagttttgtaatcgtccattctcgcaatccaaagctgaaactccccgaataa

SEQ ID NO: 126934 - DNA, 871 bp, Homo sapiens
tcacttctgggttatataactgatcctccgaggaccttttaggcagtcactggggaagccagagcccatgcccagtgttaccccaagctggagacttagttcagacttcagggccattctttcattctctgatgccaactgcttaagatttggttgtttaaaagtgtgtagcacctcctccttcgctctctcttcctcctgctccagccgtgtaagacatgcgtcttcctcttcaccttctgccatgattataagtttcctgaggtctccccaaccatgcttcccatacagcatgcagattttcttcctcctttgccaccctgaagacagcaacactaacttctcctcttcctcttcctcctcagcccactcaacatgaagatactcagataaggacctcacagcaacaggagctacttgacagggtgccacggtaccaactttttcatccttggatgcaatttcagaacggtattccatcaaaaggagcagcaggattctattagaacatctcttatctgcctgtcttccccaggtaccatagatttctgtgtctctggctctgcttcctaccttcagcttcttgttctccggcatcccttcaattctgtgagccccctctttcgcttcatgtaatctcctcgctgcttttgttgtaaaatgatagatttctgttgcttgcaaccaagaactctctgcctggtactccgttccctacgacaaccctcattctgcttctttccatttgcaatggctgattcattcttgtcttttagcttaactcacttccttatataaggctttaaacatgccgttcattaagtatgtcacccctacctcccctccagtaattctctaactgaacaaggtt

SEQ ID NO: 126935 - DNA, 12042 bp, Homo sapiens
ctgcttcacttcacggggcgaacatggcgcacagctgtcggtggcgcttccccgcccgacccgggaccaccgggggcggcggcggcggggggcgccggggcctagggggcggcccgcggcaacgcgtcccggccctgctgcttccccccgggcccccggtcggcggtggcggccccggggcgcccccctcccccccggctgtggcggccgcggcggcggcggcgggaagcagcggggctggggttccagggggagcggccgccgcctcagcagcctcctcgtcgtccgcctcgtcttcgtcttcgtcatcgtcctcagcctcttcagggccggccctgctccgggtgggcccgggcttcgacgcggcgctgcaggtctcggccgccatcggcaccaacctgcgccggttccgggccgtgtttggggagagcggcgggggaggcggcagcggagagctaacaacacagatcccatgtagttggagaaccaaaggccacatacatgacaaaaagactgaaccgttcaggttacttgcatggagttggtgcttaaatgatgagcaattcttaggttttggctcagatgaagaagtcagagtgcgaagtcccacaaggtctccttcagttaaaactagtcctcgaaaacctcgtgggagacctagaagtggctctgaccgaaattcagctatcctctcagatccatctgtgttttcccctctaaataaatcagagaccaaatctggagataagatcaagaagaaagattctaaaagtatagaaaagaagagaggaagacctcccaccttccctggagtaaaaatcaaaataacacatggaaaggacatttcagagttaccaaagggaaacaaagaagatagcctgaaaaaaattaaaaggacaccttctgctacgtttcagcaagccacaaagattaaaaaattaagagcaggtaaactctctcctctcaagtctaagtttaagacagggaagcttcaaataggaaggaagggggtacaaattgtacgacggagaggaaggcctccatcaacagaaaggataaagaccccttcgggtctcctcattaattctgaactggaaaagccccagaaagtccggaaagacaaggaaggaacacctccacttacaaaagaagataagacagttgtcagacaaagccctcgaaggattaagccagttaggattattccttcttcaaaaaggacagatgcaaccattgctaagcaactcttacagagggcaaaaaaagggggctcaaaagaaaattgaaaaagaagcagctcagctgcagggaagaaaggtgaagacacaggtcaaaaatattcgacagttcatcatgcctgttgtcagtgctatctcctcgcggatcattaagacccctcggcggtttatagaggatgaggattatgaccctccaattaaaattgcccgattagagtctacaccgaatagtagattcagtgccccgtcctgtggatcttctgaaaaatcaagtgcagcttctcagcactcctctcaaatgtcttcagactcctctcgatctagtagccccagtgttgatacctccacagactctcaggcttctgaggagattcaggtacttcctgaggagcggagcgatacccctgaagttcatcctccactgcccatttcccagtccccagaaaatgagagtaatgataggagaagcagaaggtattcagtgtcggagagaagttttggatctagaacgacgaaaaaattatcaactctacaaagtgccccccagcagcagacctcctcgtctccacctccacctctgctgactccaccgccaccactgcagccagcctccagtatctctgaccacacaccttggcttatgcctccaacaatccccttagcatcaccatttttgcctgcttccactgctcctatgcaagggaagcgaaaatctattttgcgagaaccgacatttaggtggacttctttaaagcattctaggtcagagccacaatacttttcctcagcaaagtatgccaaagaaggtcttattcgcaaaccaatatttgataatttccgaccccctccactaactcccgaggacgttggctttgcatctggtttttctgcatctggtaccgctgcttcagcccgattgttttcgccactccattctggaacaaggtttgatatgcacaaaaggagccctcttctgagagctccaagatttactccaagtgaggctcactctagaatatttgagtctgtaaccttgcctagtaatcgaacttctgctggaacatcttcttcaggagtatccaatagaaaaaggaaaagaaaagtgtttagtcctattcgatctgaaccaagatctccttctcactccatgaggacaagaagtggaaggcttagtagttctgagctctcacctctcacccccccgtcttctgtctcttcctcgttaagcatttctgttagtcctcttgccactagtgccttaaacccaacttttacttttccttctcattccctgactcagtctggggaatctgcagagaaaaatcagagaccaaggaagcagactagtgctccggcagagccattttcatcaagtagtcctactcctctcttcccttggtttaccccaggctctcagactgaaagagggagaaataaagacaaggcccccgaggagctgtccaaagatcgagatgctgacaagagcgtggagaaggacaagagtagagagagagaccgggagagagaaaaggagaataagcgggagtcaaggaaagagaaaaggaaaaagggatcagaaattcagagtagttctgctttgtatcctgtgggtagggtttccaaagagaaggttgttggtgaagatgttgccacttcatcttctgccaaaaaagcaacagggcggaagaagtcttcatcacatgattctgggactgatattacttctgtgactcttggggatacaacagctgtcaaaaccaaaatacttataaagaaagggagaggaaatctggaaaaaaccaacttggacctcggcccaactgccccatccctggagaaggagaaaaccctctgcctttccactccttcatctagcactgttaaacattccacttcctccataggctccatgttggctcaggcagacaagcttccaatgactgacaagagggttgccagcctcctaaaaaaggccaaagctcagctctgcaagattgagaagagtaagagtcttaaacaaaccgaccagcccaaagcacagggtcaagaaagtgactcatcagagacctctgtgcgaggaccccggattaaacatgtctgcagaagagcagctgttgcccttggccgaaaacgagctgtgtttcctgatgacatgcccaccctgagtgccttaccatgggaagaacgagaaaagattttgtcttccatggggaatgatgacaagtcatcaattgctggctcagaagatgctgaacctcttgctccacccatcaaaccaattaaacctgtcactagaaacaaggcaccccaggaacctccagtaaagaaaggacgtcgatcgaggcggtgtgggcagtgtcccggctgccaggtgcctgaggactgtggtgtttgtactaattgcttagataagcccaagtttggtggtcgcaatataaagaagcagtgctgcaagatgagaaaatgtcagaatctacaatggatgccttccaaagcctacctgcagaagcaagctaaagctgtgaaaaagaaagagaaaaagtctaagaccagtgaaaagaaagacagcaaagagagcagtgttgtgaagaacgtggtggactctagtcagaaacctaccccatcagcaagagaggatcctgccccaaagaaaagcagtagtgagcctcctccacgaaagcccgtcgaggaaaagagtgaagaagggaatgtctcggcccctgggcctgaatccaaacaggccaccactccagcttccaggaagtcaagcaagcaggtctcccagccagcactggtcatcccgcctcagccacctactacaggaccgccaagaaaagaagttcccaaaaccactcctagtgagcccaagaaaaagcagcctccaccaccagaatcaggtccagagcagagcaaacagaaaaaagtggctccccgcccaagtatccctgtaaaacaaaaaccaaaagaaaaggaaaaaccacctccggtcaataagcaggagaatgcaggcactttgaacatcctcagcactctctccaatggcaatagttctaagcaaaaaattccagcagatggagtccacaggatcagagtggactttaaggaggattgtgaagcagaaaatgtgtgggagatgggaggcttaggaatcttgacttctgttcctataacacccagggtggtttgctttctctgtgccagtagtgggcatgtagagtttgtgtattgccaagtctgttgtgagcccttccacaagttttgtttagaggagaacgagcgccctctggaggaccagctggaaaattggtgttgtcgtcgttgcaaattctgtcacgtttgtggaaggcaacatcaggctacaaagcagctgctggagtgtaataagtgccgaaacagctatcaccctgagtgcctgggaccaaactaccccaccaaacccacaaagaagaagaaagtctggatctgtaccaagtgtgttcgctgtaagagctgtggatccacaactccaggcaaagggtgggatgcacagtggtctcatgatttctcactgtgtcatgattgcgccaagctctttgctaaaggaaacttctgccctctctgtgacaaatgttatgatgatgatgactatgagagtaagatgatgcaatgtggaaagtgtgatcgctgggtccattccaaatgtgagaatctttcaggtacagaagatgagatgtatgagattctatctaatctgccagaaagtgtggcctacacttgtgtgaactgtactgagcggcaccctgcagagtggcgactggcccttgaaaaagagctgcagatttctctgaagcaagttctgacagctttgttgaattctcggactaccagccatttgctacgctaccggcaggctgccaagcctccagacttaaatcccgagacagaggagagtataccttcccgcagctcccccgaaggacctgatccaccagttcttactgaggtcagcaaacaggatgatcagcagcctttagatctagaaggagtcaagaggaagatggaccaagggaattacacatctgtgttggagttcagtgatgatattgtgaagatcattcaagcagccattaattcagatggaggacagccagaaattaaaaaagccaacagcatggtcaagtccttcttcattcggcaaatggaacgtgtttttccatggttcagtgtcaaaaagtccaggttttgggagccaaataaagtatcaagcaacagtgggatgttaccaaacgcagtgcttccaccttcacttgaccataattatgctcagtggcaggagcgagaggaaaacagccacactgagcagcctcctttaatgaagaaaatcattccagctcccaaacccaaaggtcctggagaaccagactcaccaactcctctgcatcctcctacaccaccaattttgagtactgataggagtcgagaagacagtccagagctgaacccacccccaggcatagaagacaatagacagtgtgcgttatgtttgacttatggtgatgacagtgctaatgatgctggtcgtttactatatattggccaaaatgagtggacacatgtaaattgtgctttgtggtcagcggaagtgtttgaagatgatgacggatcactaaagaatgtgcatatggctgtgatcaggggcaagcagctgagatgtgaattctgccaaaagccaggagccaccgtgggttgctgtctcacatcctgcaccagcaactatcacttcatgtgttcccgagccaagaactgtgtctttctggatgataaaaaagtatattgccaacgacatcgggatttgatcaaaggcgaagtggttcctgagaatggatttgaagttttcagaagagtgtttgtggactttgaaggaatcagcttgagaaggaagtttctcaatggcttggaaccagaaaatatccacatgatgattgggtctatgacaatcgactgcttaggaattctaaatgatctctccgactgtgaagataagctctttcctattggatatcagtgttccagggtatactggagcaccacagatgctcgcaagcgctgtgtatatacatgcaagatagtggagtgccgtcctccagtcgtagagccggatatcaacagcactgttgaacatgatgaaaacaggaccattgcccatagtccaacatcttttacagaaagttcatcaaaagagagtcaaaacacagctgaaattataagtcctccatcaccagaccgacctcctcattcacaaacctctggctcctgttattatcatgtcatctcaaaggtccccaggattcgaacacccagttattctccaacacagagatcccctggctgtcgaccgttgccttctgcaggaagtcctaccccaaccactcatgaaatagtcacagtaggtgatcctttactctcctctggacttcgaagcattggctccaggcgtcacagtacctcttccttatcaccccagcggtccaaactccggataatgtctccaatgagaactgggaatacttactctaggaataatgtttcctcagtctccaccaccgggaccgctactgatcttgaatcaagtgccaaagtagttgatcatgtcttagggccactgaattcaagtactagtttagggcaaaacacttccacctcttcaaatttgcaaaggacagtggttactgtaggcaataaaaacagtcacttggatggatcttcatcttcagaaatgaagcagtccagtgcttcagacttggtgtccaagagctcctctttaaagggagagaagaccaaagtgctgagttccaagagctcagagggatctgcacataatgtggcttaccctggaattcctaaactggccccacaggttcataacacaacatctagagaactgaatgttagtaaaatcggctcctttgctgaaccctcttcagtgtcgttttcttctaaagaggccctctccttcccacacctccatttgagagggcaaaggaatgatcgagaccaacacacagattctacccaatcagcaaactcctctccagatgaagatactgaagtcaaaaccttgaagctatctggaatgagcaacagatcatccattatcaacgaacatatgggatctagttccagagataggagacagaaagggaaaaaatcctgtaaagaaactttcaaagaaaagcattccagtaaatcttttttggaacctggtcaggtgacaactggtgaggaaggaaacttgaagccagagtttatggatgaggttttgactcctgagtatatgggccaacgaccatgtaacaatgtttcttctgataagattggtgataaaggcctttctatgccaggagtccccaaagctccacccatgcaagtagaaggatctgccaaggaattacaggcaccacggaaacgcacagtcaaagtgacactgacacctctaaaaatggaaaatgagagtcaatccaaaaatgccctgaaagaaagtagtcctgcttcccctttgcaaatagagtcaacatctcccacagaaccaatttcagcctctgaaaatccaggagatggtccagtggcccaaccaagccccaataatacctcatgccaggattctcaaagtaacaactatcagaatcttccagtacaggacagaaacctaatgcttccagatggccccaaacctcaggaggatggctcttttaaaaggaggtatccccgtcgcagtgcccgtgcacgttctaacatgttttttgggcttaccccactctatggagtaagatcctatggtgaagaagacattccattctacagcagctcaactgggaagaagcgaggcaagagatcagctgaaggacaggtggatggggccgatgacttaagcacttcagatgaagacgacttatactattacaacttcactagaacagtgatttcttcaggtggagaggaacgactggcatcccataatttatttcgggaggaggaacagtgtgatcttccaaaaatctcacagttggatggtgttgatgatgggacagagagtgatactagtgtcacagccacaacaaggaaaagcagccagattccaaaaagaaatggtaaagaaaatggaacagagaacttaaagattgatagacctgaagatgctggggagaaagaacatgtcactaagagttctgttggccacaaaaatgagccaaagatggataactgccattctgtaagcagagttaaaacacagggacaagattccttggaagctcagctcagctcattggagtcaagccgcagagtccacacaagtaccccctccgacaaaaatttactggacacctataatactgagctcctgaaatcagattcagacaataacaacagtgatgactgtgggaatatcctgccttcagacattatggactttgtactaaagaatactccatccatgcaggctttgggtgagagcccagagtcatcttcatcagaactcctgaatcttggtgaaggattgggtcttgacagtaatcgtgaaaaagacatgggtctttttgaagtattttctcagcagctgcctacaacagaacctgtggatagtagtgtctcttcctctatctcagcagaggaacagtttgagttgcctctagagctaccatctgatctgtctgtcttgaccacccggagtcccactgtccccagccagaatcccagtagactagctgttatctcagactcaggggagaagagagtaaccatcacagaaaaatctgtagcctcctctgaaagtgacccagcactgctgagcccaggagtagatccaactcctgaaggccacatgactcctgatcattttatccaaggacacatggatgcagaccacatctctagccctccttgtggttcagtagagcaaggtcatggcaacaatcaggatttaactaggaacagtagcacccctggccttcaggtacctgtttccccaactgttcccatccagaaccagaagtatgtgcccaattctactgatagtcctggcccgtctcagatttccaatgcagctgtccagaccactccaccccacctgaagccagccactgagaaactcatagttgttaaccagaacatgcagccactttatgttctccaaactcttccaaatggagtgacccaaaaaatccaattgacctcttctgttagttctacacccagtgtgatggagacaaatacttcagtattgggacccatgggaggtggtctcacccttaccacaggactaaatccaagcttgccaacttctcaatctttgttcccttctgctagcaaaggattgctacccatgtctcatcaccagcacttacattccttccctgcagctactcaaagtagtttcccaccaaacatcagcaatcctccttcaggcctgcttattggggttcagcctcctccggatccccaacttttggtttcagaatccagccagaggacagacctcagtaccacagtagccactccatcctctggactcaagaaaagacccatatctcgtctacagacccgaaagaataaaaaacttgctccctctagtaccccttcaaacattgccccttctgatgtggtttctaatatgacattgattaacttcacaccctcccagcttcctaatcatccaagtctgttagatttggggtcacttaatacttcatctcaccgaactgtccccaacatcataaaaagatctaaatctagcatcatgtattttgaaccggcacccctgttaccacagagtgtgggaggaactgctgccacagcggcaggcacatcaacaataagccaggatactagccacctcacatcagggtctgtgtctggcttggcatccagttcctctgtcttgaatgttgtatccatgcaaactaccacaacccctacaagtagtgcgtcagttccaggacacgtcaccttaaccaacccaaggttgcttggtaccccagatattggctcaataagcaatcttttaatcaaagctagccagcagagcctggggattcaggaccagcctgtggctttaccgccaagttcaggaatgtttccacaactggggacatcacagaccccctctactgctgcaataacagcggcatctagcatctgtgtgctcccctccactcagactacgggcataacagccgcttcaccttctggggaagcagacgaacactatcagcttcagcatgtgaaccagctccttgccagcaaaactgggattcattcttcccagcgtgatcttgattctgcttcagggccccaggtatccaactttacccagacggtagacgctcctaatagcatgggactggagcagaacaaggctttatcctcagctgtgcaagccagccccacctctcctgggggttctccatcctctccatcttctggacagcggtcagcaagcccttcagtgccgggtcccactaaacccaaaccaaaaaccaaacggtttcagctgcctctagacaaagggaatggcaagaagcacaaagtttcccatttgcggaccagttcttctgaagcacacattccagaccaagaaacgacatccctgacctcaggcacagggactccaggagcagaggctgagcagcaggatacagctagcgtggagcagtcctcccagaaggagtgtgggcaacctgcagggcaagtcgctgttcttccggaagttcaggtgacccaaaatccagcaaatgaacaagaaagtgcagaacctaaaacagtggaagaagaggaaagtaatttcagctccccactgatgctttggcttcagcaagaacaaaagcggaaggaaagcattactgagaaaaaacccaagaaaggacttgtttttgaaatttccagtgatgatggctttcagatctgtgcagaaagtattgaagatgcctggaagtcattgacagataaagtccaggaagctcgatcaaatgcccgcctaaagcagctctcatttgcaggtgttaacggtttggggatgctggggattctccatgatgcagttgtgttcctcattgagcagctgtctggtgccaagcactgtcgaaattacaaattccgtttccacaagccagaggaggccaatgaaccccccttggaccctcacggctcagccagggctgaagtccacctcaggaagtcagcatttgacatgtttaacttcctggcttctaaacatcgtcagcctcctgaatacaaccccaatgatgaagaagaggaggaggtacagctgaagtcagctcggagggcaactagcatgggtctgccaatgcccatgcgcttccggcacttaaaaaagacttctaaggaggcagttggtgtctacaggtctcccatccatggccggggtcttttctgtaagagaaacattgatgcaggtgagatggtgattgagtatgccggcaacgtcatccgctccatccagactgacaagcgggaaaagtattacgacagcaagggcattggttgctatatgttccgaattgatgactcagaggtagtggatgccaccatgcatggaaatgctgcacgcttcatcaatcactcgtgtgagcctaactgctattctcgggtcatcaatattgatgggcagaagcacattgtcatctttgccatgcgtaagatctaccgaggagaggaactcacttacgactataagttccccattgaggatgccagcaacaagctgccctgcaactgtggcgccaagaaatgccggaagttcctaaactaa

SEQ ID NO: 126936 - DNA, 1197 bp, Homo sapiens
atgtttgtgtattgccaagtctgttgtgagcccttccacaagttttgtttagaggagaacgagcgccctctggaggaccagctggaaaattggtgttgtcgtcgttgcaaattctgtcacgtttgtggaaggcaacatcaggctacaaagaattctgcagagtccccacaagcaaaaagaccctcaccagatgtacccctcaaccgtgtacttcccggcccccagaattctaagcgaattaacgcaggaacaaaaaaccaaacagtgcatgttcttacttgtaagtgggagctaaaaaggccaggcacacaacatatgaaagtaaaaagcctagaagatgcagaaaagaatcccaaagccattgacacgtggattgagagcatctctgaattacaccgttctaagccccctgcgactgtgcactacaccaggcccatgcccgacattgacacgctgatgcaggaatggtccccggagtttgaagagcttttgggcaaggtaagcctgcccacggcagagattgattgcagcctggcagagtacattgacatgatctgtgccattctagacatccctgtctacaagagtcggatccagtccctccatctgctcttttccctctactcagaattcaagaactcaacagcatttttaaaagctctcgctgaaggccaagaaagcattcactccttcatcccaattccaccctcccaagctggagacatgggagacattaacctttcaagctggggacaacttcccaaagctgctgtttccaaaggctgcagctggccccctctgcccccagcctgagatggacagatcgttgtccagcctacttgatgtcccttgccccatgcccacagcttggcctcaggggcagtgccatgtccctgcctgccctctctgccagagggcacagaacatgtttgttttaatgaacctgccctgccctcagattgctgtcccccggggagttaatgcaatctacaccactgtggggatttgagttatacagaattggaatttctgagatcccatggaggttagattgggaggtaaagcttaaaagatgtcctttttgtgagagggatggaattcgttttctttcattcggtaaagttagtgagtaaagattttataaatcaaatgctctattatattgtcagattattctgctatttaatatgaaagaga

SEQ ID NO: 126937 - DNA, 534 bp, Homo sapiens
gggtgctgcaggaggtcagggagctgagagacctgtacagacagatggacctgcagaccccggactcccacctcagacagaccaccccgcacaatattaaagccatgacagcaaacagcccctttctcctaaggttcctgatttgaagtggcaaaacaaggcagtggcatagtctcctgtcctatgtccttggcatgcaggtgcttctaagaagcctgggcgagcatccttgctatgagaccatgaaaccacatggctctgtcccagcatccaagcctccagtcagacacagctggagcagcacacaagcaagaccagagaccagccgctcggccagcccccagaagtttggcttcaggtcacatgttgctctggagaaccaagaagggtgagcagacaccaatcatgaccccaaacagcaagaggacagaagatgaggaaatagatgtgagaattgagacctgcccaatgtcaaacaaccaaggagcagagctggaacgggaaactgacttatcccttatctccctacagcag

SEQ ID NO: 126938 - DNA, 1329 bp, Homo sapiens
ggacctcaggatggaaaccagcagcctgcaccgcccgagaaggtcggctgggtccggaaattctgcgggaaagggattttcagggagatttggaaaaaccgctatgtggtgctgaaaggggaccagctctacatctctgagaaggaggtaaaagatgagaaaaatattcaagaggtatttgacctgagtgactatgagaagtgtgaagagctccggaagtccaagagcaggagcaagaaaaatcatagcaagtttactcttgcccactccaaacagcccggtaacacggcacccaacctgatcttcctggcagtgagtccagaagagaaggaatcgtggatcaatgccctcaactctgccatcacccgagccaagaaccgtatcttggatgaggtcaccgttgaggaggacagctatcttgcccatcccactcgagacagggcaaaaatccagcactcccgccgccccccaacaaggggacacctaatggctgtggcttccacctctacctcggatgggatgctgaccttggacttgatccaagaggaagacccttcccctgaggaaccaacctcttgtgctgagagctttcgggttgacctggacaagtctgtggcccagctggcagggagccggcggagagcggactcagaccgcatccagccctccgcagaccgggcaagcagtctctcccgaccttgggaaaaaacagacaaaggggccacctacaccccccaggcacccaagaagttgacgcccacagagaaaggccgctgcgcctccctggaggagatcctatctcagcgttatgctgcctctgcccacaccctccagctgcgggctgaggaacccccaacccctgccctccccaacccggggcagctgtcccggatccagggacctggtagcaaggaaactggaggagactcaggagcttctggcagaggttcagggactgggagatgggaagcgaaaggccaaggaccccccctcggttctccgccggattctgagtcaagagcagctgctgcttggagacggaacgggctgctgggagaggcatcatcgaattggagccaggcaaagagggtcctgcagcaggtcagggagctgagagacctgtacagacaagatggacctgcagaccccggacttcccaccttcagacagaccaccccgcacagttcagttaccggaagagcctgatgtgagggcagggtggggtctggaacttgtcgggttggacagactcttatctccgtgttgctggataaagcttttttatttaccctcaatcaaaaaaagaaaacaaaaatgaactcataaaaa

SEQ ID NO: 126939 - DNA, 1044 bp, Homo sapiens
atgtatgaagggctggaaccaccagggctgtctagagactaccagcgagatgcagagccaacaacttgcatttccaagctattaggagaaaatatcagaagggatgaattctggaaagtacaaattaaagccaggtcaggggagactgagcagaatcctaggtctacggcttttgcttttggggaattacctctggcgaacagagaagaattaaaccttttgctaaacaaaggcattctccctttgtgtgaccagagacaggagatagaatctgaatgtgcttttaccatcttctgtgctggagatgccaactgttttcccccgtccccaacacacctgcccctcacagcccttcagcagaggccctgcggccttagtggctctgcctccaaggaagcctggggcaattcccttgtatgtggcccaaggggggataccctacccatggcgatcgcaaagccccatagatcggcctcaaagcacagcacactacaccagtacccaacgcctcctaggagcctatgccaccaacatagggatgagcaacccacaaaccacctccagaccctaaatactattcctgcatggattcatactaagtgggttccaggtttagaccacattaataaaccctggaggtcctgctcctcttctcagtctgcctacctcttctatcactggcttcactactttctaccacccaaacttaaaacctctaaggacctgtccatcttaagtgcaggcctggccatgtcggcaccccatttgatcttccgtgtttccgctatcacctccaacagcagctgtaaacccagcagcacatcaaaagcatgtgaggagcttttcaaagaacaccaatgtctaggcagcacagacattccgattcacatccagggtggggccccattttctgctgtatcccctcagcggctggttctgagaggcagccaagacggatcccatatggttcggcccagactgcccttccccgactctgccggcttggcaaacttccacttgttttcaaaactcttcttagactga

SEQ ID NO: 126940 - DNA, 609 bp, Homo sapiens
atgccaagccaagaagccgtgggtgcagagcctcatcgcagtgggagctggcctgtcgggaccagcatgggctctggagggccactgctgttggaggtgatagcggaaacacggaagatcaaatggggtgccgacatggccaggcctgcacttaagatggacagaaatttaaactgcgagttcctggaagcatccttcactggtgcaccctggctccctgaggcagggcttttggaagttactcctgttggttgggcagagatgaggaggctcttagagtactccaggggaagagttggctttggaaaggaacaggtgaactcgagacacctgccaggtatcatggcaggacctggagctcttaccaaagtcaaggagagtaggcgacacgtggaggaagggaagatggaggtgcagaaggctgacggcattcaggatcgctgtaacactatttcttttgccactttggctgaaattcaccacttccatcaaattcgagtgagagactttaaatcacagatgcagcatttcttacaacaacaaataatatttttccaaaaagttacccagaagttggaagaagctcttcacaaatatgatagtgtttaa

SEQ ID NO: 126941 - DNA, 350 bp, Homo sapiens
gtaattcttagaggccgggctcacagtcgaaagaggaaaggaaagtgcccatcggagtcgtcggagcccacagtattaatgcccacgaaaggagaagaaactttttcccgggaacctgctgattatacaaaagacaaagacatttctatgtcaggtcttgttcccttatctgagtgagctggaggtttgtgcaagtttttatctaagtgggctggaggttctcggatctgtgcagccgcgggcttgtctccaggcacaccaccaccctgtgctacttcccttatcggtgcctgcagcttgatttttatccccaggctgctttctctgttctgtggggatgaggcactgac

SEQ ID NO: 126942 - DNA, 479 bp, Homo sapiens
ttatgagcttggagaatgagtgcaaggttttactgagtggaagtagctctcagcagattggggagtcagaagggagatggttttcccctggagtcggaccgctaggtggactgggctctcctctggctgccctagccaaatgtcgttctgctggtgggtggcctgctggtgtgctggtgcctcctgatgtgcttctcgccatgtccagccacctgtgtgtctgcctgctggggtcagctcagacaccctctcctgccaggggctgagcccacagtcaggtggccacaggatccacacctgcgtgcaagccaggagtggcccagtgggccagttgtgcagggcacctcctttagcacgggacgctgctttggggggatcgccctcgacacagcgcccctcccggcacctggccagaacctcccagggcgaaggtcggggccgagaagcttgtgagtaccggggcagtgagggagggatcc

SEQ ID NO: 126943 - DNA, 1212 bp, Homo sapiens; identical to SEQ ID NO: 117353

SEQ ID NO: 126944 - DNA, 441 bp, Homo sapiens
aattcggcacgaggtggactgagacctacaggacacagcgactcttaaataggtggctcaccaggagaaaggcatagcagaacctggactgagacctacgggagacagcaggcagacacacaggaggttggacgtcgagaggagcacatcagtgcaagaacacatgggtggctgccacttctctccctttcctgagagggaaaaactctcgacgctgagaggaatccaccaacaggcaccagcactctggcaggccaccgaccaatggattgacatagagtttggctggggcagccagaggagagcctgggccgctgaataacccgacttcaggggaaaactattctcccttttggctcccccatctgctgagagctacttccactcaataaaaccttgcactcattctcaaaaaaaaaaaaaaaaaaaaagtcgtatcga

SEQ ID NO: 126945 - DNA, 348 bp, Homo sapiens
atggaggtcctgatgcagccaaaagtaaccaagtggaggaggcaggagaagttcctcaaaagagtggggctggtattaccagaggaagaggaggagagaggaggggccaacagaaccacaaaggtctactgtctcctcagtttccagttaggaaaaatcgaagctgtaaacctaaaaattgttcttcaaatggagccccagatgcaatccatggctaagatctaccgcagacctctggactggcctgctagcccatgcttcgatgttaatgacattgaaggcacccctcttgaagaaatctcaactgcacaacccctagtatgccccaattcagcaggaagcagttag

SEQ ID NO: 126946 - DNA, 451 bp, Homo sapiens
acaattccccacaggccagcaggcagttcccagtgtagaccctcattgggacacagaatcagaacatggaaattggtgccgcagacatttgctaacttgtgtgctaggactaaggaaaactaggaagaagcctatgaattatgcaatgatgtccactataacacagggaaaggaagaaaatcctactgcctttctggtgagactaagggaggcattgaggaagcatacctctctgtcacctgactctattgaaggccaactaatcaggcaagcggactttggagtctctggaaaagggaaaagctgggcaaatcgaatgcctaatatggcttgcttccagtgtggtctacaaggacactttaaaaaagattgtccaagtagaagtaagctgccccctcgtccatgccccttatgtcaagggaatcactggaaggcccattgccccagggga

SEQ ID NO: 126947 - DNA, 286 bp, Homo sapiens; identical to SEQ ID NO: 126109

SEQ ID NO: 126948 - DNA, 1264 bp, Homo sapiens; identical to SEQ ID NO: 123617

SEQ ID NO: 126949 - DNA, 759 bp, Homo sapiens; identical to SEQ ID NO: 126451

SEQ ID NO: 126950 - DNA, 1281 bp, Homo sapiens; identical to SEQ ID NO: 122633

SEQ ID NO: 126951 - DNA, 405 bp, Homo sapiens
gaatgggggaccccacgagggccatagtttcatcccctcagaatggcaggccaccgaagaaggaaaaatacttttgcctgcagctaaccaatagaaattacttaaaacccttcaccaaaccttcgacttaaccattgatagcacccatcagatggccaaattattatttactggaccaggccttttcaaaactgtcaagcagatagtcaaagcttgtaaagtgtgccaaaggaataatcccctgcactgcaggccatacatttcaatccctgtatctttaacctccttgttaagcttgtctcttccagaatcaaagctgtaaaactacaaatcattcttcaaatggagccccagatgcagtccatgactaagatctaccatgaacccctggaccagcctgctagc

SEQ ID NO: 126952 - DNA, 1081 bp, Homo sapiens
tcagatggacagccaggaaagtgggctttccacacagatgatataatacagtacttccaaaggcatgcctatgcggaagtctgatttgttggatgaactaaagtcattcagaccagaatatgcaggtgtctgtagaacggagtaacctccgtgtgcggttgtatgcctgctgtggattgctgctgtgtactgcttatccacaacattttgcgcaccgttatgtggacaaaatacctggttacccaagccgtgccggcacgttaaccgggctgcatccaatgcaagtgtgtcgctgtcgacggtgaccctgttttcccgcctttcttgaccacaaagaaaggggtccgagctgctggattctagtggtcctctaccagcatccccatcattgcctttgtgctcaggggtgagtcctagagctggcctgggttctgcatggccgaagattccattccttggaatccgtgaggccaagaaccccaggtcagagaacacaaggcttgccaccatcttggaagcgggtcaccgccatcttgggacctctgtgagcaaggaccacccggtaacattttggcgaccacgaagggacctccaaagtgacttaaagcaaattaaaatagacctaggtaaattctcagataaccctgatggctatattgatgttttacaagagttagggcaatcctttgatctgacatggagagatataatgttactgctaaatcagacactaaccccaaatgagagaagtgccaccataactgcagcccgagagtttggtgatctctggtatatcagtcaggtagtggcagcagtagcaggcttagtatctgaagcagttaaaataatacagggatcttactgtgtggacatccatgatgtgaatggcatactaactgctaaaggagacttgtggctgtcagacaaccatttacttaaatatcaggctctattacttgaagggccagtgctgcgactgcgcacttgtgcaactcttaacccagccacatttcttccagacaatgaagaaaagatagaacataactgtcaacaagtaattgctcaaacatacgccacttga

SEQ ID NO: 126953 - DNA, 1799 bp, Homo sapiens
atgaaattgtcagcagactcaataatcaccctaaggggcatcattctggatgccgacattctctatgatggaaagggactgaaagaactcagcctagctctaggactcacccctgagcacaaaggcaatgttgggcacgctggtaaaggaccactagaatccagcagcccggacccctttctttgtgatcaagaaaggtgggaaaacaggtgcaggactgctacatcgatgggaaatgttccccccaaggcaaaaacgcccttaagatgtattctggagaattcgacccagtcagagtgtgtgtacctttttccctctcagatttgaagcaacttaaaatagacctaggtagattctcagataaccctgatggctatattgatgttttacaagggttaggacaatcctttgatctgacatggagagatataatgttactgctagatcagacactaaccccaaatgagagaaatgccaccataactgcagcccgagagtttggtgatctctggtgtctcagtcaggtcaatgataggatgacaacagagcaaagagaacgattccccacaggccagcaggcagttcccagtgtagaccctcgctgggacacagagtcagaacatggagatgggtgccacagacatttgctaacttgcatgttagaaggactaaggaaaactaagaagaagccgatgaattactcaatgatgtccactataacacagggaaaggaaaaaaatcctaatgcctttctggagagactaaggcaggcattgaggaagcatacctctctgtcacctgactctattgaaggccaactaatcttaaaggataagtgtatcactctgtcagctgcagacattagaaaaaacttcaaaaacttagaaaccctattgaacttggcaaccttggtttttcataatagagataaggagaagcaggcagaacaagacaaacgggatttaaaaaaggctaccgctttagttatggccctcaggcaagcagactttggaggctctggaacacggaaaggctgggcaaatccaatgcctaatagggcttgcttccagtgtggtctacaaggacactttaaaaagattgtccaaatacaaataagccaccccctcatccatgccccttatgtcaaaggaatcaatggaaggcccactgccccaggggacaaaggtttccaaaccaaagctcaactctgctcagaacaggctaaatacttagggctaaaattatccaaaggcaccagggccctcagtgaggaacgtatccagcccatactggcttatcctcatcccaaaaccctaaagcaactaagagggttctttggcataccaggcttctgccgaatatggattcccagaatcaaagctgtaaaactacacatcgttcttcaaatggatccccagaggcagtccatgactaagatctaccatggacccctggactggcctgctagcccatgctctgatgttaatgacaccaaaggcaaccctcctgaggaaatctcaactgcaccacccctactatgccccaattcagcaggaagcagttggagcggggataacacagaaagaaggcctttaccagatgcaggccccttgaccttggacttcctaggctccaaacctagagtacaaaacaacagtgatgccagcagagaaaaacacagccatgaaacaaaacacccagaccagagacacagaactgcttcatatagccattttcaggcaaagcagggagccagtgttttgccatgcatattagagaaaagggaagcctcctactga

SEQ ID NO: 126954 - DNA, 1729 bp, Homo sapiens
atgcctcttctccaaatgattgcaacacctctccagcaatctctgatttctacggaggatgagatggatgaattgacagaagtaggctttgaaaggtgggtaataacaaacttcactgaggaacccagcccagctctaggattcacccctgagcacaaaggcaatgttgggcatgctggtaaaggaccactagaatccagcagcccagacccctttctttgtggtcaagaaaggcgggaaaaggggtgcaggactgctacatcggcagtacccccttagacttgaggccaaacagggactcaaaaaaattgttaaggacctaaaagcccaaggcctagtaacaccatgcagtagcccctgcaatactccaactttagcagtacagaaacccaacggacagtggaggttagtgcaagatctcaggattatcaatgaggctgttgtccctctatacccagctgtacctaacccttacattctgctttcccaaataccagaggaagcagagtggtttacagtcctggaccttaaggatgcctttttctgcatccctgtacatcctgactctcaattcttgtttgcctttgaagatccttcaaacccaatgtctcaactcacctggactgttttaccccaagggttcagggatagcctccatctatttggccaggcattagcccaagacttgagccagttctcatacctggacactcttgtccttcagtatatggatgatttacttttagtgacccattcagaaacctggtgccatcaagccacccaagcactcttaaatttccttgctacctgtggctacaaggtttccaaacaaaatgctcagctctgctcacagcaggttaaaaacttagggctaaaattatccaaaggcacaagggccctcagtgaggaacgtatccagcctatactggcttatcctcatcccaaaaccctaaagcaactaagagggttccttggcataacaagcttctgccgaatatggattcccagaatcaaagctgtaaaactacaaatcattcttcaaatggagccccagatgcagtccatgactaagatctaccacggacccctggaccggcctactagcccaagctccaatgttaatgacatcgaaggtactaatgcttcagactttcctttcctatcccaagtattagagcaagttgtatctccaaagggatctaaggaagctcaatgctgcgtcctcaggcctctaggctgtgaatccaacttgaagcaaattaaaatagacctaggtaaattctcagatacccctgatggctatattgatgttttacaagggttaggacaaccctattatctgacatggagagacataatgttactgctagatcagacactaaccccaaatgagagaagtgccgccataactgcagtccgagagtttggtgatctctggtatctcagtcaggtcaatgataggaagataacagaggaaagagaacaattccccacaggccagcaggcagttcccagtgtagaccctcattgggacacagaatcagaacatggagattggtgccacagatatttgctaactgacgtgctagaaggactaaggaaaactaggaagaagcctaataaattagtcaatgatatccactataacacagggaaaggaagaaaatcctactgcctttctggagagactaagagaggcattgaggaagcatacctcactgtcacctga

SEQ ID NO: 126955 - DNA, 645 bp, Homo sapiens
caaaagggggactttctggagggtactgaaggtacacagaatgaacaagaggctggagaacaggcttggacaaagggcaggaccaagagaggaattctggccaagggaaggctgcaggcacagtctgatccagggttctctactgtggagcaagaccctgtcttgaaaaaaagaaagagagagagagagaaagaaagaaaagagaaagaagaaaggaagaaagaaagaaagagaaagaaaaaagagaaaaagaaaaagaaagaactaacaagaaagaaagagaggaaggaaggaaagagtggacaggctctaggatctggactggacttggacttagaatctggacttggacaacctaaggaagcaggggaaggttctgatgccccagtcaagtctgactggccgttgggggcaaaaggtgtgactgaagcactgacaaggtgggtggaggcactaacctgtaacacctcctctggcttggaaagttttgcttcatcaactacagctggaacctccgggggcaaggcagaagggccagaacagggaggtcttctactgaggggctgtcatcgatgtcctgagacatttgtggagcttctggtatacacagtgcagacagtttcccctgagaagctgattgtctaa

SEQ ID NO: 126956 - DNA, 401 bp, Homo sapiens
  misc_feature (1)...(401): n = a,t,c or g
ttttttttctggatctattgaaacatgtttaaaacggggttggtcacaacaggatgggcacaaatgggagcgggggaggggagtggggccgcaccagcccctgccagtgcctgaggctggcactgacgcgctccttcctccctgtctccgtggctcagaaacaggttaagggtagaggtagatggggagacgcgggggccacacagtctccggtggcagtgagggagcttgggaccctgaggggggcatgctgactccttgctggagaaaaggcacctatataggggagctgggcttgggggcctcccaaggggtcctggggtgaggtggggagggaggctgaacgaancatgaagcagggtggtgggcagaccccaatcctggtttccaaaccctcaccg

SEQ ID NO: 126957 - DNA, 221 bp, Homo sapiens
tttttttttggatctattgaaacatgtttaaaacggggttggtcacaacaggatgggcacaaatgggagcgggggaggggagtggggccgcaccagcccctgccagtgcctgaggctgcagcctggcgagtgcttttgcttctgcttctccacgctggtggttcgagatgggctgcaggggcatttatgatgcccaacaggtggcactgtcgcgctccttc

SEQ ID NO: 126958 - DNA, 627 bp, Homo sapiens
tggtggaattcgcagaacccagcgggtgccgcttctccacccgaggcttccacctccaacgagccatgttccaggctgcaggagccgcccaggccaccccctctcatgacgccaaaggcggcggcagcagcacggtgcagcgctccaaggtaggggcctggggccgggtgtgcgggaggaggggtgtgagggagcgggatgagcactggggcagcacctggctgagcttcccgcacagtccttcagcctgcgggcccaggtgaaggagacctgcgccgcctgccagaagaccgtgtaccccatggagcggctggtggccgacaagctcattttccacaactcttgcttctgctgcaagcactgtcacaccaagctcagcctgggcagctacgccgcgctgcacggggagttctactgcaaaccccacttccagcagctgtttaagagcaaaggcaactacgacgaggggtttggccgcaagcagcacaaggagctctgggcccacaaggaggtggaccccggcaccaagacggcctgaggcctctgtaaccttccactcccctcccccgctcccatttgtgcccatcctgttgtgaccaaccccgttttaaacatgtttcaatagat

SEQ ID NO: 126959 - DNA, 1848 bp, Homo sapiens
  misc_feature (1)...(1848): n = a,t,c or g
cctcgggtcgacccacgcgtccggcagctcgcgcccgcgccctcctcgtacccgtgcgcccccggagaccgatcccgccccgcggcccaggccgggcctgaacccagcgggtgccgcttctccacccgaggggtttcacctccaacgagccatgttccaggctgcaggagccgcccaggccaccccctctcataccgccaaaggcggcggtcacgagcacggtgcagcgctccaagtccttcagcctgcgggcccaggtgaaggagacctgcgccgcctgccagaagaccgtgtaccccatggagcggctggtggccgacaagctcattttccacaactcttgcttctgctgcaagcactgtcacaccaagctcagcctgggcagctacgccgcgctgcacggggagttctactgcaaaccccacttccagcagctgtttaagagcaaaggcaactacgacgaggggtttggccgcaagcagcacaaggagctctgggcccacaaggaggtggaccccggcaccaagacggcctgaggcctctgtaaccttccaccccctctgcggaaggcctggagccggcagggggaaggtgggaaggaggtcgagctgggcttgcgtgggggccaggtgggaaggggatgaggcttgctcaggcgtaggggaccagggcagggctctgctccaggactccttccttcttccttctcccgcagccggtgagggtttggaaaccaggattggggtctgcccaccaccctgcttcctgcttcgttcagcctccctccccacctcaccccaggaccccctgggaggcccccaagcccagctcccctatctaggtggctttttttccagcaaagaagtcagcatgccccccttcagggtccaagtccccactccccggaaaaaggaagaaancctttgggtttgggggttgggggccccccacgtctccccatttacctttacccttaacctgtttctgatgccacggagacagggaggaaggagcgcgacagtgccacctgttgggcatcataaatggccctgcaagccccatggggggaaggagatggggaagttgagccaacctgcctctgcagggcaaggcaggggccctcgccagtggggcttgggaccatctcgaaccaccagcgtggagaagcagaagcaaaagcacctcgccaggctgcagcctcaggcactggcaggggctggtgcggccccaactttccctccccgctcccatttgtgcccatccctgttgtgaccaaccccgttttaaacatgtttcaatagatccagattctctattgtgtggcctgctgggggatctgtcacaggaagggtgcagactcaccatggggcgggcatggggggacagggccagccccgactacctcggccctgatgggggcagggagctagaagtgggtgtcagttccctgacacaccattgagaaatgggagggctcctcttcacagcgagggcttcatgctgtcacacccacagtggttttggaactgaaactccacctcacccctcagttctgggttggttcagacccaccaacttaccatatgcaccccattgtgaagaggcctgagagcgggagggccaggctgccagtgggtgatggcgcctgtcctcgctgcacttcagtgcctggggtgcaagctgccgcgttccctggctggttccagctgtctagctccctcccttcttcccagccctttgacctggaagtaagttagcgaagaatggcggtaaccagcagacccagcaagtgctgcccaaggttttagtgacccctggattgcccccctcatcattacccctcgctgg

SEQ ID NO: 126960 - DNA, 1254 bp, Homo sapiens
atggagcgccccgacgggctgggagcagctgccggcggggcccgcctgtcgtctctgccccaggcggcctacgggccggcgcccccgctctgccacacgccggccgccacagctgccgccgaattccagccgccctacttcccgccgccctacccgcagccaccgctgccctacggtcaggcgcccgacgccgccgcagcctttccccacctggcaggggacccatatggcggcctggcgcccctggcgcagccgcagcctcctcaggccgcctgggccgcgccccgcgcagccgcccgcgcccacgaggagcctcccggcctgctggcaccgcccgcccgcgccctgggccttgacccgcgccgtgactatgccactgccgtgccccggctcctgcacggcctggccgacggcgcgcacggcctggcagacgcacctctcggccttccggggctggcggcggcccccggtctggaggacctgcaggcaatggacgagccgggaatgagcctcctagaccagtccgtgatcaagaaaggggaggccaaggtggaagtggtggtagcagggctggggctggacttccaggagctggggctgagttaccaggagctggggatcctaggggtacgccgaaatcccccaaagcagtccaaagaacacaacgagagtcctaacatcccaggtggcggcgcgctggctccctggagcggggcgggacgcggccgcgcggactcacgtgcacaaccgcgcgggacggggccacgcggactcacgtgcacaaccgcgggaccccagcgccagcgggaccccagcgccagcgggaccccagcgccagcgggaccccagcgccagcgggaccccagcgccagcgggaccccagcgccagcgggaccccagcgccagcgggtctgtggcccagtggagcgagtggagcgctggcgacctgagcggagactgcgccctggacgccccagcctagacgtcaagttacagcccgcgcagcagcagcaaaggggaaggggcaggagccgggcacagttggatccggaggtcgtgacccaggggaaagcgtgggcggtcgacccagggcagctgcggcggcgaggcagaccttcggcctccgccgagtgcggtactggagcctgccccgccagggccctggaatcagagaaagtcgctctttggccacctgaagcgtcggatccctacagtgcctcccagcctgggcgggagcggcggctgcgtcgctga

SEQ ID NO: 126961 - DNA, 505 bp, Homo sapiens
  misc_feature (1)...(505): n = a,t,c or g
aagagctcagaaactgaagcacagaaacgttaggtaggagtctgagaggcgtggagaattttgcttgtgcaagattatttcagagcaaggtcgtgcggtgtgtgtagaagatgaacagactagccactttgcattgactggaaacaatggcatttacagaaagagtcaacagcagtggcaacaggaacttagtgatttggcccgtgaccctccagcacaatgttctgcaggtccagttggggatgatatgtttcattggcaagccacaattatgggacctaatgacagcccatatcaaggcggtgtattctttttgacaattcattttcctacagactaccccttcaaaccacctaaggttgcattttacaacaagaatttatcatccaaatattaacagtaatgggcagcatttgtctcgatattctaagatcacagtggtcgcctgcttttaaccaatttcctaaaagttcctnttaanccatttggttcacngacttttttt

SEQ ID NO: 126962 - DNA, 1324 bp, Homo sapiens
gtggcactcggccggaactccttggtctacccacgcgcccgggaagttaaacttgtagccaccacctccgctcttcccggtcaccctcgcccccacttcgggccgaaagcacggtacagaggctgttggtggctttgccacgccaccccacccaccccggatcgcggctgtcttaagggacctggattcatcaggggctcttcggggcctgtgcgagtgctgatctgctccgtttttgcaaaaggcgcctgtgtctggcagagctggtgtgagatcgatgacaatcctgccccgccgccgggataatcaagagttttggccggacctttgagcatacaccgagagaagtgaggaagccagacgacaagcacacactattggcgctgaaacggattaataaggaccttagtgatttggcccgtgaccctccagcacaatgttcttgcaggtccagtttggggatgatatgtttcattggcaagccacaattatggggacctaatgacagcccatatcaaggcggtgtattctttttgacaattcatttttcctacaagactaccccttcaaaccaccttaaggtttgcattttacaacaagattttattcatcccaaatattaacagtaaatgggcagcattttgtcttcgatattcctaagattcacagtgggtcgcctgctttaacattttctaaagttcttttatccattttgttcactgctattgtgatccaaacccaggatggaccccctagtgccaggggattggcacgggtcttattaaaacaggacaggagataagtacaacagaatatctcgggaatggactcagaagtatgccatgtgatgctaccttaaagtcagaataacctgcattataggctggggataaacttttaaattactgttccttttttgattttcttaatccggctgctcccctatcaggacctcatcttttttaattttattttttgtttacctccctccattcattcacatggctcatctgaggaagacttaaggttctttcccagctttggggacaataactggttttttgggaaactgttaaagtaggttacaagaggaacagttgcccaaggactcaggaattttttaaaaaaaaaaatgggggcatgtgtattatgtggccaatggtcttcactctaacttgggttatgagactaaaacccattcctcactgctctaacatgctgaagaaatcactgaggggggagggagatggatgctcagttgtcacatcaaagggatacagcattattctagcagcatccattctggtttaagccttccactggt

SEQ ID NO: 126963 - DNA, 397 bp, Homo sapiens
atggggctcaaatccaggtcgaagggtcgctggagtgatggttggaacggaagacacccaagtactcttaaagcaatccccatggacactgggcaaaaagtagttgccccagtgactgtttcagcagtgcctcgagcaacagctcttagttctattcaggcaggaattcagcaagctagacaagagggccaaaatcaacagccgattttgataccatcaggacacctaaaaccttatcatgagccagatgccaaagaagagattccaggaggttcccgaggacctcccggttgcagccatgttgagactgatgctgaggaggaccccagctgccatgagcaacacctgtcaaacacagccacctacctggggacagatgaagaagctgtacagatga

SEQ ID NO: 126964 - DNA, 789 bp, Homo sapiens
tcaagctccaggcttgggccgtggtctcttggggacgccgttggcctcccagcttaggcccaggtgccaggtgtcatggggtctcctgcccatcttcccaaggatgccattgctgtcttcatcgtcttcccccgtgtgagacactggttgtctggtactcggcgacagtgtaccagacgcgcaccctatgtgaggtgctttaaggtccctgtcctcaggaagcgcagtctggtggaagagatgagcgctgaacaaatcaacttcagaggcctgtgtcccaaaggcctggctgcgtttgccgtgctgtgcgaggacctgtgtacacaggcaggtgtgcgcctgcccgagcgcgagtagctcttgtgtagtggtgaaatgctgcaggcatctgtttattaaaattgctgcttcagagcccactcccacgggctctgtttccttggaggccatcctgccgatggcacttttcaaggccctcccttccctacgagttgctttgtgcacgtacaccagcaggtgcatgccctgccgctgaacccctgctttgcccccactggccgctttctccaggacagccatgaacatctccagtgtcctcggagcaaggaaggaatgcttcctggagcagaagtggccacaatgacgctgggccagaagcctgcagtggcggcccggacagtgggggcccaggcagcggttcacgaggagaccttggatgagagcttgtcccttcctttctgcagcagccactcttaatgcgtctactgtgtcccagaagttttggcacat

SEQ ID NO: 126965 - DNA, 333 bp, Homo sapiens
atgcggagccctccgtggccttgtcctctggtgcctgcccctgtgactgggcctgtccctcccccaggggttcagcggcagggcatgcacctgctggtgtacgtgcacaaagcaactcgtagggaagggagggccttgaaaagtgccatcggcaggatggcctccaaggaaacagagcccgtgggagtgggctctgaaggactgggtgcagagggcatcagcgatgccaggcctagaatgtgcctcaccccgacagtggccagcacggactgtgggctacagagttgcttcagcctgagcactcagcctgaatttggacataacatcaactga

SEQ ID NO: 126966 - DNA, 1036 bp, Homo sapiens
  misc_feature (1)...(1036): n = a,t,c or g
cgagcactagtattgcacnccaggggctgcatgcagtgagcccaacggcagaggcctgcagcggggagtctacgcatggggctgaacaagtcaggtgaaaatctgcagggctggagagattaatacttggcttgttgtagaaagtgtcctcaggtagagacaaaagcatgcagaaacttactcattcttcaccccaaatctgaccccaaccggtagtcacaacaggcatggacagcctggcaacagctactcaattgcacgtgagtgaaacacacagctgggtccaaccacggcttttccttcaaatcaacatcaatgctcagcaataccgcaacgaacagcgtgaggaaagattctcatgccacggtgcgcgaaagggagtcgggacaggcaaggcagagagactcaaaattcatcgacaggacgtgcttttttttttttttttacacaagaaagtgctgcttacattgttgttttgtgttatttagtgatttgttcaagcgctcatctcttcccaccagactgcgcttcctgaggacagggaccttaaagcacctcacatagggtgcgcgtctggtacactgtcgccgagtaccagacaaccagtgtctcacacgggggaaagacgatgaaaaacaagcaatggcaatccttgggaaagatgggcaaggagaccccatgacacctggcacctgggcctaagctgggaaggccagcggcgtccccaggagaccacggcccaggctgggagcttgaccggccagacgcccgtgggtgggcctgggccctcccgcctgggagcctccagtgtggcgcctgggctctgggtggggtaacaggagctacaggccagcaatgcccttcctgtcctcggcctggctcaaggactgggtgcagagggcatcagcgatgccaggcctagaatgtgcctcaccccgacagtggccagcacggactgtgggctacagagtatacttcagcctgagcactcagcctgaatttggacataacatcaactgaattaagctcagaagta

SEQ ID NO: 126967 - DNA, 936 bp, Homo sapiens
atggttaatactgagtgtcaacttgattggattgaaggatgcaaagtattgatcctgggtgtgtctaaagaagccagtcaagggttgggtggaagatccagaggaagaaatgtcaggcagagcacagatgcagatattagacccacatctgagaaagatgcccgttcccttatgacaacaaggcaggaggataatatatctgtggaccagcgtgggttcttgtccggtgtccagaaaaaatcaggttgtgcaaatggattgaagggtagtgtatgtggaggattttattgggtgatggctgtcatcaggatgggagttggaaaggcgatgggcctcaacctgaagcttggaatcaagtttgagattaaaaaagggtatttgaagggctgcagagattcacttagattaagtcccacaggctttggcaaatttacagctaccagccacgaagtagctgctacagtccccatcaaagttgtcctggagctcaccctgcagacacataagattctaagaggagtgtttgcccacctcacatcctgtctccaactccactccttgcctccagggagctcgatggacagcgccaaagcacggaggcaactgcaagttgctggccagggccactctctggtgaaacagaaaggtttccatgtggaagcccctgaccaccacccagttcagttatcagacataagctgcaaaagctacagatggggccacaaactaatcaaaatcaacttcttaataccacctttatggtggtattatgacctggaggaagtaaaaagggaacagagtgaagaaaaacagcaagccaaaattatggcagacatcattggtgatgccctgaatgcccaaaaagcatttaagggaaacccgaagggccataaaccactgcccttttctgcagggcagatggaaaattggttttag

SEQ ID NO: 126968 - DNA, 1578 bp, Homo sapiens
tcatgactttgcagagatcagccccagctgaagtgctctcaagtactggcattgagtgactgcagcttttccacgtgcagggagcaagctgccattgggtctaccattctggaggggtctggaggatggtggccctcttctgacagctccactatgcagtgcccctgttgggatactgtgtgggggctcaaacctcacatttcttttccatactaccatagcagagattcttgataagggtgctgcccctacagcaggcttctgcctagacatccaggctttttcacacattctctgaaatccagttgaagtatctccagcctcaactcttgctctctgtgaaaccacaggcttaactccatgtgaaagcagccaaggtttgtggcctacaccatctgaagcagtggtctgagctgtacctgggtcccttttacccagagctggagctggaataactggcatgtggaaagcagtgtcctgaggctgcagtggtgtcctgggcatactgtgatggttaatattcagtgtcaacttgattggattgaaggatgcaaagtattgttcctgggtatttcccatagggctaatgaagagtggtgaatttaacaatgtcttgatgaactgaatcccagaaagaaacaagcccttggtgtgtaaactgagattcatggtagcttttatacctggggcaggcagcagcagcggcaacgcgctggggtcctcttccacactgtggaagattggttctttcgctctttgcaataaatcttgttgctgctcactctttgggtcggcactgcctttatgaactgtaacactcactgcgaaagtctgcagcttcactcctgaggccagtgagaccacaaacccaagaattatggagaccaagaagtcctgcaatcttccacatgcaagctggcaacccaggaatgttggtggtgcactttgaaggcctgagagccagagagccaatggtgtagattctggtccaaatttgaagaccgtcccccagcccgacacccgtaaagggtctgtgctgaagtggattagtaaaagaggaaagcctcttgcagttgagatagaggaaagccactgtctgctgcctgcccctgagaactgaatgtctcggtataaaacctgattgtacatttgttcagttgtacacgtccagtcatagtaccttcccttgaacttaattatgacgtagattctattgctcacatgtttgttgctgaccttctccttatgatcaccctgccctcctacgacattcctttttactgcttggtattccaaaatcttcttgtacttgaatttcaatatctttaggtatgggaagttatctgttattaaactttctacctttatctctttctgtacctcttctttaaggcaagtaactcttagatttgcactttgaaggctgtttactatgtcttctaggcatgcttcattgttttttattcctgtttttgtctcctctgactgtgttttcaaatactctgtctgcaagctcactaaattttcttctgcttgattaattctgctactaagagactctgatgtattttctgccat

SEQ ID NO: 126969 - DNA, 474 bp, Homo sapiens; identical to SEQ ID NO: 115755

SEQ ID NO: 126970 - DNA, 1707 bp, Homo sapiens
atgggctgcttggggacccagattgctcccagggcctttctgctgctacctctacccctgtatttcactccactcagctctgtaacttgcatcagctccagtggtgtaaggaaatggccaagtggtagtctcatagtctattacggcaaaaccattgttgcatctcctgatggaagcactcttcccttggaggctgaggtctctaacccagcagaagacagagtttccaggccagttctacattttagggttgtgatggttaatactgagtgtcaacttgattggattgaaggatgcaaagtattgattccggatgtgtctccgagctctggtggaaaggccgatgccggcctgagagtgggaaacgtggggccgggagccgggggcttccgcgcggcgtggcgtggcgtggcgtggcgtggcgccctcagggccgttacgcgattttcgctcccgcgggcagcgcctctcaggccactcccgagggaccccgaggacgcactcgggccccagggcgacggttcaaacgggccattgtgcgcccccggggtcccccggcccctgcagggctacttgggcgcagagccgcggagggtctccgttcctagaggtcctcctatcccgggctgcctgagtcctcgccagcatccgccctctcccactcccatccttcctggatccgcctctcggttcccgagggacagtcccgaccgcaaacccaccttctccttcgcatccgacgcaaccggcagcagcgctgccgccgcgtcctcagccaccgctccctcttcccacggtaaccccctaggcgaccctgggcacagggagcgcgggcggctgagcggcctgagcaccggatgtgcatctgcaggctctgtcaatgtgctcattgcaataagactcaaactgcagtcaatccacatctgtgagctctctgactgcatctgtcacctgcagttccaaagcgacactggcagatgtgatcttcgtggtggaaagctaaattttaaaaccaccccaatggatgcagacagtgatgttgcattggacattctaattacaaatgtagtctgtgtttttagaacaagatgtcatttaaacttaaggaagattgctttggaaggagcaaatgtaatttataaacgtgatgttggaaaagtattaatgaagcttagaaaacctagaattacagctacaatttggtcctcaggaaaaattatttgcactggagcaacaagtgaagaagaagctaaatttggtgccagacgcttagcccgtagtctgcagaaactaggttttcaggtaatatttacagattttaaggttgttaacgttctggcagtgtgtaacatgccatttgaaatccgtttgccagaattcacaaagaacaatagacctcatgccagttacgaacctgaacttcatcctgctgtgtgctatcggataaaatctctaagagctacattacagattttttcaacaggaagtatcacagtaacagtttttcctctgaccgcttccagccaaagatacagtccctttgtagtcatggaccaagtcaaggcacattcagtggtcagcagtggcccccacagtgcacttgaggctgccatttgcattgtggcggcccctgactcagcagcagaatgtctagtgtggcaaggagtagtcaactacgaacaacaagattttacaaatagcctttaa

SEQ ID NO: 126971 - DNA, 1506 bp, Homo sapiens
atggggaacccagacccacacttgctgggtgtcgcactagaagaagagcagaacttatctgccttgcagccttggttctcagggaagggtgctgacctgcccaaggtcaaagcaggtccagaaaggccacagtcctggctcggtgctctcccagctcctgcatgtagcctgtcctgtagaaaagagaggatagatctggccagagctggggctgtgggcaaagaggactggatgctctcttggcaacatcatccaaggctcaaggaccaggcaaattgtgaatcaaatggaatctccctcgtgctaaggggctgcagagctgtcattccatatgctttgctcagggaccctaactctattcttgacccttccaaacccgcagatgactttgtcatcttttctaccaagaaggaaggtcatgacagaggaacattctttaactgcctttccttcaactcgcaaattcctcatgcttcaggagaaaaagtttctcttcctttccatctgtgcactcatcccatcacttcccatccctctatacagccttatcgtctgtgtgctggtgttattgtttatgttgacctggctgcaggggcctcttggcaatatgcccacctgaaagtctgtttacctgctaactattgtaattttttaaaactcttggcttatatagggctcttttcaatcatggactcggaccttttaaatcctaatgccacctatgcaaaagaattcactagtatgttacctgttaagtgcagttcaaaaatatgcaaagctaaatatgttcaggggcatgtctgcagtaaaactgtaaagaaaaggaagaatgagtctgttcagagaaaagctcatcatcccttgagcaactcagcatctcctcacagaaaatcgaatcatataacgggttgtgtttccgttttcattctggctactagggagctaaacgttagttttgaagctcaactccgacacacccaggaacaatactttgcatccttcattccaatcaagttggcactcaatattaaccatcacaggggaccagtggagtattcctgcatttggggcatcatggggctttacttctctagcatgtcaaggtttttcatgaagcaagttggtgatgaaatgactctcaaacgccttccccattttacgctggggattctgcctttaccctttaatggacaggtgtgtcccatgttccggataacagtcccagagaaggggcctccatgggaggatgttcacatttccgaagataggaaagcccgagaaggagcaaagagaagcccaaatctgtccccaaaaacacatcctgaactttccatgcactgtaagcaatgtcttcaagcactagcgtgtgaaagacgacacctgaaggggggcttctcactgaatctgcaggacactggcctacataagtcagaagagagcatcccacaggaaggagagtggcatcttgaccaccaagttacctctagtatccagcacagcatctga

SEQ ID NO: 126972 - DNA, 1220 bp, Homo sapiens
atcccctgctccggggtgatagtgttgagaagacctctcgggtatggtcaggtggtgaacgtgaccaggagctgcttactgaggacgcactggatgatctcatcccttcttttctactgactggtcaacagacaccggcgttcggtcgaagagtatctgctgctgcacttaccgaaagtgattatcgtgttctggttggcgagctggatgatgagcacatggctgcattatccacattgggtaacgattatcgcccaacaagtgcttatgaacgtggtcagcgttatgcacgccgattgcacaatgaatttgctggaaatatttctgcgctggctgatgcggaaaatatttcacgtaagattattacccgctgtatcaacaccgccaaattgcctaaatcagatgttgctcttttttctcaccccggtgaactatctgcccggtcaggtgatgcacttcaaaaagcctctacagataaagaggagttacttaagcagcaggcatctaaccttcatgagcagaaaaaagctggggcgaaaatcctgtgtgatggtggttccgaaatcggcaaaatcccttataaatcacaagaatatcccgagatagggttgagtgttgttccagtttggaacaagagtccactattaaagaacgtggactccaacgtcaaagggcgaaaaaccgtctatcagggcgatggcccactacttgaaccatcacccaaatcaagtttttttgggtcgagacgcacccaggaacaatactttgcatccttcaatccaatcaagttgacacttaatattaaccattacatgggtcaattgataaaagctcacctggagagtgcatggcaacacctgtacctgaaaattgagtttgccaatgaattctatgagcagatggtgctgcctctgaaaacgcagctgagtatccaggttatgagtggaagaggaagagcacaagcttgtggcgacacaggtgtccatgaggctgtgaggcggccttgggctgcggcgtcgtactggctgtccacgatgtctgtggccgcggccgccccttcttacagtggggatcccgaggaagagggcgcccagaccggatgggtttctgagtacacggaattatctgggacgctatttctcctgtgtttcttctggctaactcctatacagataaaatctcctttctcagagaacttaatgacccaacatccaatgtag

SEQ ID NO: 126973 - DNA, 738 bp, Homo sapiens
atggaccctcgcggagtgaaactgcagacctccaccatgagtgttacagctcataaaggcagtgcggacccaaagagtgagcagcagcaatatttattgcaaagggagaaagaacaaatcttccacactgtggaaggggacccaagcagatcccttgctgagacggggaccatcactggtgtggcagcccgctgcttggaatctccatcctccttctcctcttggaggaaagagaagggagtacacgtaaagtttcttacaaagccaaaaaagaaattatttggctggttactcagcgtgatggttaatattgagtgtcaacttgattggattgaaggatgcaaagtattgttcctgagtgtgtctactccaagtttttcagcttttggactcttggacttaacacgaatggtttgtcaggggctctcgggccttcggccacagactgaaggctgcattgttggcttccctacttttgaggttttgggactcagactggcttctctgctcctcagcttggagatggccggttatgggacttcaccttgtgatcacgcctcactgactccccacgccctgggaaggccttccctgcctcgatcaaggccctctttccacaatgcacagcccaagtactttcctcccccaaggctccactcaggggaagtttccacacgcatgcatgccttgtggattgatggttgccatagcttccattctaggccgaaagccccatga

SEQ ID NO: 126974 - DNA, 906 bp, Homo sapiens
atggatgaaggtggaaaccatcattctgagcaaattatcacaaagagagaacaccaaacacctcatgttctcactcataggaaaggagagatgaaatacaaagaggaggttgggcagctcctactctcctgtacctttagccaagtgttctggggacaccagagaggccatctacaaactgaggagcaaggaagccagtccgagtcccaaacctcaagagcagggaagccaactgtgcagccttcagtctatggccaaaggcccgagagcccctggcaaactactggtgtaactccaagagtccaaaagttgaagaacttggagtctgatgttcgagggcaggaagcatccagtgttctccagggccgatgtatgtttggagatggatttccccctctcacacttcaggcactcagttttttggcagtctcatggagttttcagtggcaagccgcttatttcaaatggtctgtgaattcttttggtttttctgatatgttcctgggatttggaaaggattccgtgatggttaatattgagtgtcaacttgattggattgaaggatgcaaagtattgttcctgggtgtgtctatgcttcctgacctcgaatatcagactccaagttctttagcttttggactcttggacctttggccacagacggaaggctgcacttttgaagttttgggacttggactggcttccttgctcctcagcttacagatggcctattgtgggacttcaccttgtgattgtttaccagaagttaggtttatcactgttgcaaagccactgagttctgatccagaatctcacaaactggtacatgcccacgcagatctagcctgtccagaagatgaacaggaggaaaaacgcaatgccaagaaggaagcaaccgggtcctaa

SEQ ID NO: 126975 - DNA, 843 bp, Homo sapiens
atgcttcctgccctcaaacatcgggctccaggttcttcagttttgagactcagactggctctccttgctcctcaagcttgcagacagcctattgtgggaccttgtgatcgtgacacattttctagcaaaggatgtgtgtcagcgagaagggtatgtgactgtaacatccgtgtatcctaccataaaccacctcacccagaagcagcagatctgatagaatgtttgaacagactattaaaacattcgaataagatgtccgtccagagacaaaaccctctaggttggagagctctctcggatgcaccgaaccaaccactgatacacggtgctgcatctaccatcgctaaaatacacagtgtgatggttaatattgagtgtcaacttgattggattgaaggatgcaaagtattgttcctgcgtgtgtctgtgagggtgttgccaaagaagattaacattttgagtcagtggactgggagaggcagaccaacccttaatcagctgccagcactatctaatcagctgccagggtggctaggaataaaagctggccgaagttgggaaaataaggataaggaacacgtgttgagtctgccggccttcacttttcccctgtgctgggatgccttcttgcccttgaatatcagacttccaagttctttcagcttttgggactcttgggactttacacccagtgtttttgccaggggctctcaggccttcagccacagactgaaggctgtactattggcttccctacttttgaggttttgggactcagactggcttccttgctcctcagcttgcagacggcctattgtgggacttcaccttgtgattgtatga

SEQ ID NO: 126976 - DNA, 2124 bp, Homo sapiens
gcaatgaatttgaataaacatttccccaaagaagatatacaaatggctaagaagcacatgaaaagatgctcaacatcattagcggtccagggtgggaatgtgaaatggtgcagccattttggaaaacagcttgaaataaagggtgttcaattaggaaaagaggaagtcaaattgtccccgtttgcagatgacatgattgtatatctggacaaccccatcatctcagcccaaaatctccttaagctgataggcaacttcagcaaagtctcaggatacaaaatcaatgtgcaaaaatcacaagcattcttatacatcaataacagacaaacggagagccaaatcatgagtaaactcccattcacaattgcttcaaagagaataaaatacctaggaatccaacttacaagggatgcgaaggacctcttcaaggagaactacaaaccactgctcaatgagataaaagaggatacaaacaaatggaagaacattccatgctcatgggtaggaagaatcattattgtgaaaatggccatactgcctaaggctacagtaaccaaaacagcatggtaccggtacgaaaacagagatgtagaccaatggaacagaacagagccctcagaaataatgccgcatatctacaaccatctgatctttgacaaacctgagaaaaacaagcaatggggaaaggattccctatttaataaatggttctgggaaaactggctagccatatgtagaaggctgaaactggatcccttccttacaccttacacaaaaattaattcaagatggattaaagacttaaatgttagacctaaaaccataaaaaccctagaagaaaacctaggcattaccattcaggacataggcgtgggcaaggacttcatgtctaaaacaccaaaagcattggcagcaaaagccaaaactgacaaatgggatctaattaaactaaagagcttctgcacagcaaaagaaactaccatcagagtgaacaggcaacctacagaatgggagaaaatttttgcaatttacttatctgacaaagggctaatatccagaatctacaatgaactcaaacaaatttacaagaaaaaaacaaacaaccccatcaaaaagcgggcaaaggacatgaacagacacttctcaaaagaagacatttatgcagccaaaagacacatgaaaaaatgctcatcatcactggccatcagagaaatgcaaatcaaaaccacaatgagataccatctcacaccagttagaatggcaatcattaaaaagtcaggaaacaatagggacatggatgaagctggaaaccgtcattctcagcaaactatcgcaaggacaaaaaaccaaacaccacatgttctcactcataggtggcaatcgaacaaggagaacacatggacacaggaaggggaacatcacactctggggactgttgtcagattctgtgaactgtgcttcttcatcaggctagctttagacatccccatctttcctgtgtatacattgagacaaaaaagacctagcattgcccaatatttggcagatagtaaagacagacttacagacagactttactacagtcagcaagtaatagagctggaatccaagtcaagaccagttgacttgaaagcccgtgctcttaactcctacagtcagtactttctcccttggggaaagaagggctttgtggacagccctatagactgtgagagattgacccatgccagtgaccggccaacacattcttacctagttgggtcagagcatgagttggttcagaagggaacaggaagagcagatttggaaagaacacgggaacgagaggctaagtctccagagggagccttagaagtggacttggtgcttttcccccccacaatattaatcccctatggtcacgtgcagggaatacaaatgcccttctcaggccctcaggttcaatttcaccataagacaattgacctatcgcctagtgcatttgatgtgtatggccttttgatgaagcaccatcttcaccttctaggaacctccaatccaaaggagcgactctccattgtaaactcagatgatgattttattttttattcaaaagggctttgctttgttgcatatgccactgaa

SEQ ID NO: 126977 - DNA, 250 bp, Homo sapiens
atggaatactatgcagccataaaaaaggatgagttcatgtcctttgtaaggatatggatgaagctggaaaccatcattctcagcaaactatcgcaaggacagaaaaccaaacaccgcaggttctcactcatagatgggaccatcacagaagctttacaaggactgaaaactctagccaacgaactggcagaaaatgctggaattgatgacccacttgtgggttggctagaagttggtttggaaagacatg

SEQ ID NO: 126978 - DNA, 261 bp, Homo sapiens
atggaatactatgcagccataaaaaatgatgagttcatgtcctttgtagggacgtggatgaagctggaaaccatcattctcagcaaactattgcaaggaccaaaaaacaaccactgcatgttctcactcacagacatctttcaaacgtgctgctacgctgacataatagtaaggaagccacaaggcccaacgcaggaagtgaaacccaaactcaggtggataaatgagccccacccccaaagccagcttctggcggggagg

SEQ ID NO: 126979 - DNA, 303 bp, Homo sapiens
atggatgaagctggaaaccatgattctcagcagactattgcaaggacaaaaaaccaaacactgcatgttctcactcacaggctaaggacgctgcagaatcccgtcctcctatcattaaacaagcaggacagccgcccgcgcgcgtcccggaggcacctgcaagagcgcgcgggcgcgcgggcgctcgggcccggcaaacgccgcttccgggtcacgtggcccggcttccggttcgcacctcccctcagcgaagaaacctccaatcggctgccttggactcagcggttacccgcgctgcctccg

SEQ ID NO: 126980 - DNA, 291 bp, Homo sapiens; identical to SEQ ID NO: 121093

SEQ ID NO: 126981 - DNA, 321 bp, Homo sapiens
atggaatactatgcagccataaaaaatgatgagttcatgtcctttgtagggacatggatgaaattggaaatcatcattctcagtaaactattgcaaggacaaaaaaccaaacaccgcatgttctcgctcatagattttatcatgtgggcaacctgctgcaactggttctgcctggatggacagcctgaggaggtcccaccaccccagggagccaggatgcaggcctattccaaccctgggtacagctccttcccttccccaacaggcttggaaccaagctgcaagtcctgtggggctcactttgcaaacacggccaggaag

SEQ ID NO: 126982 - DNA, 370 bp, Homo sapiens
atggaatactacgcagccataaaaaatgatgatttcctgtcctttctagggacatggatgaagctggaaaccatcattctcagcaaactgttgcaaggacgaaaaaccaaacaccgcatgttctcactcataggtggtgctgggggccagcagggcttcctgggctgcatccgctccttgaggatgaatggggtgacacttgacctggaggaaagagcaaaggtcacatctgggttcatatccggatgctcgggccattgcaccagctatggaacaaactgtgaaaatggaggcaaatgcctagagagataccacggttactcctgcgattgctctaatactgcatatgatggaacattttgcaacaaag

SEQ ID NO: 126983 - DNA, 687 bp, Homo sapiens; identical to SEQ ID NO: 126112

SEQ ID NO: 126984 - DNA, 210 bp, Homo sapiens; identical to SEQ ID NO: 121097

SEQ ID NO: 126985 - DNA, 231 bp, Homo sapiens
atggatgaagctggaaaccatcactctcagcaaactatcgcagggacagaaaaccaaacactgcatgttctcactcatacgtcggaattgaacaatgagaacacttggacacagggtacccccgaacctaaaataaaagttaaaaaagaaaaagaacagtctcttggtggatggacactgatgatagcagagacagctgctaggcatttgttccaagacaaacagcgacag

SEQ ID NO: 126986 - DNA, 243 bp, Homo sapiens
atggaatactatgcagccatgaaagatgagttcatgtcctttgcagggacatggatgaagctggaaaccatcattctcagcaaactatcacaaggacaaaaagccaaacaccgcatgttctcactcataggaaagatttacaaatctttgaaattgcagagaaatactgtcactgaatcagggagagatagagaagagatgccaaaggaatggcctaggactcaaggatattcggaatatctg

SEQ ID NO: 126987 - DNA, 391 bp, Homo sapiens
atggatgaagctggaaaccatcattctcagcaaactatcataaggacaaaaaaccaaacaccgcatgtcctcactcataggcagtacagatcagcagcggctcgtagtgaagaacgttcaaggaagagtttgtcccggatcaacaggacatggggcttgggaagcctggactgccatgaggaaggtcgattcaccactacagacagggagcctgaggcctgggtggtgccgacaagtcggcagtcacgccaggtcaggaagcgccgaagccgcgggaaaccctggactccatcccgggatttgtccccgtgtcgaagatggtatccaggtcgccgaaaacttcccggaagtttagaccaagacctacttattatctacggtgtccgggaag

SEQ ID NO: 126988 - DNA, 289 bp, Homo sapiens; identical to SEQ ID NO: 126204

SEQ ID NO: 126989 - DNA, 1197 bp, Homo sapiens; identical to SEQ ID NO: 117308

SEQ ID NO: 126990 - DNA, 389 bp, Homo sapiens
atggaaacagaagatatagatgacactctaaagcaaccagatctaagagatatagacagaacattccactcgaacagtggagcaggaagactaagattggcaactatccacacaaaagcagcagtttcacaggaactaaaagtcagggacatggatgaaactggaaaccatcattctcagcaaactatcgcaaagccaaaaaaccaaacactgcatgttctcactcataggcacctaagagagaaaatcttcatcctacccttgggtcaaccacttagtcacgaatctctcatagtggtgtggaatccccggtcaaactggacagctgtgcaagcttttggcttagtgaagtcccacttcttccctaaagatacagtgtcctactcaag

SEQ ID NO: 126991 - DNA, 292 bp, Homo sapiens
atggaatactatgcagccataaaaaatgatgagttcatgtcctttgtagggacatggatgaagctggaaaccatcattctcagcaaactatcacaaggacaaaaaaccaaacaccacatgttctcactcataggccttgcagtattaaaacatgtgctaacaccacgaataaaggcaactcacgttgcttttgattgcatgaagaattatttagatgcaatttatgatgttacggtggtttatgaagggaaagacgatggagggcagcgaagagagtcaccgaccatgacgg

SEQ ID NO: 126992 - DNA, 618 bp, Homo sapiens
atggatgaagctggaaagcatcattctcagcaaactatcgcaaggacaaaaaaccaaacactacatgttctcactcgtagtcttttgcacgggtctctggctccaagctctggggctcggagacctgagcaggttcttttctcttcccagggtgaagaacctcctaaagatactgtaaccggagtaactcccgcgctggcagcgtctcaacagcccggagtgaacgagctgaccccaccagcgccgggacccacgtctggggcagccgcgcggcgtcttacttttctggctggagtaacctggataatagccatagtagccggtgatccgcaggatccggtcctcgatagtggccaccccgttgggggccgccttgacatccatagagagcgcggggcgacggccccgagtgcggcggggcggagagcgcagcgcggggcccgggagctggtgcagaataaggggagagaggaggaggaggaggagaggaggggaggggagaaggaggagaaggggaggggaggaggaggaggacgaggaggaggaggagaaacagcagcagcgagcccacttattcaagaagaatgcgacatggaacagacccagaccaaagcttaa

SEQ ID NO: 126993 - DNA, 1245 bp, Homo sapiens; identical to SEQ ID NO: 122814

SEQ ID NO: 126994 - DNA, 972 bp, Homo sapiens
  misc_feature (1)...(972): n = a,t,c or g
atggatgaagctggaaaccatcattctcagcaaactattgcaagggcaaaaaaccaaacaccgcatgttctcactcatagagggcagctgccccacacaacagaaagcagcaatggggctgagccaggcctgcagccacaggccaaactggggcaaggggctgaaagagtggttaacacaccgccatccattccagatggcgaggttgaatacacagtcacagtggccgtgggatccatgacaaactgcagaccgggcatgaactggcaggccaagtgtggggcatctcctgtgatgaacccaggcccagcaaaacccggacaggggtgttaccaaccagaggtctccgactggcaaagtgaccaagaaaaatcctgtgtcactatggtgactgtgtctctgtactatgggacacgtccctcggatgcatcctccaaactggaaagagttaatttcccagcccttacactggttggcttaggattggcctcagggaaagggaacccaaaaacccaacatgccagcaaaagggtaaagtgttttgccagtcaggcttttgccctcgggccttgggatttntgagctgcccttacctgtgcccttgtttcatttttatatatgtcttctaataacccggtttgtctattcttgccttcaggccatcaaactccaaacaatcatgcaaccagagcctctgacgatggccccttctgctggaaacccttagataggtctctgagggagctctgccatttcccccaaaacagcaccccctatcagcaggaagcagttaagatcggtcttagtccttatccttaatctaacagcagttagatatacttctttagagaggggaatgagacagccaggtgcaagggccgccccagaaaaactccaaccgtaatgctcattggagtggaactcgagaagttcgccctgtttgcagcaggaggaacctggcccttcctcttc

SEQ ID NO: 126995 - DNA, 678 bp, Homo sapiens
atggaatactatgcagccataaaaaaggatgagctcatgtcctttgcagggacatgggtgaagctggaaaccatcattctcagcaaactatcacatggacagaaaaccaaacaccgcatgttctcactcatagcccctggcagccatcattctgcattctgcctttatgaatttgactcctctagggatttcctggattttgccgatttcggaaccaccatcaaacaggattttcgcctgctggggcaaaccagcgtggaccgcttgctgcaactctctcagggccaggcggtgaagggcaatcagctgttgcccgtctcactggtgaaaagaaaaaccaccctggcgcccaatacgcaaaccgcctctccccgcgcgttggccgattcattaatgcagctggcacgacaggtttcccgactggaaagcgggcaggattttgccgatttcggaaccaccatcaaacaggattttcgcctgctggggcaaaccagcgtggaccgcttgctgcaactctctcagggccaggcggtgaagggcaatcagctgttgcccgtctcactggtgaaaagaaaaaccaccctggcgcccaatacgcaaaccgcctctccccgcgcgttggccgattcattaatgcagctggcacgacaggtttcccgactggaaagcgggcagtga

SEQ ID NO: 126996 - DNA, 1992 bp, Homo sapiens
atggatgaagctggaaaccatcattctcagcaaactattgcaagaacaaaaaaccaaacgctgcatgttctcactcacagtaaccttaacatctggacgcagacagccccagcaatcctggaggaaaccttggaaatacgcgggtcatcttctatgaagaccacagcagccctgagaaaccaatacagcgttccaatctttaaaagaagtgcaatcaaactagaactcaggattaagaaattcactcaaaaccgctcaactacatggaaactgaacaacctgctgctgaatggctactgggtacataacgaaatgaagggagaaataaagatgttttttgaaaccaacaagaacaaaaacacaacataccagaatctctgggacacattcaaagcagtgtgtagagggaaatttatagcactaaatgcccacaagagaaagcatgaaaggtctaaaattgacaccctaacatcacaattaaaagaactagagaagcaagagcaaacacattcaaaagctagcagaaggcaagaaatgactaagatcagaacagaactgaaggaaatagagacacaaaaaactcttcaaaaaatcaatgaatccaggagctggttttttgaaaagatcaacaaaattgatagaccactagcaagactaataaagaagaaaagagagaagaatcaaatagatgtaataaaaaatgataaaggggatatcaccactgatcccacagaaatacaaactaccatcagagaatactataaacacctctatgcaaataaactagaaaatcaagaagaaatggataaattcctcaacacatacactctcccaagactaaaccaggaagaagttgaatctctgaatagaccaataacaggctctcaaattgaggcaataattaatagcttaccaaccaaaaaaagtccaggaccagatggattcacagccgaattctaccagaggtacaaggaggagctggccacagtaaccaaaacagcatggtactggtaccaaaacagagatatagaccaatggaaaaggacagagctcttagaaataatgccgcacatctacaactatctgatctttgacaaacctgacaaaaagaagaaatggggaaaggattccctatttaataaatggtgttgggaaaactggctagacatatgtagaaagctgaaactggatcccttccttacaccttatacaaaaattaattcaagatggattaaagacttacatgttagacctaaaaccataaaaaccctacaagaaaacctaggcaataccattcaggacataggcgtgggcaaggacttcatgtctaaaacaccaaaagcaatggcaacaaaagccaaaattgacaaatgggatctaatcagactaaagagcttctgcacagcaaaagaaaccaccatcagagtgaacaggcaacctacagaatggaagaaaatttttgcaacctactcatctgacaaagggctagggctaatatccagaatctacaatgaactccaacaaatttacaggaaaaaaacaaacaaccccatcaaaaagtgggtgaaggatatgaacagacacttctcaaaagaagacatttatgcagccaaaaaacacatgggaaaaatgctcatcatcactggccatcagagaaatgcaaatcaaaaccacaatgagataccatccatctcacaccagttagaatggcaatcattaaaaagtcaggaaacaacagggacatggatgaagctggaaaccatcattctcagcaaactattgcaaggacaaaaaaccaaacaccatatgttctcactcataggtggcaatcgaacaaggagaacacatggacacaggaaggggaacatcacactctggggactgttgtcagattctgtgaactgtgcttcttcatcaggctagctttagacatccccatctttcctgtgtatacattgagacaaaaaagacctagcattgcccaatatttgg

SEQ ID NO: 126997 - DNA, 938 bp, Homo sapiens
atgggctcttttaaaggtattcaattaggaaaagaggaagtcaaattgttcctgtttgcagatgacatgattgtatatttagaaaaccccatcctctcagccccaaatctccttaagatgataagcaacttcagcaaagtctcaggatacaaaatcaatgtacaaaaatcacaagcattcttatacaccaataacagacaaacagagagccaaatcatgagtgaactcccattcacaattgcttcaaagagaataaaatacctaggaatccaacttacaagggatgtgaaggacctcttcaaggagaactacaaaccgctgctcaatgaagtaaaagaggacacaaacaaacggaagaacattccatgctcatggataggaagaatcaatatcatgaaaatggccatactgcccaaggtaatttatagattcactgccatccccataaagctaccaatgacttccttcacagaattggaaaaaactactttaaagttcatatggaaccaaaaaagagcccgcattgccaagacaatcctaagtcaaaagaacaaagctggaggcatcatgctacctgacttcaaactatactacaaggctacagtaaccaaaacagcatgggacatggatgaagctggaaaccatcattctcagcaacctattgcaaggacaaaaaagcaaacatcgcatgttcttactcatagttcagggtcacaggtggccagagcccctcgcagccgggacccctgtggacaggaggacatcccatcgcagagcacactcacacacacattcacactcgcttacactgggaccactcacacacacattcacactcgctcacactgggaccacacagatctgccagttcattccacttgcacagctctgagatgtgggaggaaacagcagtacccggcaaaagccaacacagacag

SEQ ID NO: 126998 - DNA, 4114 bp, Homo sapiens
atggggtcttgcccaggtggattcacagccgaattctaccagaggtacaaggaggagctggtaccattccttctgaaactattccaatcaatagaaaaacagggaaccctccctaactcattttatgaggccagcatcatcctgataccaaagcctggcagagacacaaccaaaaaagagaattttagaccaatatccctgatgaacatcgatgcaaaaatcctcaataaaatactgacaaaccgaatccagcagcacatcaaaaagcttatccaccatgatcaagtgggcttcatccatgggatgcaaggctggttcaacatacgcaaatcaataaatgtaatccagcatataaacagaaccaacgacaaaaaacacatgattatctccatagatgcagaaaaggcctttgacaaaattcaacaacccttcatgctaaaaactctcaataaattagggacatggatgaagctggaaaccatcattctcagcaaacgatcgcaaggacaaaaaaccaaacaccggatgttctcactcatagtaaatattatccctaccataaagatactaattaagcaaaacatgacagcaatggaaactctctgtccaatatttaagttagaaggtgataccatggataaccctattgcaaatagaagagtgaggacagcagttcccacaagtgtggtgtgcctccacgtgggcacagagccagaagcaagactgccacatgggcctatgatcacggcacaaagtccttttggacagtgcctccctggagttgtggggcagttcaggaagagagaggatctcaagaaagaaggacatactaaactcctgtcaaaaaaggaagccaggcctcagactgggctcaggacttgggctctggattcaggcaccaaaggcacagatgagggagagccaccgctgctgatacccaggcaaacagggtctgcagtggacctccagcaaattacaacagacctgcagctgagggtcctgactgttagaaggaaaactaacaaacagaaaggacatccacaccaaaaccccacctgtacgtcaccatcatcaaagaacaaagaaaaagagggaatcctccctaactcattttatgaggccagcatcatcctgataccaaagcctggcagagacacaaccaaaaaagagaattttagaccaatatccctgatgaacatcgaagcaaaaatcctcaataaagtactggcaaaccgaatccagcagcacatcaaaaaccttatccaccatgatcaagtgggcttcatccatgggatgcaaggctggttcaacatacgcaaatcaataaacgtaatccagcatataaacagaaccaaagacaaaaaccacatgattatctcaatagatgcagaaaaggcctttgataaaattcaacaacccttcatgctaaaaactctcaataaattaggtattgatgggacgtatctcaaaataataagagctatctatgacaaacccacagccagtatcatactgaatgggcaaaaactggaagcattccctttgaaaactggcacaagacagggatgccctctctcaccactcctattcaacatagtgttggaagttctggccagggcaatcaggcaggagaaggaaataaagagcattcagttaggaaaagaggaagtcaaattgtccctgtttgcagatgacatgattgtatatctagaaaaccccactgtctcagcccaaaatctccttaagctgatgagcaacttcagcaaagtctcaggatacaaaatcaatgtgcaaaaatcacaagcattcttatacaccaataacagacaaacagagagccaaatcatgagtggactcccattcacaatcacttcaaagagaataacatacctaggaatccaacttacaagggatgtgaaggacctcttcaaggagaactacaaaccactgctcaaggaaataaaagaggatacaaacaaatggaagaacattccatgctcatgggtaggaagaatcaatatcgtgaaaatggccatactgcccaaggtaatttatagattcaacaccatccccatcaagctaccaatgactttcctcacagaattggaaaaaactactttaaagttcatatggaaccaaaaaagagcccacattgccaagtcaatcttaagccaaaagaacaaagctggaggcatcatgctacctgacttcaaactatactacaaggctacagtaaccaaaacagcatggtactggtaccaaaacagagatatagaccaatggaacagaacagagccctcagaaataatgccgcatatctataactatctgatctttgacaaacctgacaaaaacaagcaatggggaaaggattccctatttaataaatggtgctgggaaaactggctagccatatgtagaaagctgaaactggatcccttccttacaccttatacaaaaattaattcaagatggattaaagacttacatgttagacctaaaaccataaaaaccctagaagaaaacctaggcaataccattcaggacataggcatgggcaaggacttcatgtcgaaaacaccaaaagcaatggcaacaaaagccaaaattgacaaatgggatctcattaaactaaagagcttctgcacagcaaaagaaaccaccatcagagtgaacaggcaacctacagaatgggagaaaatttttgcaacctactcatctgacaaagggctaatatccagaatctacaatgaactcaaacaaatttacaagaaaaaaacaaacaaccccatcaaaaagtgggcaaaggatatgaacagacacttctcagaagaagacatttatgcagccaaaaaacacatgaaaaaatgctcatcatcactggccatcagagaaatgcaaatcaaaaccacaatgagataccatctcacaccagttagaatggtgatcattaaaaagtcaggaaacaataggtgctggagaggatgtggagaaataggaacacttttacactgttggtgggactgtaaactagttcaaccattgtggaagtcggtgtggcaattcctcagggatctagaactagaaataccatttgacccagccatcccattactgggtatatacccagaggattataaaccatgctgctataaagacacatgcacacgtatgtttattgtggcactactcacaatagcaaagacttggaaccaacccaaatgtccaacaatgatagactggattaagaaaatgtggcacaaatgcaccatggaatactatgcagccataaaaaataatcgagttcatgtcctttgtagggacatggatgaagctggaaaccatcattctcagcaaactatcgcaaggacagaaaaccaaacaccgcatgttctcactcatagtcaggaccctcagctgcaggtctgttggagtttactcgaagtccactccagaccctgtttgcatgggtatcagcagtggttgctgcagaacagcagatattggtgaagtgcaaatgctgctgcctgatcgttcctctggaagttttgtctcagaggagtacctggtcctgtgtgttgtcagtctgcccctactggggggtgcctccttgttaggccactcagggatcagggacccacttgaggaggcagtctgcccgttctcagatctcaagctgtgtgcttggagaaccactactctctttaaagctatgagtgagaacatgcagtgttcggttttttgtccttgcaatagtttgctgagaatgacggtttccagcttcatccatgtccctgttcccccagagccactgagggccaggaacaagtctgggtgtgctatagtcctgtataggattcccagccttccccctcatacctccagcttctgggtctttcctctctccactctcagtgccttccctctgaagatcagctcctccttgtacctctggtagaattcggctgtgaatctgtctgttccctggacttttttcggttggtaagctattaattattgcctcaacttcagagcctgttattggtctattcagagattcaacttcttcctggtttagttttgggagggtgtatgtgtcgaagaatttatccat

SEQ ID NO: 126999 - DNA, 858 bp, Homo sapiens
atgtgggaaagtttggagctccctagagacttattggatggcgttgaccaaaatgctgataatgatatggaccatgaaatccaggctgcggtggtctcagatggagatgaagaacttggaaagcacaggttgcatgtagacactggaatggagggtgattggtgtggccttattcctgttggacagccttgtatgcaggttacaaccacaggcctcaagtggaacctcagaacttgtgactacactaggaccacctggatagccaaggataatcccgtcccaagactaatcagattaatcagacttaatcacatctgtaaagttcctcttgccatgcttcattatcaagaaggcctttatgtccaagatgaaaggagtctacttatgttgaaagatcaaaaggaccaggaaactccagagatccagggagagatggaagaaacggggaaaggatgggtgaagtgtggaagtggtattcctcaagatggaagatggaattcagactggggatgggagcccttcgagaaaagtgtgtttagctccacctttgaaagtagagacaacgaaatgagagatgatgagttagtaactgactcagacaaaaggcaagagagagtagccatggcagtagctattgccttggcctgggcgacccagtgttcatcagctgcaagagctcagtacagcctgcatggcacagtttcacacagagcagaaacagccaagaggcgttcctggagcattcctgggtgggaccttcatgctcatggtcagagatggaagctagagttccatcccatcaacattccagggggcagtgtagatataaagaagcaaaagcttcagctgtctctttaa

SEQ ID NO: 127000 - DNA, 258 bp, Homo sapiens
atgaagcagaaacgaaaggctgccagttccgagcccacgtctgaagtcgccttaggtggttccgcgggccccgtgcgctcccaccttcacccagagggccttctctggtgcagccgctgcttcttcagcctccgcccaaaaggaacggagccccctggccgatccgcaggcctacagggagccacagagcgcagcggctggaccagcgttcaagcccaagcacaggcctgcgagaaccttgttccagccgccgtttag

SEQ ID NO: 127001 - DNA, 3485 bp, Homo sapiens
cggaattcccgggtcgacgggaggcaggaggggcacctgcacaggggacaaccacaggaaatgcatggggccctccctcagcacgggtggttgagcctgtgggggagaaagtcattttggtactgcctctgctcctctttcatctctgtcccatggtgcccctgtctttctctgctctctccctgttggttcttgccctgtcttcccaccgcaccccttttctgtgtgtttccctggctggcggcaccgggtgccaggtgtggtgaccgtgaggtcaggtgtcatcattggaccgggaggcattctcgccacccatcctggagctgctgctgctggctaaggacatcgggctgctcaacagcacggcccacctgctcatcaccatcctggatgacaatgacaaccggcccacctttagccctgccaccctcactgtccatctgctagagaactgcccgcctggattctcagtccttcaagtcacagccacagatgaggacagtggcctcaatggggagctggtctaccgaatagaagctggggctcaggaccgcttcctcattcatctggtcaccggggtcatccgtgttggtaatgccaccatcgacagagaggagcaggagtcctacaggctaacggtggtggccaccgaccggggcaccgttcctctctcgggcacagccattgtcaccattctgatcgatgacatcaatgactcccgccccgagttcctcaaccccatccagacagtgagcgtgctggagtcggctgagccaggcactgtcattgccaatatcacggccattgaccacgacctcaacccaaagctagagtaccacattgtcggcattgtggccaaggacgacactgatcgcctggtgcccaaccaggaggacgcctttgctgtgaatatcaacacaggatctgtaatggtgaagtcccccatgaatcgggagctggttgccacctatgaggtcactctctcagtgattgacaatgccagcgacctaccagagcgctctgtcagtgtgccaaatgccaagctgactgtcaacgtcctggacgtcaatgacaatacgccccagttcaagccctttgggatcacctactacatggagcggatcctggagggggccacccctgggaccacactcattgctgtggcagccgtggaccctgacaagggccttaatgggctggtcacctacaccctgctggacctggtgcccccagggtatgtccagctggaggactcctcggcagggaaggtcattgccaaccggacagtggactacgaggaggtgcactggctcaactttaccgtgagggcctcagacaacgggtccccgccccgggcagctgagatccctgtctacctggaaatcgtggacatcaatgacaacaaccccatctttgaccagccctcctaccaggaggctgtctttgaggatgtgcctgtgggcacaatcatcctgacagtcactgccactgatgctgactcaggcaactttgcactcattgagtacagccttggagatggagagagcaagtttgccatcaaccccaccacgggtgacatctatgtgctgtcttctctggaccgggagaagaaggaccactatatcctgactgccttggccaaagacaaccctggggatgtagccagcaaccgtcgcgaaaattcagtgcaggtggtgatccaagtgctggatgtcaatgactgccggccacagttctccaagccccagttcagcacaagcgtgtatgagaatgagccggcgggcacctcggtcatcaccatgatggccactgaccaggatgaaggtcccaatggagagttgacctactcacttgagggccctggcgtggaggccttccatgtggacatggactcgggcttggtgaccacacagcggccactgcagtcctacgagaagttcagtctgaccgtggtggccacagatggtggagagcccccactctggggcaccaccatgctcctggtggaggtcatcgacgtcaatgacaaccgccctgtctttgtgcgcccacccaacggcaccatcctccacatcagagaggagatcccgctgcgctccaacgtgtacgaggtctacgccacggacaaggatgagggcctcaacggggcggtgcgctacagcttcctgaagactgcgggcaaccgggactgggagttcttcatcatcgacccaatcagcggcctcatccagactgctcagcgcctggaccgcgagtcgcaggcggtgtacagcctcatcttggtggccagcgacctgggccagccagtgccatacgagactatgcagccgctgcaggtggccctggaggacatcgatgacaacgaaccccttttcgtgaggcctccaaaaggcagcccccagtaccagctgctgacagtgcctgagcactcaccacgcggcaccctcgtgggcaacgtgacaggcgcagtggatgcagatgagggccccaacgcgatcgtgtactacttcatcgcagccggcaacgaagagaagaacttccatctgcagcccgatgggtgtctgctggtgctgcgggacctggaccgggagcgagaagccatcttctccttcatcgtcaaggcctccagcaatcgcagctggacacctccccgtggaccctccccaaccctcgacctggttgctgacctcacactgcaggaggtgcgcgttgtgctagaggacatcaacgaccagccaccacgcttcaccaaggctgagtacactgcaggggtggccaccgacgccaaggtgggctcagagttgatccaggtgctggccctggatgcagacattggcaacaacagccttgtcttctacagcattctggccatccactacttccgggcccttgccaacgactctgaagatgtgggccaggtcttcaccatggtgcaccagaggcacccttatcgaccggctctgctacctctacgctcctgcacctcctcgcgagcggttatggtctcagcccgggtgaagaatgtggccatgatgctgtccagtttaacagtgccttgcccccatccacattccctaggagccatgagcacagagggccccagcctcgccagctccccagccatcagccccctcgcctttctctcagctcccgtcactcccgggacccttgcagaggcaactgaccccctccccatgctcatcgccctggcctgcatcttcctcctgctggccacctgtctgctgttcatgacgctctgcaagccggccgcgctggacccgagccgccgcagggctcacgagtgcatgccccaccaccctgggagccccagtgagccccagctccggctctggaagcgcctgggctccttgcgcctctccctgcacagcttccgccatggccggcccaccgtccctcgacagcccctgccgggccccgaggacaaccgcagccactgtgactacatggaatctaccaagatgtaa

SEQ ID NO: 127002 - DNA, 1053 bp, Homo sapiens
ttaaattttgcacagctttcttagctctttctgttggtaaagcaattggaagtcaggataatcatcatcaccatcatcatcaccattactaccatcatgagcatcaggatcaacattatcaccatcatcacaatcaccatcatcatcaccatcatgatcatcaggatcaacatcatcaccatcaccattatcatcatcaggatcatcattatcattatcaccatcaccaccaccaccaccaccaccaccaccaccaccaccaccaccaccatcatcatcatcattgctatcattgtggcaaatatgggagtagaggccatggagacaatggctcagtgactgggctgctgctgggagctgtacctcctgttctgtgattaatgctgagtttctggggtaagttctgggtatcaggcctcctgaaatccgcactgtacccctctgggcaacaggtttggtagaggaagaatcaggcctcgtgcttttgagtcttaagagtccccttattggcgctagacataccagcagggcttttatgccagggtaagtgttctcatacttaagaacagcatctgctccatcagaattggagcttcctttgaatgcattccttcctttgagtgaccacaaacaaaaagaaagcagagagtaccactggctgtggcagccagggctggagcaacaaaggccatgaactgtgactgctgcctgtgtcacttctcttgtgggtctgcagcttctgtgtgtctgcatgtgcgtgttggcattcctggtccttggtgtttgcatgtgggctctgctcttcttattaacttggggattattcacctgctgggtgaacagaagggccatattagaagcttttatgaacacgaatcgcataactagggaccttgggaaagacacgtgtgttttgttggagtttggccgcgggggtggggtggtatttggttggtcatgcacataggtgctggtgtatttcttgtctgcatgccttttgatcatggagaaatactctgcaaatgtctgagaattagtactttctagcatcat

SEQ ID NO: 127003 - DNA, 405 bp, Homo sapiens
ttactgcttagttgcctgcaaaccacctgtatgagaataacccaaatgcttccgtaagacttgaaagcgtgtctttgaaattgaggacgggaatgtcagggaacagcttctgctatatcgagtgtgttctttgaccagctgaccctggacaccctcaaaggctgtggcaccatcctgctctctgggcctcacaagggccaagaagtgtactggcatttcagcaaggccctgggaacccagcatagccacactaagccctgtgtccactccagggaccagaaattcaagcacatcagaggcttgttcattttgatcagctatgtgaggttcaggtaagattttacgatcagtaaaaaaggtttcttgtggaagtaactggaaataagatttaccttgtagggtcat

SEQ ID NO: 127004 - DNA, 939 bp, Homo sapiens
atgaaggtcttattagagtcagttaaagaaagagcggaagaagagaaattggcagcagcacatcttaggagttttgctgcaaaaaaagcaaagaaatatgatagtgtcaaaaaggaaaaaactcttcaggatgtggacttaactcagcatcagcacaaacagacccgagctctgtctggaggcctgaagaggaagctctcccttggcattgctttcatgggcatgtcgaggaccgtggttctggatgagcccaccagtggggtggacccttgctcccggcatagcctgtgggacattctgctcaagtaccgagaaggtcgtacgatcatcttcacaacccaccacctggatgaagctgaagcgctgagtgaccgcgtggccgtcctccagcatgggaggctcaggtgctgcggtcctcccttctgcctgaaggaggcatatggccaggggctccgcctgacactcacgaggcagccttctgttctggaggcccatgatctgaaagacatggcttgtgttacatccctgataaagatctatattccacaagcatttctcaaagacagcagtggaagtgagctgacctacaccattccaaaggacacagacaaggcctgcttgaaagggctcttccaggccctggatgagaacctgcatcagctgcacctgacgggctatgggatctcagacaccaccttagaagaggcagaagggaggaccgcagcacctgagcctcccatgctggaggacggccacgcggtcactcagcgcttcagcttcatccaggtggtgggttgtgaagatgatcgtacgacctgggtccaagcacagggtgcatcagcaccaggaggacaaaggccccaggaggaccttccctcctttcctcaggatggtagatccagggcacaatttaaagatcctcaccaattttcaaactga

SEQ ID NO: 127005 - DNA, 723 bp, Homo sapiens
cccctgcctcttgatcaaaggctcctggccagcattacaccctcaccttcaggccaatccatcatccgaacccaacctggagcaggggtccacccaaaggctgatggtgctctgaagggagaagctgagcaatctgcagggcaccctagtgagcacctcttcatctgtgaggaatgtgggcgctgcaagtgcgtcccctgcacagcagctcgccctctcccctcctgctggctgtgcaaccagcgctgcctttgctctgctgagagcctcctcgattatggcacttgtctctgctgtgtcaagggcctcttctaccactgctccactgatgatgaagacaactgtgctgatgagccctgctcttgtgggcctagttcttgctttgtccgctgggcagccatgagcctcatctccctcttcctaccctgcctgtgctgctacctgcctacccgtggatgcctccatctgtgccaacagggctatgatagcctccggcgaccaggctgccgctgcaagaggcacaccaacactgtgtgcagaaagatctcttctggtagtgcacccttccccaaggcccaggaaaagtctgtatgaccttccaacaaggtggatccagagcttttctccttctagtccccaacagcaaagcataggcctcatctttggagagggggaggagtgataaactagccaaagttagggcctctcttttgttcctgcagg

SEQ ID NO: 127006 - DNA, 380 bp, Homo sapiens
tctcaggaggcagcgctctaggacatttctttcatggcctgggctctgctgctcctcaccctcctcactcagggcacagggtcctgggcccagtctgccctgactcagcctgcctccgtgtctgggtctcctggacagtcgatcaccatctcctgcactggaaccagcagtgacgttggtggttataactatgtctcctggtaccaacagcacccaggcaaagcccccaaactcatgatttatgaggagtcaccaccagtgcacattggccctgtatttgtatccagaaccaatcaaagccacccctgagtcctgcatctctcagtaccaagctccagtcccccttcaagaccacccaccacacagacgtgcagggagcg

SEQ ID NO: 127007 - DNA, 414 bp, Homo sapiens
tccagcggcactgtggggacgtctccaccatggcctgtgctctgctcctcctcagcctcctcactcagggcacaggatcctggactcagtctgccctgactcagcctcgctcagtgtccgggtcgcctggacagtcagtcaccatctcctgcactggaactagcagtgatgtaggtgcttataactatgtctcctggtaccaacaacacccaggcacagcccccaaagtcatgatttatgatgtcaataagcggccctcaggggtccctgatcgcttctctggctccaagtccggcaacacggcctccctgaccatctctgggctccaggctgaggatgaggctgaatattactgctgttcatatgcaagcgactccgccttcgtattcgccgagggaccaaccggcccgacac

SEQ ID NO: 127008 - DNA, 448 bp, Homo sapiens
gcatccgcgagttccgaggatcgacgatttcgtgggacgtctccaccatggcctgggctctgctgctcctcactctcctcactcaggacacagggtcctgggcccagtctgccctgactcagcctgcctccgtgtctgggtctcctggacagtcgatcaccatctcctgcactggaaccagcagtgatgttggaaattataaccttgtctcctggtaccaacagcacccaggcaaagcccccaaactcataatttatgagggcagtaagcgcccctcaggagtttctagtcgcttctctggctccaagtctggcaacacggcctccctgacaatgtctgggctccaggctgaggacgaggctgattattactgctgctcatatgcaggtagtagcacttatgtcttcggacctgggaccaaggtcaccgtcctaggtcagcccaaggc

SEQ ID NO: 127009 - DNA, 453 bp, Homo sapiens
gcggtgaattcggacgtctgcaccatggcctgggctctgctattcctcaccctcctcactcagggcacagggtcctgggcccagtctgccctgactcagcctgcctccgtgtctgggtctcctggacagtcgatcaccatctcctgcactggaaccagcaatgacgttggtggttataactatgtctcctggtaccagcagcacccaggcaaagcccccgaactcataatttttgatgtcagtaatcgccccttaggcgtttctactcgcttctctggctccaagtctggtatcatggcctctctgaccatctctgggctccaggctgaggacgaggctgattattactgctgctcctttacaagtaggaatagtcgagtcttcggatctgggaccaaggtcaccgtcctgggtcacccaaaggccaaccccactgtcactctgttccccgcc

SEQ ID NO: 127010 - DNA, 777 bp, Homo sapiens
  misc_feature (1)...(777): n = a,t,c or g
cgacgcagcgctctcgggacgtctccaccatggcctgggctctgctgttcctcaccctcctcactcagggcacagcgtcctgggcccagtctgccctgactcagcctgcctccgtgtctgggtctcctggacagtcgatcaccatctcctgcactggcgttggtggttatcactatgtctcctggcaccaacagcaccccggcaaagcccccaaactcttgatttttgatgtcagtgatcggccgtcaggggtttccaatcgcttctctggctcccagtctggcaacacggcctccctgaccatctctgggctccaggctgaggacgaggctgattattactgcagttcattcacaggcggctctaatctctgggtgttcggcgccgggaccaagctgagcgtcctaggtcagcccaaggctgcccccttcgtcactctgttcccgccctcctctgaggagcttcaagccaacaaggccacactggggngtctcataagtgacttctacccgggagccgtgacagtggcctggaaggcagatagcagccccgtcaaggcgggnagtggagaccaccacacccttcaaacaaagcaacaacaagtacgcggccagcagctacctgagcctgacgcctgaccgtggaagtcccacaaagctacagctgccaggtcacgcatgaagggagcaccggggagaagacaggggcccctacagatgttcataaggttttaacccgttgaagcggcccgggatttcagacttatgatcggaggac

SEQ ID NO: 127011 - DNA, 889 bp, Homo sapiens
gtgctggggtctcaggaggcagcgctctcaggacgtcaccaccatggcctgggctctgctcatcctcaccctcctcactcagggcacagggtcctgggcccagtctgccctgactcagcctccctccgcgtccgggtctcttggacagtcagtcaccttctcctgcagtggaaccagcagtgacattggtaattataattatgtctcctggtaccgacaacacccaggcaaagcccccaaactcatgatctatgaggtcactaagcggccctcaggggtccctaaccgcttctctggctccaagtctggcaacacggcctccctgaccgtctctgggctccaggctgaggatgaggctgattattactgcagctcatacgcaggcagtaatagtttgattttcggcggagggaccaggctgaccgtcctaggtcagcccaaggctgccccctcggtcactctgttcccgccctcctctgaggagcttcaagccaacaaggccacactggtgtgtctcataagtgacttctacccgggagccgtgacagtggcctggaaggcagatagcagccccgtcaaggcgggagtggagaccaccacaccctccaaacaaagcaacaacaagtacgcggccagcagctatctgagcctgacgcctgagcagtggaagtcccacagaagctacagctgccaggtcacgcatgaagggagcaccgtggagaagacagtggcccctacagaatgttcataggttctcaaccctcacccccaccacgggagactagagctgcaggatcccaggggaggggtctctcctcccaccccaaggcatcaagcccttctccctgcactcaataaaccctcaataaatattctcattgtcaatcac

SEQ ID NO: 127012 - DNA, 637 bp, Homo sapiens
aaaaaatatgaaacgcccccaggtatgggtctggaattcccgggtagacgtctttgtcctgttccagctctaggaggttccagtcatccttgcccaaagcattccaaagtgggaagcagatcaaggccgcatctcaaaaaataatagtaaataaataattgtatacacacgagaaaaagagagagagaggaggcagcgctctcaggacgtccccaccatggcctgggctctgctcctcctcaccctcctcactcagggcacagggtcctgggcccagtctgccctgactcagcctccctccgcgtccgggtctcctggacagtcagtcaccatctcctgcactggaaccagcagtgacattggttattacgactttgtctcctggtatcaacaacgcccaggcaaagcccccaaactcatcatttttgaagtcaataagcggccctcaggtgtcccagatcgcttctctggctccaagtctgccaacacggcctccctgaccgtctctgggctccaggctgaagatgaggctgattattattgcggctcatatgctgccaatgataatggcctcttcggccgagggaccaagttgaccgtcctaggtcagcccaaggctgccccctcggtcactctg

SEQ ID NO: 127013 - DNA, 513 bp, Homo sapiens
atggcctgggctctgctcctcctcaccctcctcactcagggcacagggtcctgggctcagtctgccctgactcagcctccctccgtgtccgggtctcctggacagtcagtcaccatctcctgcactggaaccagcagtgacgttggtagttataaccgtgtctcctggtaccagcagcccccaggcacagcccccaaactcatgatttatgagaattttagcaactacattctaatggttatcgccacaactttgatcttaaataacagtgcagcgaacatccctacgcagactcctttgagttcctgtgtgaatatgaccacaggattcatttctaaaagtgaaattgcagatgttgctgatgctgacttgttcatctcttccaacctctgcaaacaaagtgggaaattggatttttctgaacacccagatgacaacgggagaggaggctttgtggcttcccgtaagctgactccagagccagcagtgtctgtggacagtcagcaagggtaa

SEQ ID NO: 127014 - DNA, 616 bp, Homo sapiens
ccggcctcacgcgtccgcccacgcgtccgggaggcagcgctctcaggacgtcaccaccatggtctgggctctgctcctcctcaccctcctcactcagggcacagggtcctgggcccagtctgccctgactcagcctccctccgcgtccgggtctcctggacagtcaatcaccatctcctgcactggactcatcaatgacgttgctagttataactttgtctcctggtaccaacagcacccaggcaaagcccccaaactcatgatttatgaggtcactaagcggccctcagggggtccctgatcgtttctctggctccaagtctgggcaacacggcctccctggaccatctctggggctccaggcttgaggatgaggctgattattactgcttgctcatatgcaggcgactacaccccgggggtggtattcggcggtgggacccaagggtcaccgtcctagggtcagcccaaaggccaaccccaactgtcacttctggttcccgcccctcctctgaaggagctccaagccaacaaggccacactagtgtgtctgatcagtgacttctacccgggagctgtgacagtggcctggaaggcagatggcagccccgtcaag

SEQ ID NO: 127015 - DNA, 2499 bp, Homo sapiens
atgagcgtgcagaggaaagaccgtgtgaggactcagcaaggaggctctgtggcctcctccatgctgactcaggagccagtagggtctgtggccctgggacagtcagccagggaccgggatcctgactgctctgactcagtctccgtctacctcatggacacctggcagtcggtcatcatcggttttgctgaatcagcagcaacattgggggaccccccagagctgcccatgcatccagaaggctctgaggcctcctatgagctgacacagccaccctcggtgtcagtgtccccaggacagacggccaggatcacctgctctggagatgcattgccaaagcaatatgcttattggtaccagcagaagccaggccaggcccctgtgctggtgatatataaagacagtgagaggccctcagggatccctgagcgattctctggctccagctcagggacaacagtcacgttgaccatcagtggagtccaggcagaagacgaggctgactattactgtcaatcagcagacagcagtggtacttatcccacagtgacacaagcagacagggaaacacctacccaccagtacagcagacaccccagctatgccaagggctttgtcttcctctgggggtcctgggcccagtctgccctgactcagcctgcctccgtgtctgggtctcctggacagtcgatcaccatctcctgcactggaaccagcagtgatgttgggagttataaccttgtctcctggtaccaacagcacccagggcaaagcccccaaactcatgatttatgaggggacagtaagcggccctcaggggtctctaatcgcttctctggctccaagtctgggcaacacggcctccctgacaatctctggggttccagggttgagggacgagggttgattattactgctgctcatatgcaggctctgttgcctcctatgagctgacacagctaccctcggtgtcagtgtccccaggacagacagccaggatcacctgctctggagatgtactgggggaaaattatgctgactggtaccagcagaagccaggccaggcccctgagttggtgatatacgaagatagtgagcggtaccctggaatccctgaacgattctctgggtccacctcagggaacacgaccaccctgaccatcagcagggtcctgaccgaagacgaggctgactattactgtttgtctggggatgaggacaatccctcagtgacacaggcagatggggaagacactggcataaggagtcactacgaaggtacgctggccctgtatttgtatccagaaccagtcaaagccacctgctctgtgacctcctatgtgctgactcagccaccctcggtgtcagtggccccaggacagacggccaggattacctgtgggggaaacaacattggaagtaaaagtgtgcactggtaccagcagaagccaggccaggcccctgtgctggtcgtctatgatgatagcgaccggccctcagggatccctgagcgattctctggctccaactctgggaacacggccaccctgaccatcagcagggtcgaagccggggatgaggccgactattactgtcagagcctttctactcttggccccaaaacactgggtgacacagttctcagacccatgatttatagtgtcagtattcaggcctcaggggtccctgatggcttctctggctccaagtctggaaacacagcctccatgaccatctctgggttccaggctgaggatgaggctgattattactgcaactcacataggagaggttctgtggtttcttctgagctgactcaggaccctgctgtgtctgtggccttgggacagacagtcaggatcacatgccaaggagacagcctcagaagctattatgcaagctggtaccagcagcacccaggcaaagcccccaaactcataatttatgatggccactaatcggccctcaggggtctctaatcgcttctctgcctccaaggtctggcaacacggcctccctgaccatctctgggctccagtctgaggacgaggctgattattactgcagctcatatgcaggcagcaacactcctcgggtggtattcggcggagggaccaagctgaccgtcctaggtcagcccaaggctgccccctcggtcactctgttcccgccctcctctgaggagcttcaagccaacaaggccacactggtgtgtctcataagtgacttctacccgggagctgtgacagtggcctggaaggcagatggcagccccgtcaaggcgggagtggagaccaccaaaccctccaaacagagcaacaacaagtacgcggccagcagctacctgagcctgacgcccgagcagtggaagtcccacagaagctacagctgccaggtcacgcatgaagggagcaccgtggagaagacagtggcccctacagaatgttcataggttcccaactctaaccccacccacgggagcctggagctgcaggatcc

SEQ ID NO: 127016 - DNA, 369 bp, Homo sapiens; identical to SEQ ID NO: 122077

SEQ ID NO: 127017 - DNA, 394 bp, Homo sapiens; identical to SEQ ID NO: 120248

SEQ ID NO: 127018 - DNA, 1180 bp, Homo sapiens; identical to SEQ ID NO: 120252

SEQ ID NO: 127019 - DNA, 735 bp, Homo sapiens
gtcatgctgatacaagagatgggctcccatggccttgggcagctccacccctgtggattttcagggtacaggtctgctactggctgctttcacaagcaggtgttgagtggctgtggcttttccaggcacatggtgcaagctggcatctcagaaagaaaggcagtagacccagtcaggggcttatacataaaactcccatctccctgggacagagcacctgggggagggggcagctgtgggcacagcctcagcagacttaagtcttccttcctactggctctgaagagagcagcggatctcccagcacagtgctcaagctctgcaaagggaccaactgcctccgatcacaattcctcgccagcaagggaacgaaactggacagagattgagtttgataaattgacagaagtaggcttcagaaggtgggtaataacaaactcctctgaactaaaggagcatgttctagcccaatgcaatgaagctaagaaccttgaaaaaaggttagacaaattgctaactagaataaccagtttagagaagaacataaatgaactgatggaactgaaaaacacagcacgagaactttgtgaagcatacacaagtatcaatagccaaattgatcaagcggaagaaaggatgtcagagattgaagatcaacttaatgaaataaagcatgaagacaagattagagaaagaagaatgaaaagtaatgaacaaagcctccaagaaatatga

SEQ ID NO: 127020 - DNA, 716 bp, Homo sapiens
gacataaagagttggtgcatgctgtgccctatatttggctgcatgctgaaaagcacaagacttcatccagcacaaccattccacttacacatccagggatgctctgtttcactgctgatgagagaactgggcagatgcctgccttggcccaggcactccccgacttcagccttcacccattcctcacaggcattactcttactccagcaggtcaacaacatcaaagaccaaaggtagataaatccacgaagataaggaacagccagcacaaaaaggttgaaaattccaaaaaccagaatgcctcttctcctccaaaggatcacaactccttgccagcaagggaacaaaaccggactgagaatgagtttgatgaattgacagaagtaggcttcagaaggtgggtaataacaaactcctctgagctaaaggagcacattctaacccaatgcaaggaagctaagaaccttgaaaaaagattacaggaattgctaactagaataaccagttcagggaagaacataaattacctgatggagctgaaaatcacagcacaagaacttaatgaagcacacgtaagtatcaatagcgaaatcgatcaagtggaagaaagaatatcagagattgaagatcaacttaatgaaagaaagcatgaagacaagattagagaaaaaacaatgaaaaggaacaaagcctccaagaaatatggcactatgtga

SEQ ID NO: 127021 - DNA, 1014 bp, Homo sapiens; identical to SEQ ID NO: 125810

SEQ ID NO: 127022 - DNA, 1266 bp, Homo sapiens
atgggaggaccattcaaaccaaaggcaaagaagtttgaaaactttgaaaaaaatttagaagaatgtataactagaataaccaatacagagaagtgcttaaaggagctgatggagctgaaaaccaaggctcgagaagtacgtgaagaatgcagaagcctcaggagccaatgcgatcaactggaagaaagggtatcagcaatggaagatgaaatgaatgaaatgaagcaagaagggaagtttagagaaaaaagaataaaaagaaatgagcaaagcctccaagaaatatgggactatgtgaaaagaccaaatctacgtctgattggtgtacctgaaagtgatgtggagaatggaaccaagttggaaaacactctgcaggatattatccaggagaacttccccaatctagcaaggcaggccaacgttcagattcaggaaagacagagaacgccacaaagatactcctcgagaagagcaactccaagacacataattgtcagattcaccaaagttgaaatgaaggaaaaaatgggactcctggttccaaactggaccaaccactcacccctatttcgggctattctttttgattataagggattttgccgatttgggaccacccatcaaacaggattttcgcctgctggggcaaaccagcgtggaccgcttgctgcaactctctcagggccaggcggtgaagggcaatcagctgttgcccgtctcactggtctgattggtgtacctgaaagtgatgtggagaaggaaaccaagttggaaaccactctgcaggatattatccaggagaacttccccattctagcaaggcaggccaacgttcagattcaggaaatacagagaacgccacaaagatactcctcgagaagagcaactccaagacacataattgtcagattcaccaaagttgaaatgaaggaaaaaatgttaagggcagccagagagaaaggtcgggttaccctcaaagggaagcccatcagactaacagcggatctctcggcagaaaccctacaagccagaagagagtgggggccaatattcaacattcttaaagaaaagaattttcaacccagaatttcatatccagccaaactaagcttcataagtgaaggagaaataaaatcctttacagacaagcaaatgctgagagattttgtcaccaccaggcctgccctaaaagagctcctgaaggaagcactaaacatggaaaggaacaaccggtaccagccgctgcaaaatcatgccaaaatgtaa

SEQ ID NO: 127023 - DNA, 1395 bp, Homo sapiens; identical to SEQ ID NO: 125814

SEQ ID NO: 127024 - DNA, 1227 bp, Homo sapiens
atggccaaacaggaacaactccagtttgtagctcccagcaagatcaatgcagaaggcagagcacctcggggaaggggtggctgtgggcgcagcttcagcagacttaaatgttcctgcctgccagctctgaaaagagcagtggatttcccggcacagctttcaacctctgctaagggacagactgcctcctcagaaagtaacagcatcaacatcaaccaaaaggacgtccacacagaaactccatctgaacctcaccaacatcaaagacctaaggtagataaatccacaaagatgaggaaaaaccagcgcaaaaaggctgaaaattccaaaaaccagaatgcctcttctccaaaggatcacaactcctcaccagcaagggagcaaaactggatggagaatgagtttgatgaattgacagaagtaggcttcagaaggtgggtaataacaaactcctctgagctaaaggagcatgttctaacccaatgcaaggaaggtaaaaaccttgaaaaaaggttagaggaattgctaactagaataaccagtttagagaagaacataaatgacctgatggaactgaaaaacacagcacaagaacttcatgaagcatacacaagtatcaatacccaaatcgatcaagcagaagaaaagatatcagagattgaagatcaactcaatgaaataaaaccaaatctacgtctgattggtgtacctgaaagtgatggggagaatggaaccaagttggaaaacactctgcaggatattatccaggagaacttctccaacctagcaaagcaggccaacattcaaattcaggaaatacagagaacaccacaaagatactcctcgagaagaacaaccccaagacacataattatcagattcaccaaggttggaatgaaggaaaaaatgttaagggcagccagagagaaaagtcgggttacccacaaaggaaagcccatcagactaacagtggatctctcggcagaaaccagaaaagagtgggggccaatattcagcatttgtaaagaaaagaattttcaacccagaatttcatatccagccaaactaagcttcataagcgaaggagaaataaaatcctttacaaacaagcaaatgctgagagattttgtcaccaccaggcctgccctacaagagctcctgaaggaagcactaaatatggaaaagaacaaccggtaccagccactgcaaaaacataccaaattgtaa

SEQ ID NO: 127025 - DNA, 1027 bp, Homo sapiens
atggggaaaaaacagaacagaaaaactggaaactctaaaaagcagagcgcctctcctcctccaaaggaacgcagttcctcaccagcaacggaacaaagctggatggagaatgactttgacgagcagagagaagaaggcttcagacgatcaaattactctgagctacgggaggacattcaaaccaaaggcaaagaagttgaaaactttgaaaaaaatttagaagaatgtataactagaataaccaatacagagaagtgcttaaaggagctgatggagctgaaaaccaaggctcgagaactacaaagggtatcagcgatggaagatgaaatgaatgaaattaagcgagaagggaagtttagagaaaaaagaataaaaagaaatgagcaaagcctccaagaaatgtgggactatgtgaaaagaccaaatctacgtctgattggtgtacctgaaagtgatggggagaatggaaccaagttggaaaacactctgcaggatattatccaggagaacttccccaatctagcaaggcaggccaacgttcagattcaggaaatacagagaacgccacaaagatactcctcgaggagagcaactccaagacacataattgtcagattcaccaaagttgaaatgaaggaaaaaatgttaagggcagccagagagaaaggtcggtttacccacaaagggaagcccatcagactaacagcggatctctcggcagaaaccctacaagctagaagagagtgggggccaatattcaacattcttaaagacaagaattttcaacccagaatttcatatccagccaaactaagcttcataagcgaaggagaaataaaatactttacagacaagcaaatgctgagagattttgtcaccaccaggcctgccctaaaagagctcctgaaggaagcgctaaacatggaaaggaacaaccggtaccagccgctgcaaaatcatgccaaaatgtaaagaccatcgagactaggaagaaactgcatcaactaacaagcaaaatcaccagcta

SEQ ID NO: 127026 - DNA, 954 bp, Homo sapiens
atggatggagatctccacaagggagtggctgtgttctggccaccagatgctgctggaggccacacctgctgcaggagcatggtctgcaggagcctgctaggaggagcacagtggaaatttcatagttttaggtgtaggatccgttttgaattaattttacatatgatacaagaaaggaatagcatcaacatcagccaaaaggacgtccacacagaaactccatctgaaactcaccatcatcaaagaccaaaggtagataaatccatgaagatgaggagaaaccagtgcaaaaaggctgaaaattccaaaaaccagaaagcctcttctcctccaaaggaacacaactcctggagagcaagggaacaaaactggacagagaatgagtttgacaaattgacggaagtaggcttcagaaggtgggtaataacaaactcctctgagctaaaggagcatattctaacccaatgcaaggaagctaagaaccttgaaaaaacattagaggaattgctaactagaataaccagtttagagaagaacataaatgacctgatgaagctgaaaaacacagcatgagaacttcgtgaagcatacacaagtatcaatagccaaatcagtcaagcggaagaaaggatatcagagattgaagatcaacttaatgaaatgaagcatgaacacaggattagagaaaaaagaatgaaaaggaacaaacaaagcttccaagaaatatgggactatgtgaaaagaccaaacctacgattgatcagtgtacctgaaagtgacggggagaatggaaacaagtaggaaaacatacttcaggatattatccatggagaacttccccaatctagcaaggcaggccaatattcaaattcaggaaatacagagaacgccacagagatactcctcgagaagagcaactccaagacacataattgtcagattcaccaaagttga

SEQ ID NO: 127027 - DNA, 2227 bp, Homo sapiens
atgggggccagggcagggggcagctgcagctgtttaatgtggctcctcttggcttctggacactttatgggctgtgtggctgctggtgacactgttggaccagagaagttcagatcctgctataccattacccttttacagtcgaagctctcatattcatttgggaagaacaataaaaatttccagttaaggaaatgcttacagacagttgataacctctttgtgcccaaccagaacggatactactgtcactctcagacaagcttggatagagcccagattgacctcaacggtcggatccgtaatggcagtgtctacagtgcacacagcaccaactccttaaataatcctcagccctacttgcagccctcgccgatgtcgtccaaccctagcatcaccgggagtgacgtcatgaggcctgactacctcccgtcccatcggcacagcgccgtgatacccccgtcctaccgccccaccccagactatgagactgtgatgaagcagctcaacaggggcctggtgcatgcggaacggcagagccactcgctgcgaaacctcaacatcggcagctcgtacgcctacagcaggcccgcggcgctggtctacagccagcccgagatccgcgagcacgcacagctcccctcgccagcggccgcacactgcccgttcagcctgagctacagcttccacagcccgtctccctacccctaccctgccgagcggcggcccgtggtgggcgcggtcagcgtgccggagctgaccaatgcgcagctgcaggcgcaggactacccgtctcccaacatcatgcggacgcaggtgtaccggccacccccaccctacccgccccccaggcccgccaacagcacgccagacctgtcccgccacctttacatcagcagcagcaaccccgacctcatcacgcggcgcgtgcaccactcggtgcaaacgttccaggaggacagcctgcccgtggcgcactcgctgcaggaggaacgcagttcctcaccagcaacggaacaaagctggacggagaatgactttgacgagctgagagaagaaggcttcagacgatcaaattactccgagctacgggaggacattcaaaccaaaggcaaagaagttgaaaactttgaaaaaaaatttagaagaatgtataactagaataaccaatacagagaagtgcttaaaggagctgatggagctgaaaaccaaggctcgagaactacgtgaagaatgcagacgcctcaggatgccgatgcgatcaactggaagatagggtatcagcaatggaagatgaaatgaatgaaatgaagcgagaagggaagtttagagaaaaaaagaataaaaagaaatgagcaaagcttccaaagaaataggggactatgtgaaaagaccaaatctacgtctgattggtgtacctgaaagtgatgtggagaatggaaccaagttggaaaacactctgcaggatattatccaggagaacttccccaatctagcaaggcaggccaaccgttcagattcaggaaatacagagaacgccacaaagatactcctcgagaagagcaactccaagacacataattgtcagattcaccaaagttgaaatgaaggaaaaaaatgttaaaggcagtcagagagaaaggtcaggttacccacaaagggaagcccatcagactaacagcggatctttcggcagaaactctataagccagaagacagagtgggggccaatattcaacattcttaaagaaaagaatttttcaacccagaatttcatatccagccaaacctaagcttcataagtgaaggagaaataaaatactttacagacaagcaaatgctgagagatttttgtcaccaccaggcctgcccttaaaagagctcctgaaggaagcactaaacatggaaaggaacaaccagtaaccagccactgcaaaaacatgccaaatttgtaaagaccattgaggctagggaagaaacttgcatcaactaacgggcaaaataaccagctaacatcataatgacaggattcaaattcacacataacaatattaaccttaaatgtaaataggctaaatgctcgaattaaaagacacagactgggcaaattggataaagaatcaagacccatcagtatgctgtattcaggagacccatctcacgtgcagagacacacataggctcaaaataaagggatggaggaagatctaccaagcaaatggaaagc

SEQ ID NO: 127028 - DNA, 318 bp, Homo sapiens
gggagccgaggggagctgctcttgtctctctgctacaacccctctgccaactccatcatcgtgaacatcatcaaagcccggaacctcaaagccatggacatcgggggcacatcagacccctacgtgaaggtatggctgatgtacaaggacaagcgggtggagaagaagaagacggtgacgatgaagaggaacctgaaccccaatttcaatgagtcccttcgccttcgatatcccccacggagaaagctgagggagacgaccatcatcatcactgtcatggacaaggacaagctcagccgcaatgacgtcatcggcaag

SEQ ID NO: 127029 - DNA, 396 bp, Homo sapiens
ctcctcttcaccttagagttggggaccccactgcactcacaaactgaagaaaagcttctcattaatgcccgaaatgacggatgcgatggacagagagaggatggcggctccaaaaaagacgtggataggttttaggaggctgcgcagccacatggacgcccagggcaggaggaagacagcaaagcccaggaaccactgtggacaaaagggaggacacacccgactgtgctatgtgtgaccaaagcacatcccaccccatcagtgcctcctccccatctctgctccctggctcttctttcacaactcaaaccttcccacctggcattgcccactaccgtgctagcttcctcattgtggcctattacccaagcaacaagaacagtaaatgacatgctt

SEQ ID NO: 127030 - DNA, 976 bp, Homo sapiens
gttatagggggcagaggccttcatgtaagtatctggtggaggccccactgtagcgtttggtggggggaagaaggctggattgaggtgaagggcaggtgggatggccccagggggaggtacagcaagatgaggaggtaatcgaggaggtgggggcatgagatgctggtagtggataccaggaggaggaggagggaccccaaagcttgaggagagaggtggtgggggtggaattggtggtgggggcagacccatcaggggaagggccgaaggaggacgattgaagtagggcagcacactggggggcttatccacacgagcagatgagggtacaaggttctcagagggtgtggcccgtccatcagcagaatcactagaatctcgggaatgggcccgtggaggtattccccctcttgggactcggacacactcacgtttccgagcctgtgcctcaaactgtgacaggttctgccgggtggccggcctcacgtccactttttctccattaagaactttccctggtaggagttccaacaattttggggacagagcttccagaggctaccaccacctcagcatacccctttggactggccatttgctcgattctctgcaaatttcaactccaccacatcatagactcctatagagcgaataacctggatcagctgctggtctgtggtcccccaggagaagctgcccacataaacggcagctcgtctattacgcaggccactgtaggtatacagaattgcaggggtcttgttgttgggcttgggagatggctcctggcgaacaggaggaggtggttcagtgctgctgcttctgtcatctgagggctgtgaggtggctgtcagcacatcatcatacaggtcaatctgatctgtattgttgaactctgggtcctggttgaactcctcgtcagcatatatatcaatcaagtccactccttctgacatggctccgacgaaatcgtcga

SEQ ID NO: 127031 - DNA, 1182 bp, Homo sapiens
atggccgtggcacttatggaccactgcgttgcccccaggatgcacctttcctctctgaatgtgccccctggtctccccttgcacggagcccagcctctgaccaacctcattaagctctcctgcaagtggcctaagggctactacattccagccttggcccctgcgcttcccgtaaaaccaccaggccgccccccttgccagttgtggtggatgcgcctgctgcattgtcgcgtaaggaacgagtcctctttcacgatcgggctgcgacgagcaagtgaccacgcgcatttattcaccggtacgtatgctgaggtggtggtagcctctgaaaactctgtccacaaattgttggaactcctaccagggaaagttcttaatggagaaaaagtggacgtgaggccggccacccggcagaacctgtcacagtttgaggcacaggctcggaaactgtccctgctggaggatgagtatagtaatgtcagctacatgcagcgctctggaacgtacgtgatatgtagcatagtcgctggcagtgagcgcacatcaccaatccgagttggtggcgtgagggaccacagcacagataggaaccgagagggatcccgctttgagcttaatagccagccgagcaacgtgcacggaccaggtaaccacgcacaccggagccccgcaccaggcagggggagccgaggggagctgctcttgtctctctgctacaaaccctctgccaactccatcatcgtgaacatcatcaaagcccgggacctcaaaaacatggacatctggggcacatcattggttcctgggctttgctgtcttcctcctgccctgggcgtccatgtggctgcgcagctcctaaaacctatccacgtcttttttggagccgccatcctctctctgtccatcgcatccgtcatttcgggcattaatgagaagcttttcttcagtttgcatcctgaagtgcatcacctgacaccccgactagtacaccggggtgcggagaaccgagcaaaagctgatctaccaacttccgcggggtacctacagcgactcgctcccgccccacttcgtacacagaccatcccaacctactcacacgacgaccacacacaacaacgactcaccacaccacctaccgcgcacaacgacggcaaccggacaataccgacccaccccaaatga

SEQ ID NO: 127032 - DNA, 635 bp, Homo sapiens
gagcctgccaacttcaacaacagaataaacgatataatatcaacacgcaatgtgcccagagacccaggaaatccggactgcggcaaagatcggaaacgcctcgtcggggcaggagccgcgagcgggaacgtcgccctcgtccgggccaggcgggcgaaggcggcgaagggcgccacggttgtggacggctactttccgcgccaaggcgcgagccccggggtccttttgtttctgggaggggacaacaaaagaccctgccgccctggcgagcggcgtcggcggagccagagtggccccggcgcctcggcgcgaactctgtccctttcctcgcggtcccggccgctcttaccgtcccggtcgcacagctgaatggcctccaggctgaggtttttgatcacctcctcacaggggctgcctcaatcaccgcccccatgatagcgcctacagcctcttctgttcataccttcgctgtgttcgcacggtcggagcgcactggtcaacccttcctcaccctgacattcctcctacactacaccgcccgctggcaccggctgcccaacatgtgccggaccgtcgtacagcggtcatccgatcctaacctcacgatttgtattgatcggctcactctgtactag

SEQ ID NO: 127033 - DNA, 619 bp, Homo sapiens
tactgtatattcagttcttgggcttaaaaacccagtgtctccggacaagtcataggcaagggaacagcttttgccaccaaattttgtggaaacatccttgtgtttaaatttattggagttcttgttctctttcttgttgaggtcaataaaatagtgtgtaatgcgatcctttgattttgaatccatttcccatgaaatcttgaatgagtcacacgttatattgcttattttgatgttatgtggtacaggaagttcttccatctctgctatgccactgtcttgtgatttgttcccgtcccggtcgcacagctgaatggcctccaggctgaggtttttgatcacctcctcacaggggctggtggggctgttgagggcatgatccaggcgcggcacctccatttttccaacccactctgaagcccgcctgcttcgtatccaggctctctctgccggccgggtgggcaagaagagcgggaaagggagggggagtggcagagggagggaaggaggcctgggacgcggtgatgcggtgccgaggctgaggcgcggggctggagagccgccgcgaaggcgacggctgtggcaggagcacgaaatcgtcgacccgggatttccggac

SEQ ID NO: 127034 - DNA, 1185 bp, Homo sapiens
atggatgaagatggaaaccgtcattctcagcaaactatcacaagaacagaaaaccagacaccgcatgttctcactcataagtgggagttgaacaatgagaacacatggacacagggaggggaacatcacaccggggcctgtcggggaagcgtacccggctacgcctacgcccaacggcatttagctttggcgatatttgctgccgcgcacgaccagtacgcgaaccatattgtcacacgaagagaccgctacctgcgggactgtgcgttgctttttggtggtgggcggtacacctttggggacatggtgcactacgccaacgcgagtttacttaagtgtgtgattagacgaaaccataaagacgggggcagacggcagacgccggcccgcttccagaaaggaggcccaggagccgatataatacacttgcctgaagtgaaccctaccgcaacccggcgtgcgaaagggttgtcggccacatacggccgtgtcaccaaggggcacatggacacccagcaacgccgagttttacacctcagggccctagacccagcagccaacggtcactcccctgaaaaggtaaatcaaggggtttcttcttggtttggatccattgctggtctagtcacccagcaggtctaccaggctctgggctggtacagcagaggggttgtctgcacagagtcctgtgatgtgaacttccatgggtctctcagccatggataccagcacctgttctggtggaggtacttttcatttttaactcctaataacaaccctaatgaagtagctattattactcccccctcccccactcagcagataggggaactctgggccacaaaagtcaaacaacttaccgaacagctccaaaagaggttcccagaccccctgatttacctgctccagcctggggtggctgctcacctccaggtgatggcctcgggggagcctcttaagacttggagcagaggtggctccgaactgaaggacactgacaattggcagcttgcctctgtcctcttctctcccttccctcacaggaacggagctggacaactgagctcaccatacgaacgatcgaatcttattgcggaacatctgcgagccacgatccgtgctagtgggcagcaaccattcaaactacgagggcattcaaccatctcgctctttaacatcgtctag

SEQ ID NO: 127035 - DNA, 764 bp, Homo sapiens
acctatcttcctcccctaagcccaccatcccagcttcagcaacatcagtccaactaggagaaaacttcagtgtgacctacctggttctgggtgagccagagattgctatggactttagctgcggtatatccagggcagaagataaacgctgcatctcccttcactcattgattccccagaggtggtcagaacggggacatgtacagtctgacaatgcacagaaggcagaaacaatgctttccatattactacggcttcaaacctgggtaatatggacattaagccaggtaaatcaaggggtttcttcttggtttggatccgttgctgacctatcttcctcccctaagcccaccatccaagcttcagcaacatcagtccaactaggagaaaacttcagtgtgacctacatggttctgggtgagccagagattgctatggactttagctgggtatatccagggcagaagctggctctggccgttccagcccgtggaatcagcatcattgcatctcccctcacagtaaggacagggccactgggcatctctttcagcagcaagatcccagagactgaaaaacagttaaccaggaatgaagagaaagctcaggatggccacgtggcctcttcagatctgaaggtctgtaacagggcagggaaaaaagaaagcaccaaaaggtcaatgcagaaatcacggagtggcaaagtatctatcaaagccaactgtctgggctcgaaagctgatagacagaagctagtacagtga

SEQ ID NO: 127036 - DNA, 1302 bp, Homo sapiens
tgataagacaggttgaatcacactggggtgacagcctcatccctccaggtacaaacaagaacaggccatggttaaccaaagctccacaccgggcttcctccttctgggcttctctgaacacccagggctggaaaggactctcttcgtggttgtcttcacttcctacctcctaaccctagtgggcaacacactcatcatcctgctgtctgcgctggaccccaagctccactctccaatgtactttttcctctccaacctctccttcttggacctctgtttcaccacgagttgtgttccccaaatgctggtcaacctctggggcccaaagaagaccatcagcttcctggactgctctgtccagatcttcatcttcctgtccctggggacaactgagtgcatcctcttgacagtgatggcttttgatcgctacgtggctgtctgccagcccctccactatgccaccatcatccacccccgcctgtgctggcagctggcatctgtggcctgggtcattgggctagtggagtcagtggtccagacaccatccaccctgcacctgcccttctgccccgatcggcaggtggatgattttgtctgtgaggtcccagctctaattcgactctcctgtgaagacacctcctacaatgagatccaggtggctgttgccagtgtcttcatcttggttgtgcctctcagcctcatccttgtctcttacggagccattacctgggcagtgctgaggattaactctgcaaaagggcggaggaaagcttttgggacctgctcctcccatctcactgtggtcaccctcttctacagctcagtcattgctgtctacctccagcccaaaaatccctatgcccaagagaggggcaagttcttccctacacacacctggggaatgcactctgcaggccacatgacgttgcttctgcatctgtctccctagctttgctgcatcagtcccagtgtccagcccacacaggcctcagtacgtgtccctatcacagctaagggcaaagtcacagaattatctgtttcaaaagcctgagtggataaacaaactgttgcctatccagggtgtcctaaaactaccaaggactgtgggaggagcaattggcaggaccatcttcaactgatgccaactattcattttccaaactgcaggcttatctactccatagacttcttctcttttcctagcggatatttcactgtgggaagaagagagactcaaattaagtccaactggtccaaggtggataatcacagtggaaagttttttagtggaagttcagaaat

SEQ ID NO: 127037 - DNA, 1302 bp, Homo sapiens
atggttaaccaaagctccacaccgggcttcctccttctgggcttctctgaacacccagggctggaaaggactctcttcgtggttgtcttcacttcctacctcctaaccctagtgggcaacacactcatcatcctgctgtctgtgctggaccccaagctccactctccaatgtactttttcctctccaacctctccttcttggacctctgtttcaccacgagttgtgttccccaaatgctggtcaacctctggggcccaaagaagaccatcagcttcctggactgctctgtccagatcttcatcttcctgtccctggggacaactgagtgcatcctcttgacagtgatggcttttgatcgctacgtggctgtctgccagcccctccactatgccaccatcatccacccccgcctgtgctggcagctggcatctgtggcctgggtcattgggctagtggagtcagtggtccagacaccatccaccctgcacctgcccttctgccccgatcggcaggtggatgattttgtctgtgaggtcccagctctaattcgactctcctgtgaagacacctcctacaatgagatccaggtggctgttgccagtgtcttcatcttggttgtgcctctcagcctcatccttgtctcttacggagccattacctgggcagtgctgaggattaactctgcaaaagggcggaggaaagcttttgggacctgctcctcccatctcactgtggtcaccctcttctacagctcagtcattgctgtctacctccagcccaaaaatccctatgcccaagagaggggcaagttctttggtctcttctatgcagtgggcactccttcacttaaccctctcatatacaccctgaggaacaaggagctttgctgcatcagtcccagtgtccagcccacacaggcctcagtacgtgtccctatcacagctgctgctggtgctgaactcaccttccaggagagtctccagcatatccttccacactccagggagccatggtgtcctaaaactaccaaggactgtgggaggagcaattggcaggaccatcttcaacacttcccattttctgctggggtgagatcacagctggcccccaagcatccagaggaatccagggcctgcggatatttcactgtgggaagaagagagactcaaattaagtccaactggtccaaggtggataatcacagtggaaagtttttcaagtactggtctaagattcaaccagcccatgctttagtggaagttcagaaattggctcttaacagctgtcttacaaaaatctga

SEQ ID NO: 127038 - DNA, 1179 bp, Homo sapiens
atggttaaccaaagctccacaccgggcttcctccttctgggcttctctgaacacccagggctggaaaggactctcttcgtggttgtcttcacttcctacctcctaaccctagtgggcaacacactcatcatcctgctgtctgcgctggaccccaagctccactctccaatgtactttttcctctccaacctctccttcttggacctctgtttcaccacgagttgtgttccccaaatgctggtcaacctctggggcccaaagaagaccatcagcttcctggactgctctgtccagatcttcatcttcctgtccctggggacaactgagtgcatcctcttgacagtgatggcttttgatcgctacgtggctgtctgccagcccctccactatgccaccatcatccacccccgcctgtgctggcagctggcatctgtggcctgggtcattgggctagtggagtcagtggtccagacaccatccaccctgcacctgcccttctgccccgatcggcaggtggatgattttgtctgtgaggtcccagctctaattcgactctcctgtgaagacacctcctacaatgagatccaggtggctgttgccagtgtcttcatcttggttgtgcctctcagcctcatccttgtctcttacggagccattacctgggcagtgctgaggattaactctgcaaaagggcggaggaaagcttttgggacctgctcctcccatctcactgtggtcaccctcttctacagctcagtcattgctgtctacctccagcccaaaaatccctatgcccaagagaggggcaagttctttggtctcttctatgcagtgggcactccttcacttaaccctctcatatacaccctgaggaacaaggagctttgctgcatcagtcccagtgtccagcccacacaggcctcagtacgtgtccctatcacagctgctgctggtgctgaactcacccttgcaggagagtttccagcatatcctaccacactccagggagccatcggatatttcactgtgggaagaagagagactcaaattaagtccaactggtccaaggtggataatcacagtggaaagtttttcaagtactggtctaagattcaaccagcccatgctttagtggaagttcagaaattggctcttaacagctgtcttacaaaaatctga

SEQ ID NO: 127039 - DNA, 646 bp, Homo sapiens
atggatggattcggcatcagccacaacgacggtcctatttatacctctttgtgctgcaatctaatggaccgcattggtttccacaaggctctggaactttcaccagtctgggtcaatctttatgttaatttttcagcttgtggcccttcagcatgctgggtggatttctatcttcttgcccatcatgtacggcagggctgtggcattcctacgcattatgtctgtgttctcaacaccgcaaacctgagccctgatcatatgcagaggctgactttcaaactgtgccacatgtactggaattggcctggcaccatcagagttccagctccttgcaagtatgcccacaagctagctttcctgtcaggacacatcttgcatcatgaaccagccatccagctgtgcgagaacctgttcttcctgtgactgcacagcttggagatgggctggtgagaagaaaggcggcctcagaactcagctgtgactcttgcagaatcaacagagactgaagtgggcttttgtgttataattttccctttctccaaccctgtagaataagatttctttcttgtcttttaaacctaatatcaccaagaagcaagtgtctgagtaacagctgaaaatggccttgatgcctgtgtagagcaag

SEQ ID NO: 127040 - DNA, 404 bp, Homo sapiens
  misc_feature (1)...(404): n = a,t,c or g
nnnnnnnnnnnnnnnnnnnnnnnnnnnnnnnnnnnnnnnnnnnnnnnnnnnnnnnnnnnnnnnnnnnnnnnnnnntgtgagtgaaatttggtcccgaaatttggtgccgtgactcggatcaggggcgtgggggggtggggacctcccttgggagatcaatcccctgtcctcctgctctttgctccgtgagaaagatctacttacgacctctggtcctcagaccaaccagcccaaggaacatctcaccaattttaaatcgggaccccactgttcaactcacctggcagccactcccagagcccctggaactctggcccaaggctctctgactgactccttcccagatttactcggcttagcggctgaagaccgatgctgcccgattgcctcggaagccccctaga

SEQ ID NO: 127041 - DNA, 381 bp, Homo sapiens
atggtctacagggcttccgaggcgatcgggcagtgtcagtcttcagctgctaagccgagaagatctgggaaggagtcagtcagagagccttgggccagagttccagggggctctgggagtggctgccagagatgggacgcggcttacgaggaatcccaggctgcaggcattccttggcctgatggccagatttccagcacttgtagcaagctcctgggggaggaggttctggaggaatgcctggctgctgcggttcaggcgtttggaagttcttgtgtgctggagatgtggctggggtttgtctcacagtggaggcaaggaattgcaactcagaaatatattgctacttggctgtctctactctattattgtacaccttga

SEQ ID NO: 127042 - DNA, 751 bp, Homo sapiens; identical to SEQ ID NO: 124292

SEQ ID NO: 127043 - DNA, 629 bp, Homo sapiens
ataccacacctgaccctcatgactgtatctctctgatccacctgacattcaccccatttccccatatttccttctttcgtgttcctcacccttatcacatttggtttattgatggcagttccaccaggcctaaccgccactcaccagcaaaggcaggctatgctatagtatcttccacatctatcattgaggctactgctctgcccccctccactacctctcagcaagccgaactagttgccttaactcaagccctcactcttgcaaaaggactatgcgtcaatatttatactgactctaaatatgcctttcatatcctgcaccaccatgcaagaggtttcctcactacacaagggtcctctatcattaatccctctttaatgaaaatacttctcaaagctgctttacttccagaggaagctggagtcattcaccacaagggccatcgaaaggcatcagattccattgctctaggcaacacttacgctgataaggtggctagacaagaagctagcattccaacttctgtccctcaccgccagtttttctccttcatatcagtcactcccacctactcccccgctgaaacttccacctatcatctcttcccacacaaggcaaatggttaa

SEQ ID NO: 127044 - DNA, 487 bp, Homo sapiens; identical to SEQ ID NO: 116078

SEQ ID NO: 127045 - DNA, 1238 bp, Homo sapiens; identical to SEQ ID NO: 120815

SEQ ID NO: 127046 - DNA, 513 bp, Homo sapiens; identical to SEQ ID NO: 124295

SEQ ID NO: 127047 - DNA, 462 bp, Homo sapiens; identical to SEQ ID NO: 124296

SEQ ID NO: 127048 - DNA, 213 bp, Homo sapiens
atggtccaggaggcttctgaggtgatcgggcagcttcagtcttcagctgctaagctgagaagatctgggaaggagtcagtcagagagtcttgggccagagttccaggggctctgggagtggttgccagtcccaaccccaagcgttgctttcaatcttccttttctaccgacccatctgacctctcccttcatcccaagattgctcctcctcag

SEQ ID NO: 127049 - DNA, 1159 bp, Homo sapiens
atgaacgacggcgtttatccacgtcagcttgcgccattgggctttgacctgatgagccagaaaccgaagcgtggcgaccgtagccgtcgcgatgacgaccgctatctgttcctggaagcgttaatttccgcgcagcaaaaactctatatcagctatatcggtcgttccattcaggataacagtgagcgtttcccgtcggtactggtgcaggaactgatcgactacatcgggcaaagtcattatctaccgggcgatgaagcgctcaactgtgatgaaagcgaggcaagggtaaaagcgcatcttacttgcctccatacccggatgccgtttgatccacaaaactaccagccaggcgaacgacaaagctatgctcgtgaatggctacctgcggccagccaggctggtaaagcacattctgaatttgttcagccgctgccgtttaccttaccggaaaccgtgccgctggaaacgctacaacgattctgggcacatccggtgcgggcatttttccagatgcgtttgcaggtgaacttccgtactgaagacagcgaaatccccgacaccgagccatttattctggaaggacttagccgttatcaaatcaatcagcagttattgaatgcactggttgagcaggatgatgccgaacgcttgttccgccgcttccgagcggcaggggattacccaatctacggcgtgaagtgtggcgatgaagtgattaagcccgatgcgtatgtgatggcgtttggttcttactcgacggcgatgctcaaaggcattgttgatattccggtgtatccgctgaaaggctactcgctgaccattccaattgcgcaggaagatggtgcgccggtatccaccattcttgatgaaacctacaaaatcgccattacccgtttcgataaccgcattcgtgttggcggaatggcggagattgttggttttaataccgagctgttgcaaccgcgtcgtgaaacgctggagatggtggttcgcgatctctatccacgcggcggtcatgtcgagcaggcgactttctggactggtctgcgcccgatgacgccagacggcacgccggttgtcgggcgtacacgctttaaaaatctgtggctgaataccggtcacggcacgctcggctggacgatggcttgcggttccg

SEQ ID NO: 127050 - DNA, 864 bp, Homo sapiens; identical to SEQ ID NO: 115468

SEQ ID NO: 127051 - DNA, 1158 bp, Homo sapiens; identical to SEQ ID NO: 120813

SEQ ID NO: 127052 - DNA, 1626 bp, Homo sapiens; identical to SEQ ID NO: 116080

SEQ ID NO: 127053 - DNA, 179 bp, Homo sapiens
atggtctatggggattccgaggcgatcgggcagcatcagtcttcagtcgctaagccgagaagatctgggaaggagtcagagagccttgggccagagttccaggggctctgggagtggctgccagtttatgagctaggaaccctccatgcaggctctgaacctggtggagctcttccttg

SEQ ID NO: 127054 - DNA, 410 bp, Homo sapiens; identical to SEQ ID NO: 114507

SEQ ID NO: 127055 - DNA, 714 bp, Homo sapiens
tcacatacggcacacagtccccattggtggtgcttcactgatttggcctaaggctatcattggctcctcctttctgcatgttccccctaacgacttagcattcttgaccctctgtattgcctgcatccttccctgctgcccttgggattccccaagcaagagctgtaacaccctttgtgtctccatgattgctggcatctctgagtttttgggcaccaccatgttccctttgtctagacgccagtgtctgacatggaagccacttgtggcatgctcagtccagctgcaggctgagatggagcttcgggctggctgcaagccaaatgcagccagaagagccaagtcatggaccgaggaggaaatgagcacagcaggcaccaggtgagctaggaactgcacaaccacagcagattcagaatcgaggaccatagagaacactgtgcaggtcatcccagtaaccaacaggtctggcaaccactcccagagcccctggaactctggcccaaagctctctgactccttcccagatcttctcggcttagcagctgaagactgacaccgcccaattgcctcggaagctctttgttgagtcccacaattaccattgttcttggcctggacttcaatccggcctcccacattattctggataccacacctcatcctcatgactgtatctctctgatccagctgacattcaccccatttccccat

SEQ ID NO: 127056 - DNA, 741 bp, Homo sapiens; identical to SEQ ID NO: 118888

SEQ ID NO: 127057 - DNA, 420 bp, Homo sapiens; identical to SEQ ID NO: 114509

SEQ ID NO: 127058 - DNA, 679 bp, Homo sapiens
atgttttcttatttcctacgagtttatgtgcttggaagcgagcgtggtcgtggaaaacccgtaaccgctaaattcatctgggtcccaaagactgagccggctggcctcgttatttatgtgagcggctatgtaaatgaggattcggagattgctctattgattggagagagctggaggaggcggtctctcttccagagcgctagttgggagcggacctgcctgtcattggtcaccagagccaatggaaaggggctgccgcgcggccgtaaagagtttgtagaggcagttcgggtgcggtacgttgcattccggtaccggacgccgagagcggtttgtctccgtctctggagttgtaggcgagaggtgatcatgtccggtcgcgggaaacagggcggcaaagcggcttccgaggcgatcgggcagtgtcagtcttcagccgctaagccgagaagatctgggaaggagtcagtcagagagccttgggccggagttccaggggctctgggagtggctgccagcaccagtgaagatgatggctatcctgaggacatggatcaagataagcatgatgacagtactgatgacagtgacaccgacaaatcagatggagaaagtgacggggatgaatttgtgcaccgtgataatggtgagagagacaacaatgaagaaaagaagtcag

SEQ ID NO: 127059 - DNA, 1161 bp, Homo sapiens
atgaagctggtaactatcttcctgctggtgaccatcagcctttgtagttactctggctattggcccgaaaatgaacaaatgagtgttggaggtggagatgacaatggcgaggttctgtattccgccctgaggggggcttccgaggtgatcgggcagtgtcagtcttcagccactaagccgagaagatctgggaaggaatcagtcagagagccttgggccagagttccaggggctctgggagtgggtgtcagagagattgaccaaactttaggaattgacaccattctctgtcaccatcatgaaagacttcttcagtctcattacggaattcacaagtcttctttaatgtcagtaggaaattcacaagtcgcagctttgtaccagctgaatgtttatgttgttgctgacacagttggattaattatcaaatccaattcaatcctggactcagtccagcctaactattgctcaaataaacacatagagctcagaacacaagttggtggagctcggaatctgagagcaaactcacccatgacctccagctacaatcaagagagcagtagcatggagaatgtgtctgcattgtcactgttgactgtggagagtcccacgtccatgtttgactattgtgatgactctttggagagggtcaagtctgctcttgacatcttttccatgatcatctacacagtgactttcttcctaggcttggctggcaatggccttgtcatttgggtagttggattccacatgtcctgcacagtcaacacgtgtcttccttctgaccctcatctccatggaccactgacttgtgatcctgtggccaatctagtcctggaacaattgcacaccagcaaaggcaactctggggcccttgaggacctggcttttggcaatttgtttctctgttccctacttgatcttcaaggaaactcgtggtggaaagtgtcaccctctttgtacaaccagtatgatctgcagaatgaaactcaaggaagtcaccaactttggaaagagattatcattccatggcaccaaacgctggtcacaacagcccactttttctttggcttctttctccctctggctatcatcactggctactacatccttgtagccttgaagttaagagaaaggcagctggttaagtttagctga

SEQ ID NO: 127060 - DNA, 441 bp, Homo sapiens
atgctggagcacgttttaatgttcggtctcattgaagaaatgaccgtgtcagaccacacagggacgtttactcactgcagggacgcctctctgatcattcacccacgtttcaagggtgtcagaccacgcagggacgcctgccttggtccttcacccttagcggcaagttccgcttttctggggaaggggcaaccacatctccggcacacaagaacttccaaacacctgaaccgcagtggccaggcattcctccagaacctcctcccacaggagcttgctacacgtgccggaaatctggccactgggccaaggaatgcccgcaggccaggattcctcctaagccgcatcccatctgtgtgggaccccactgaaaatcggactgttcaactcacctggcagccactcccagagcccctggaactctggcccaaggctctctga

SEQ ID NO: 127061 - DNA, 595 bp, Homo sapiens; identical to SEQ ID NO: 124302

SEQ ID NO: 127062 - DNA, 1467 bp, Homo sapiens
tcacgcctcgccattattacgaacccaggattttaactgttctaaagtaggcatttgtttaacttgagcagtaattgggtctacatcagataagctgaattgcgcagcagctccgttcagaccatatccattggcaacgcgatcccaatattgattaaacgcctgtatagacggttgcaaaaagccatctttcgctttaaccgctttttcaaaagcatttgccatagaaagtggcatatcggagaaattaaccattaccatatccgcagggttaaaagcggcataagtacgctgttttgctccagggacctctgttgccagcatatgaacaacatgggttgcaatttccagagcctgctccctggaggcaccacctaaattttcctgaagttgagcgaggttaatgttggcataacgataaaaaacacccgatgaaaattcctgagttcccagatgtgcagaaccttgttcctgtaaatcatctacagcggtgaaccagtcaatatcagaatcaacctgatgagtagtgatcgcatgcgcaatggacattgcaccatcaacttttcccaactcagtcatcatgccgctggttgccattcttccactaagcgcaatatcaacaccctgctgtaaattcacacgtatggcggcaatatcttccttaagaactttgagcagctttttatcatccagattatcagcctctgcttttgcaacctgctcacagaaccaggctatttctcccacaacccagggagtaaccgcatcggcagaaatcttttcggcttcatcaactgatttaccggagagcagcgctaatgtcttatcgatgattttttggtcaaaacgttcaccaagtttttgccgaagaacatcacgtaattgtgcaagatgaatggttctgagactggattcaccaatattttgtgcgtaataaccacttttacgcatcgcacgtttaaggctttgacttgaaattcttactcgtcttttgccgccgaaaatagcgtctttctgcatgttcatatcgtcgcggttcagacatgaagggtggttgagcaggatgatgccgaacgcttgttccgccgcttccgagcggcagggatttaccgtatggcgcttttggtgaaattttctaggaaacacagtgccaggagatgcagcagcttgccgaggaccatgcttcggtaacaatgatttcactcgaagcatggcgcttgtatcggaaaatggtttgtcggatatgggcttcgatgttgagattgtcggtgtgccatttatgcgcgccaaagagggtctggtctctaatttcccgtaacggttatcatttgccgggctcaatacactgacatgaccacaaggcttccgcgccgaatcatattcagattcagctgatgcccggacaccatcgctggtaagtctttccaggagaaaagactgacactgtgccccactgtccacggccat

SEQ ID NO: 127063 - DNA, 1593 bp, Homo sapiens; identical to SEQ ID NO: 124303

SEQ ID NO: 127064 - DNA, 433 bp, Homo sapiens; identical to SEQ ID NO: 124304

SEQ ID NO: 127065 - DNA, 367 bp, Homo sapiens
atgggggctgtctgtgaagctttgcggcagtacagcccagaaggggacggacttaccctccactgtgagagttacccgaagctcggcatccgtgatggtctgggaaggttccgaggtgattaggcagcgtcggtcttcagctgctaagctgagaagatctgggaaggagtcagagagccttgggccagagttccaggggctctgggagtggctgccagtcagagttactcttgctgctgctgctgctgctgctgctgctgctgctgctgctacggtggtggcggcggcggtggtggcggtggctgccgaggcctcatggttgtcagctccatgcctcctgaacttcactccactgaaatctggttgg

SEQ ID NO: 127066 - DNA, 2083 bp, Homo sapiens
atgcctttcagccccaaggctgccacctgctcccttgagaggctacactctatacttcaggtggtcctaagggagaaagtgacccaagagctaatatccattagacattttagcagacatagccatagtgggtatcttggtttatctccagaaagtactaaaacccaggcccagaataaaactgaaggatgtcggaccggcactctcactgtttctaggcttccaggaggtcctggtgtcttagctgtggatctcccaatacctgcagaatatttttggcgtcacgaacaggattcaaaaaccaaactgtgccactttttggccacaaggacagggctggaaactcgaggaaatcccaaatccagggatgggaactccccaatatcactgtcaattcctacaggattgaacgaaggggacgaatgcagaaatgaagacaaagacaaaagatttgttttaaaagaagggagacaaaggagacacgttttatccatggacccaaaactccggtgcccgtcacggactgggaaggcagccttcccttggtgtttcatcattgcagggacgcctctctgatcattcacccacgtttcagaggtgtcagaccacgcagggacgcctgccttggtccttcacccttagtggcaagtcttgcttttctgaggaaggggcaatcccaaccccaagtgtcgctgagtctttccagtcttccttttctacagacccatctgacctttcccctcctccccagcctgctcatcgccaggccgagctaagtcccaattcttcctcagcctccactcctccaccctataatcctcctaccacctcccctcctcacacccggtccggcttacagtttagttccgcaactagctcttccccacctgcccaacaatttcctcttagagaggtggctggagctgaaggcatagtcaacgcacatgtacctttttctctatcagacctctctcagatcagtcagcatttaggctctttctcatcagaccccactaaatatatacaggaattccgatatctaactctgtcctacaacttaacctggagtgacctaaatgtcatcctgacttctaccctctccccagatgaacgggaaagagtttttcctgtatcccaatctcacgctgataaccgtcggcttcatgagccagacctccaggaaggcattagagcagttccccgagaggatcccccagtggaactaccaggcaaattccccaggaaaaaacttcaaaaattagaatctggccctcaaaccccacaacaggaattaatcaaccttgccttcaacgtgtacaataatagagaggaagcagccagacggcaatgcatttctgagttacaattacttgcctccactcagcagaagactgacaccgcccaatcgcctcagaagccaacagaaccatcacagatgctctggataactctcacagtggaggtggctgccgctgctttaatacttttagaggccctcaaaatcacaaactatactcaactcactctctacagttctcataacttccaaaatctattttcttactcatacctgacgcatatgctttctgcttcccggctccttcagctgtattcactctttgttgagtctcccacaattaccattgttcctggcccggacttcaatccggcctcccacattattccggataccacacctgaccctcatgactgcatctctctgatccacctgatgttcaccccatttccccacatttccttcttccctgtttctcaccctgatcacacttggtttattgatggcagttccaccaggcctaatcgccactcaccagcaaaggcaggctatgctatagtatcttccacatctatcattgaggctaccactctgcccccctccactacctctcagcaagccgaactagttgccttaactcaagctctcactcttgcaaaggactacgcgtcaatatctatactgattctaaatatgcctttcatattctgcaccaccatgcggtcatatgggctgaaagaggttttctcactacacaagggtcctccatcattaatgcctctttaa

SEQ ID NO: 127067 - DNA, 862 bp, Homo sapiens
atggaattttgtatttcattaggccggaaaataactttttcaaacatttttccctacaacggggccaattggaaggttttcttaaaaaagtcccaaccattattgaatgcactggttgagcaggatgatgccgaacgcttgttccgccgcttccgagcggcaggggatttaccgtatggcgcttttggtgaaattttctgggaaacacagtgccaggagatgcagcagcttgccgacagagtcattgcctgtcgccagccggggcagagtatggaaattgatctcgcctgcaacggtgtgcagataactggctggttgccgcagctttgggatgctgaagggatcagcttcagtgtcttcagctttgggatgctgaagggatcagcttcagtgtcttcagctttgggatgctggagcttgctacacatgctggaaatctgccactgggccaaggaatgcccacagcacggtattcctcctaagccacgtcccatctgtgtgggaccccaccgaaaatcggactgttcatctcacctggcagccactcccagagcccctggaactctggcccaaggctctctgactgactccttcccagatcttctcggcttagcggctgaagactgacgctgcccgatcgcctcggaagcctgacacttatactttctgctcccccggctccttcagttgtacccactctttgttgagtcccacaattaccattgttctcggcccggacttcaatccggtctcccacattattccagataccacacctgaccctcatgactgcatctctctgatccacctgacgttcaccccatttccccacatttccttcttccctgtttctcaccctcat

SEQ ID NO: 127068 - DNA, 3504 bp, Homo sapiens
ttaagctgaagggaggtcttgtggtaaggggtgatattgtggggatgttagaagaaacatttgtcgtatagaatgattggtgatggcctggatacggttttggatgaattgagaaactaaacggaagatacaaggtccaaataaaagaaggagaaaaatgggtattaaaggactaacaattgggaggacccaggacatccaattagagagtgcccaagggggttcagcgtaattacttgcttggttggcaagtttttgggctctatccttgagttttttaatgttgtcatacaccaggccagattgatttaggtaaaaacaacactcctcatttaagaatatgcagagtcctcctttttcagcagtgagtaagtcaaggcctcggcggttttggaggacaactgcagctaaagagtcaacttgggcctggaggactgataaagtttgtgatatgtctgtgatgctagcagagaagtcattagacaggctacggaaggtcatgacagacgttgaaatgcctgctattccagtaccgagagcaacagtggaggcagaaagtcctaaaccgaccatcaagggaattagtggaataactcttttttgttgtgtcggtgtcatgaggggaacagggagctcttcggtcccatttgcaaattgaattttgggggtaaggaagactagtgtacatgtgcctgtccaattggcaggtaggcacatgtaggtagaggatccacagaggaagaagagaccttgtgcgaggcaaaactggagatgtaaagtaaaaaggtgagaaggagtgctgaaaggggtgtcttgtacccagactcctagggatccagctagggcggcagctgtcagaggttgtaatggggactgatggggtaactgcgtagaggggaaggttcgattttcatggtgtatgagaaaacgtcgagtatctacgagcaatctttcactgttattttcggggctgggtataagtaaacaagaagagggcctgggaggagagtctgatgagcaaggggaagatagccaaggatggagtgaaatacagggcaagtgtcttcctaagcaataattactgctaatgtttttaagtttgtcagtattgatagagggcttgtctgtaatatggagctggaaggctccaattgtttcattgatgtttgtagttggacttcggagatgaagagtaaaggaacatcgagaaggtgaaagattacctaggggaattccagtgggtctttgccaagagatacacaaaggagcggccacaggaatagtagtttgtgttgtgagaggtccaaatatggggggagtagagttgatataaggagaaaggttttttaaataagtgcgaaggagggcggcagcttgctgatgtgaaatgtctggggaagtcttgctggacctgtctagaaagtaaatgagttcttcaggagggtaaaggtgagggctgttaaaggaagttcggaggtgtagggagatgggagatgttgcccagtctgtctgtaaggcggggacagctgtgtaggcatgttcttcagaaatatgagtgagtttaagggaagtgggggagagtacttgcgacttccaggaggaagaggagggattaggctggctgtccgatggacacagctttattctggaatggtgaacccagtggggaggattctgcaggcagacggcagtcggggtactatagatgactaagtagggtccggtccatcgaggttgtagagtttgaggggtcagattcttaacaagaactgatcgtccagctaggttgtcttcatatggctggggatctggagtaggcaagagaagattagcagcctggcgaatttcctgtctagcctgctggagtactggaagatagtcgcctagagggctggtgtctgggatgaggttggggccaagcaagaaagtgcgtccatataaaagttcaaatggactgtatcctgtagcatctcgaggacaggctctgattttgagaagagcaagaggtaaaagtgctgtccaatcctttgtaagttggaggctaaacttggtgaggtgtgcctttaaaagaccattagtccgttccacctttcctgaagattgaggacggtaaggggtatgaaggttccactgaataccaagagcctgagaaactacttgggtgatttggctagtaaaggctggtccgttatcagactgtatagaggtgggaaggccaaaccgaggaattatgtctacatagaagaggttatgaaatgatgacagaatagaatgggcctgtgaggctggaagaagatattttccttggtctaagaaccatttgccttgtgtgggaagagattgataggtggaagtttcagtgggggagtaggtgggagtgactgaagtgaaggagaaaaactggccgtgagggacagaagttggagagctagctgcttgtctagccactttatcaacataagcattgcctagagcaatgggatctgatgccttttgatgccccttgcagtgaatgaccccagcttcttttggaagtaaagcggctttgagcagagtttttattaaagaggcattaatgatggaggacccttgtgtagtgaggaaacctctttcagcccatatgactgcatggtggtgcaggatatggaaggcatatttagaatcagtatagatattgacgcatagtccttttgcaagagtgagggcttgagttaaggcaactagttcagcttgctgagaggtagtggagggaggcagagcagtagcctcaatgatagatgtggaagatactatagcatagcctgccttcgctggtgagtggcgattaggcctggtggaactgccatcaataaaccaagtgtgatcagggtgagaaacagggaagaaggaaatgtggggaaatggggtgaatgtcaggtggatcagagagatgcagtcatgagggtcaggtgtggtatccggaataatgtgggaggccggattgaagtccgggccaggaacaatggtaattgtgggagactcaacaaagtgtaagtatagctgaaggagtccgggagcagaaagtatatgtgtcaggtgtgaggaagaaaatagattttggaaattatgagagctgtagagagtgagttgagcatagtttgtgattttgagggcctctaaaagtattagggcagcagcagcggctgcacggagacatgatggccagcctaaaacagtaagatcaagttgtttggacaaaaaggctacaggacgcgatcctggtccttgtgtaagaattccgactgcacagccctgcacttcggctgtgtgtaatgaagcaggttgggatgagtcagggagagctagagtgggggcagtttctaaagctgtcttcaaggaacagaaagaggagtggggaaaggatttaggatctatggggtcagctaagtttccttttgtgagtttatataatggttttgttaggatggcaaaaccaggtatccaaaggcgaaagtatccaaccat

SEQ ID NO: 127069 - DNA, 1781 bp, Homo sapiens
atgtggtccccagtgctgcaggtggggcctgtgggaggtgtttgggtaatgggagcagatcccccatggcttggtgctgtccttgcaacagcttccgaggcgatcaggcagcatcagtcttcagccactaagccaagaagatctgggaaggagtcagtcagagagcctcgggccagagttccaggggctctggcagtggctgtcagactttcaaacttaacaccagtggtttgtcagtggctttcaagccttcagcgacagactgaaggctgcattgtcagcttccctacttttgaggtttggggactcagactggcttcctagctcttcagcttgcaaatgtcttatgctgggacttcactttgtgattgtaggtaacatctgtgctacactcaaggagaaatactcctcaatgctccatttagatgtgaccatgaagaaaaatggggagaaaagaacaaggctccaaaaaagaaagaagggaatgcctccacatccggcttatgaggacctaaacatagctgccatcactctccctgccaatgttgtccttcatcagccaagtggcttcagaacttcagggcagctggaccccgtttggtggtctcttgacacggacgcgcatgaaatttggtgccaagacccgggacttggatcaggggacttcccttgggagatcactcccctgtcctcctactctttgctccatgagaaagatccacctacgacctcaggtcctcagaccgaccagcccaagaaacatctcaccaatttcaaatccaagacaaaggagacaggttttatccatggacccaaaactccggcaccggtcacggactgggaaggcagccttcccttggtgtttaatcattgcagggacacctctctgattattcacccatgtttcaagggtgtcagaccacgcagggatgcctgccttggtccttcacccttagcggcaagtcccgcttttctggagaaggggcaagatttaattaacctcgccttcaaggtgtacaataatagaaaaaagttgcaattccttgcctccactgtgagacaaaccccagccacatctccagcacacaagaacttccaaacgactgaaccgcagcagccaggcgttcctccagaacctcctcccacaggagcttgctacatgtgccggaaaatctggccactgggccaagcgaatgcccgcagcccgggattcctcctaagccgcgtcccgtctgtgtgggaccccactggaaatcggactgtccaactcacctggcagccactcccagagcccctggaactctggcccaaggctctctgtctgactgactccttcccagatcttcttggcttagcagcttgaagactgacactgcacgatcgcctcggaagccccctagaccattcacggatgccgagctatgggtaactctcacagtggaaggtaagcccgtccccttcttaatcaatacggaggctacccacgccacattaccttcttttcaagggcctgtttcccttgcctccataacctgttgtgggtattgacgggccaggcttctaaacctcttaaaaactccccaactctggtgccaacttagacaatactcttttaagcactcctttttagttatccccatctgcccagttcccttattaggctgagacactttaactaaattatctgcttccctgactattcctggactacagctgtatctcattgctgcctttccccccagttcaaagcctccttcacatcctctctttgtatctccccg

SEQ ID NO: 127070 - DNA, 510 bp, Homo sapiens
atggataaatttctggacacatacaccctcccaagactaatccaggaagaagtggaatccctgaaaagatcaataacaccttctgaaattgaggcagtaattaatagcctaccaaccaaaaaaagcctgggaccagacggattcccagccaaattctaccagaggagaagaaaagagagccgaagattgaagcttgaagaagtccagcgtttcatatcagatgaggagcactggctggtaaatgaagaacgagaaggagcaactgaagaggcagtagacaatccaaacggatctagtatcatggaaaccaagtcagtggaggatctactggagtggcatggtcagctttgttgtgctttgataagaggattccagaaacataaagataatggtgaggtagctagtcgtgaacaaaatgactttaaacaattgcccccagacattccagatgaacaagatgtggaggaggaagacagtgatattgatgatcctgactctgtccaggactag

SEQ ID NO: 127071 - DNA, 684 bp, Homo sapiens
atgacggggaaaccctcctgttctcccgcagcctgccccgcctgtcgagcggccctctgtgctgccctgcagccagctctgccacgctcctgtgattccccagccgccatcagcacacccaaggattcttgcaagaccactcacagccgctttaagagaacagccagggcttctaggcaggagcacgacagtgttcacgctgatggccagggagcctcctcagccagcagcagccgactcgtgcttgtgcattgttcagatggaagcatgatcattggatggaagttcctggcacaggtgcaagttgaccctgagtcattccagaaggattcgggcctcaccggaaagaacgccaggaaaagccatagggcaacagctcttctgccatttcagtcctcatgggtgaaactgggtctatgggagacagctagcaagtgtctgggcagcccccctggccctaagaagttcccgtcgcagggtatgctggcaggaagtggtctgggtcatcttggagatgcaaggtttggatggcgttgggcactgcaggaggagctgcccagcagtgcaagctcccagggtcctggacctctgaccctgtgtcagcccttgtttggtggccctgagcagggccacccagaaggtgggggtggaggacagttcagccgcagcctggaggctcactga

SEQ ID NO: 127072 - DNA, 621 bp, Homo sapiens
atgaacaacgaagcgctggggctggtgcatcagcaacagagtctgttctacgagcaaggcgtttttgccgccacctatccgggcaaaatcaactttatgcagattgccgccggattcggcctcgaaacctgtgatttgaataacgaagccgatccgcaggcttcattgcaggaaatcatcaatcgccctggcccggcgctgatccatgtgcgcattggcaatggcggtcaccaggttagtcgcacccggtccgctacaggccatacagaccgaaacattgattttccgctgccagcgagctttatctgggatatgttcgtccgggtgttaccggaaatccccaaagagagcgcctttaacaaacttttgcgacaggccttcgatgttcccattccatatttaacttttctgcaattcagcacctgctctgttagcacacttcccttccaggcttttagcgtgaagcacctgcatttagatcagcctaagctgtgtgggatcagggtgtactcacagcccaaacttctagaacttcctctcattccaaggaggacctgcaagaaactcagatgtgatggttggagctgcagcagccatattgtgcacaaagccacacactaa

SEQ ID NO: 127073 - DNA, 432 bp, Homo sapiens
tgtggcaaaggagcagagaactttgacaagttcttcacacgaggacagcccgtcttaacaccacctgatcagctggttattgctaacatagaccagtctgattttgaagggttctccatgcacaaacttcgtgagaccaacacagccgtgccctgcaggcaccagcacgtgcttttcagaggctgcggactttcttccagccattgtggcattggcctttccagtcttgggaggagcgcgctgctttggtctctcaccttgggtgaagattcagagatgccctatgccgcggtcacactcaacctcctggaagtgaaggctctttcagctgccaatgcgagggctggcggggaagctattttgaagaaaaacaaagggcaattttcaggtcttcagagcaatgtggtctctgccccactgggctggccctga

SEQ ID NO: 127074 - DNA, 3900 bp, Homo sapiens
atggacctgcccaggggcctggtggtggcctgggcgctcagcctgtggccagggttcacggacaccttcaacatggacaccaggaagccccgggtcatccctggctccaggaccgccttctttggctacacagtgcagcagcacgacatcagtggcaataagtggctggtcgtgggcgccccactggaaaccaatggctaccagaagacgggagacgtgtacaagtgtccagtgatccacgggaactgcaccaaactcaacctgggaagggtcaccctgtccaacgtgtccgagcggaaagacaacatgcgcctcggccttagtctcgccaccaaccccaaggacaacagcttcctggcctgcagccccctctggtctcatgagtgtgggagctcctactacaccacagggatgtgttcaagagtcaactccaacttcaggttctccaagaccgtggccccagctctccaaaggtgccagacctacatggacatcgtcattgtcctggatggctccaacagcatctacccctgggtggaggttcagcacttcctcatcaacatcctgaaaaagttttacattggcccagggcagatccaggttggagttgtgcagtatggcgaagatgtggtgcatgagtttcacctcaacgactacaggtctgtaaaagatgtggtggaagctgccagccacattgagcagagaggaggaacagagacccggacggcatttggcattgaatttgcacgctcagaggctttccagaagggtggaaggaaaggagccaagaaggtgatgattgtcatcacagatggggagtcccacgacagcccagacctggagaaggtgatccagcaaagcgaaagagacaacgtaacaagatatgcggtggccgtcctgggctactacaaccgcagggggatcaatccagaaacttttctaaatgaaatcaaatacatcgccagtgaccctgatgacaagcacttcttcaatgtcactgatgaggctgccttgaaggacattgtcgatgccctgggggacagaatcttcagcctggaaggcaccaacaagaacgagacctcctttgggctggagatgtcacagacgggcttttcctcgcacgtggtggaggatggggttctgctgggagccgtcggtgcctatgactggaatggagctgtgctaaaggagacgagtgccgggaaggtcattcctctccgcgagtcctacctgaaagagttccccgaggagctcaagaaccatggtgcatacctggggtacacagtcacatcggtcgtgtcctccaggcaggggcgagtgtacgtggccggagccccccggttcaaccacacgggcaaggtcatcctgttcaccatgcacaacaaccggagcctcaccatccaccaggctatgcggggccagcagataggctcttactttgggagtgaaatcacctcggtggacatcgacggcgacggcgtgactgatgtcctgctggtgggcgcacccatgtacttcaacgagggccgtgagcgaggcaaggtgtacgtctatgagctgagacagaaccggtttgtttataacggaacgctaaaggattcacacagttaccagaatgcccgatttgggtcctccattgcctcagttcgagacctcaaccaggattcctacaatgacgtggtggtgggagcccccctggaggacaaccacgcaggagccatctacatcttccacggcttccgaggcagcatcctgaagacacctaagcagagaatcacagcctcagagctggctaccggcctccagtattttggctgcagcatccacgggcaattggacctcaatgaggatgggctcatcgacctggcagtgggagcccttggcaacgctgtgattctgtggtcccgcccagtggttcagatcaatgccagcctccactttgagccatccaagatcaacatcttccacagagactgcaagcgcagtggcagggatgccacctgcctggccgccttcctctgcttcacgcccatcttcctggcaccccatttccaaacaacaactgttggcatcagatacaacgccaccatggatgagaggcggtatacaccgagggcccacctggacgagggcggggaccgattcaccaacagagccgtactgctctcctccggccaggagctctgtgagcggatcaacttccatgtcctggacactgctgactacgtgaagccagtgaccttctcagtcgagtattccctggaggaccctgaccatggccccatgctggacgacggctggcccaccactctcagagtctcggtgcccttctggaacggctgcaatgaggatgagcactgtgtccctgaccttgtgttggatgcccggagtgacctgcccacggccatggagtactgccagagggtgctgaggaagcctgcgcaggactgctccgcatacacgctgtccttcgacaccacagtcttcatcatagagagcacacgccagcgagtggcggtggaggccacactggagaacaggggcgagaacgcctacagtacggtcctaaatatctcgcagtcagcaaacctgcagtttgccagcttgatccagaaggaggactcagacggtagcattgagtgtgtgaacgaggagaggaggctccagaagcaagtctgcaacgtcagctatcccttcttccgggccaaggccaaggtggctttccgtcttgattttgagttcagcaaatccatcttcctacaccacctggagatcgagctcgctgcaggcagtgacagtaatgagcgggacagcaccaaggaagacaacgtggcccccttacgcttccacctcaaatacgaggctgacgtcctcttcaccaggagcagcagcctgagccactacgaggtcaagctcaacagctcgctggagagatacgatggtatcgggcctcccttcagctgcatcttcaggatccagaacttgggcttgttccccatccacgggatgatgatgaagatcaccattcccatcgccaccaggagcggcaaccgcctactgaagctgagggacttcctcacggacgaggtagcgaacacgtcctgtaacatctggggcaatagcactgagtaccggcccaccccagtggaggaagacttgcgtcgtgctccacagctgaatcacagcaactctgatgtcgtctccatcaactgcaatatacggctggtccccaaccaggaaatcaatttccatctactggggaacctgtggttgaggtccctaaaagcactcaagtacaaatccatgaaaatcatggtcaacgcagccttgcagaggcagttccacagccccttcatcttccgtgaggaggatcccagccgccagatcgtgtttgagatctccaagcaagaggactggcaggtccccatctggatcattgtaggcagcaccctggggggcctcctactgctggccctgctggtcctggcactgtggaagctcggcttctttagaagtgccaggcgcaggagggagcctggtctggaccccacccccaaagtgctggagtgaggctccagaggagactttgagttgatgggggccaggacaccagtccaggtagtgttgagacccaggcctgtggccccaccgagctggagcggagaggaagccagctggctttgcacttgacctcatctcccgagcaatggcgcctgcttccctccagaatggaactcaagctggttttaagtggaactgccctactgggagactgggacaccttttaacacagacccttagggattttaaagggacacccctacacacacccaggcccacgccaaggcctccctcaggctctgtggagggcatttgctgccccagctactaaggtgctag

SEQ ID NO: 127075 - DNA, 524 bp, Homo sapiens
atgcagatggggacaaagtcctttcttgagcaggttaatggcaaaatagaaggattttgccaggtgggcaaaatagaagagttttgtaacgtgggcaaaatagaaggattttgtcagatcgtgtttgagatctccaagcaagaggactggcaggtccccatctggatcattgtaggcagcaccctggggggcctcctactgctggccctgctggtcctggcactgtggaaggtacctcatgggaagcatgtggatgacacaatccctggggctgtgcattcccacgtcttcttgctgcagcctgcccctagacatggacgcaccggcctggctgcagctgggcagcaggggtaggggtagggagcctcccctccctgtatcaccccctccctacacacacacacacacacacacacacacacactgcctcccatccttccctcatgcccgccagtgcacagggaagggcttggccagcgctgttgaggggtcccctctggaatgcactgaataaagcctcgtgc

SEQ ID NO: 127076 - DNA, 371 bp, Homo sapiens
  misc_feature (1)...(371): n = a,t,c or g
gagaacgtgggggtggccatcctggtaaggttctttgtgaacttcccctcggccaagcagtacttcagccagttcaagcacatggaggatcccctggagatggagcggagcccccagttgcggaagcacgcctgccgagtcatgggggccctcaaccctgtcgtggagaacctgcatgaccccgacaaggtgtcctctgtgctcgcccttgtggggaaagcccacgccctcaagcacaaggtggaaccggtgtacttcaagatcctctctggggtcattcttggaggttggttcgccgaaggaattttgcccagtgactttcccaacttgagacgcanagagccttggggccaaggttgtgttgggcttca

SEQ ID NO: 127077 - DNA, 1241 bp, Homo sapiens
atggagcaggcggcaggtcccaggaagagaaaggagagaggaagtggagagcccgggaaagaagcagagtttgagtggctgcccttcggctctgtggccgctgtgcagtgccaggctggcaggggagcctctctgctctgcgtgaagcagcctgagggaggtgtgggctggtcacgggctgggcccctgtgcctggggactggctgcagccctgacaacgggggctgcgaacacgaatgtgtggaggaggtggatggtcacgtgtcctgccgctgcactgagggcttccggctggcagcagacgggcgcagttgcgaggacccctgtgcccaggctccgtgcgagcagcagtgtgagcccggtgggccacaaggctacagctgccactgtcgcctgggtttccggccagcggaggatgatccgcaccgctgtgtggacacagatgagtgccagattgccggtgtgtgccagcagatgtgtgtcaactacgttggtggcttcgagtgttattgtagcgagggacatgagctggaggctgatggcatcagctgcagccctgcaggggccatgggtgcccaggcttcccaggacctcggagatgagttgctggatgacggggaggatgaggaagatgaagacgaggcctggaaggccttcaacgctcccacagcagccccaacagccctgggggaggctggtcttgccgagcacagccagagggatgaccggtggctgctggtggcactcctggtgccaacgtgtgtctttttggtggtcctgcttgcactgggcatcgtgtactgcacccgctgtggcccccatgcacccaacaagcgcatcactgactgctatcgctgggtcatcccatgctgggaagcaaagagccccaacagaaacccatgccccccaggggcagtcctgcacaggggttgcagaccttcagaaccagcgtgtgatggggtgcagacccccctcatggagtatggggcgctggacacatggccggggctgtcaccagggacccatgggggcttgcccagctggacagatggctttcctgctccccaggcccatccagggttcctctctcaaccacttagactttggctcttcaggaactcttgctttcctgggcccagcgcttcgttgaccaaggattacaccaaagccctttaagacctcaggggggcgggtgctggggtcttctccaataaatggggtgtcaaccttaaaaaaaaaaa

SEQ ID NO: 127078 - DNA, 326 bp, Homo sapiens
gcccctaccagtgccgacctgtcactatgcactcagctcccagcacgcaggcccagccccagtgtggccccggtgaccctgggcagacactcccagaatggagacctcgaggcttcgcctttgaccctctcaccatagccagaagttttggcaaaaactgcccacagagggacgcgcgggcggccatgcgccccttcgacccctccgctctgctgcccacctgctgggattactggacctatgtgggctcgctcaccaccccgccgctgaccgagtcggtcacctggatcatccataaggagcccgttgaagtggccccaagccaa

SEQ ID NO: 127079 - DNA, 494 bp, Homo sapiens
tccagtgggggaattccaaagaagaccctgactctttttgttttttggctgtgagtgtattcaatgcaaaataatcctctctgattttactgaggtagctggccatgtccacgaccaaatctgcctttaaactggaattcggttgctgacccagcccgagcctcggctatcttgtcggcaccaggggcacagcactccgtctgtaggacgcgcgggcggccatgcgccccttcgacccctccactctgctgcccacctgctgggattactggacctacgcgggctcgctcaccaccccgccgctgaccgagtcggtcacctggatcatccagaaggagcccgttgaagtggccccaagccagctctctgcatttcgtactctcctgttttctgcacttggtgaagaggagaagatgatggtgaacaactatcgcccacttcaacccttgatgaaccggaaggtctgggcgtccttccaggccactaatgagggc

SEQ ID NO: 127080 - DNA, 1084 bp, Homo sapiens
agacagcagggaacatcaccctcttcagactggagtcagtgggaacagacccaagatgttggggaggaacacttggaagacctcagctttctccttcttggttgagcagatgtgggcccctctctggagtcgttcgatgaggccagggcgatggtgttctcagcgttcctgtgcatggcaaaccagcaataacactttgcacccactctggacggtcccggtctccgtgccagggggcacccggcagtctcctattaacatccagtggagggacagcgtctatgacccccagctgaagccactcagggtctcctatgaagcggcatcctgcctgtacatctggaacactggctacctcttccaggtggaatttgacgatgccaccgaggcatcaggaattagtggtgggcccttggaaaaccactacagactgaagcaatttcacttccactggggagcagtgaacgaggggggctcagagcacacagtggacggccacgcgtaccccgcagagctgcatttagttcactggaattctgtgaaataccaaaattacaaggaagctgtcgtgggagagaatggtttggctgtgataggcgtgtttttaaagctcggggcccatcatcagacgctgcagaggctggtggacatcttgccggaaataaaacataaggagcgcgcgggcggccatgcgccccttcgacccctccactctgctgcccacctgctgggattactggacctacgcgggctcgctcaccaccccgccgctgaccgagtcggtcacctggatcatccagaaggagcccgttgaagtggccccaagccagctctctgcatttcgtactctcctgttttctgcacttggtgaagaggagaagatgatggtgaacaactatcgcccacttcaacccttgatgaaccggaaggtctgggcgtccttccaggccactaatgagggcacaaggtcctagagacattaggtccacatgaatagcagaactgactttgaaggaaggaagcgttgtttcccaagtttcacaatgtgattgtacatgacttctgaaattaaaaagagagcatg

SEQ ID NO: 127081 - DNA, 1236 bp, Homo sapiens
atgcccagcctggtggaaatattttataatgtaaactgtctcagtccttacgagttggtggagctggactgcctcacttccatccccaaggtcaggcgctgggctggcggggggcagagtgaatgggacagacagagcccacctttcacggagcccacctttggcttgtcacttcaaccatacagcaaccccttgcgagtgaactcatataaccctaatgtagacaatgcctcaggaattagtggcgggcccttggaaaaccactacagactgaagcaatttcacttccactggggagcagtgaatgaggggggctcagagcacacagtggacggccacgtgtaccccgcagagctcggggcccatcatcagatgctgcagaggctggtggacatcttgctggaagtaaaacataagctctccacacgcttccctgcatccagcgcccagctctccacacgcttccctgcatccagcgcccagctctccatacgcttccctgcatccagcacagctcgaaaagatgacggggacaagagtgtcgcctttctccaagatcagctgagaaaaggctttgagggagaaggagaaattccaaagaaatgtagtttatttattcagcagcaaacaaaagaattccagggcagaaggagtcaacgcaagcctcagatgtgcggaaggatgaggcttcaacctgtgttaacaatggtgcgggctggtccagatggagctggggcaagcccttcctcgcggttcaaggagccgtttgatctccagaagttttggcaaaaactgcccacagagggtccccaccctccatgcctggacaagctgcaagctcctcaggctgctggggccccccctcctccctgccttcgcaagagtcagggctaccggggaattggctgccttgtggagctggaaacagcccaccaggacgcgcaggcggccatgcgccccttcgacccctccgctctgctgcccacctgctgggattactggacctatgtgggctcgctcaccaccccgccgctgaccgagtcggtcacctggatcatccagaaggagcccgttgaagtggccccaagccaactctctgcatttcgtactctcctgttttctgcacttggtgaagagaagaagatgatggtgaacaactatcgcccacttcaacccctgatgaactggaaggtctgggcgtccttccaggccactaatgagggcacaagatcctag

SEQ ID NO: 127082 - DNA, 1503 bp, Homo sapiens
ctagccagttttcccagcaccatttgttaaatagggaatcctttccccatttcttgtttttctcaggtttgttaaagatcgatagttgtagatatgcaacattatttctgagggctctgttgtgttccattgatctatatctctgttttggtaccagtaccatgctgttttggttactgtagccttgtagtatagtttgaagtcaggtagcatgatgcctccagctttgttcttttggcttaggattgacttggcgatgcgggcacttttttggttccatataaactttaaagtagttttttccaattctgtgaagaaagtcattggtagcttgatggggatggcattgaatctataaattaccttgggcagtatggccattttcacgatattgattcttcctacccatgagcatggaatgtttttccatttgtttatatcctcttttatttcattgagcagtgctttgtagttctccttgaagaggtccttcacatcccttgtaagttggattcctaggtattttattctctttgaagcaattgtgaatgggagttcactcaggatttggctctctgtttgtctgttattggtgtataagaatgcttgtgatttttgcacattgattttgtatccagagactttgctaaaggtgcttataagcctaaggagattttgggctgagacgatggggttttctaggtatacaatcatgtcatctgcaaacagggacaatttgacttcctcttttcctaattgaataccctttatttctttctcctgcctaattgccctggccagaacttccaacactatgttgaataagagtggtgagagagggcatccctctcttgtgccagttttcatagggaatgcttccagtttttgcccagtcagtatgatattggctgtgggtttgtcataaatagctcttattattttgagatatgtcccatcaatacctaatttattgagagtttttagcatgaagggctgttgaattttgccaaaggtcttttctgcatctattgagataattatatggcttttgtcgttggttctgtttatatgttgaccattgtggataagctttttgatgtgctgctggattcggtttgccagtattttattgaggatttttgcatcgatgttcatcagggatattggtctaaaattctctttttttgttgtgtctctgccaggctttggtatcaggatgatgctggcctcataaaatgagttagggaggattccctctttttctgttgattggaatagttttacaaggaatggtaccagttcctccttgtacctctggtagaattcggctgtgattccatctggtcctggactctttttggttggtaagctattaattattgcctcaatttcagagcctgttattggtctattcagagattcaccttcctcctggtttagtctgtctcctcctctctgtgctgactgtttcagttcagaagcacacttttcttcacctggcat

SEQ ID NO: 127083 - DNA, 1710 bp, Homo sapiens; identical to SEQ ID NO: 124203

SEQ ID NO: 127084 - DNA, 1698 bp, Homo sapiens; identical to SEQ ID NO: 121178

SEQ ID NO: 127085 - DNA, 1578 bp, Homo sapiens
tcatctggagctttcttctctcagctcatcaaagtcattctccatccagctttgttccgttgctggtgaggaacagcgttcctttggaggaggagaggcactctgctttttagagtttccagtttctctgctctgttttttccccatctttgtggttttatctacttttggtctgttgtttcctgactttttaatgattgccattctaactggtgtgagatggtatctcattgtggttttgatttgcatttctctgatggccagtgatgatgagcattttttcatgtgttttttggctgcataaatgtcttcttttgagaagtgtctgttgatgtccttcacccactttttgatggggttgtttgtttttttcttgtaaatttgtttgagttcattgtagattctggatattagccctttgtcagatgagtaggttgcgaaaattttctcccattttgtatgttgcctgttcactctgatggtagtttcttttgctgtgcagaagctctttagtttaattagatcccatttgtcaattttgtcttttgttgcaattgattttggtgttttagacatgaagtccttgcccatgcctatgtcctgaatggtaatgcctaggttttcttctagggtttttatagttttaggtctaacgtttaagtctttaatccatcttgaattgatttttgtgtaaggtgtaaggaagggatccagtttcagctttctacatatggctagccagttttcccagcaccatttattaaatagggaatcctttccccattgcttgtttttctcaggtttctcaaagatcagatagttgtagatatgcggcattatttctgagggctctgttatgttccattgatctatatctctgttttggtaccagtaccatgctgttttggtgactgtagccttgtagtatagtttgaagtcaggtagtgtgatgcctccaactttgttcttttggcttaggattgacttggcgatgcaggctcttttttggttccatatgaactttaaagtagttttttccaattctgtgaagaaagtcattggtagcttgatggggatggcattgaatctataaattaccttgggcagtatggccattttcacgatattgattcttcctacccatgagcatggaatgttcttccatttgtttgtatcctcttttatttcattgagcactggtttgtaattctccttgaagaggtccttcacgtcccttgtaagttggattcctaagtattttattctctttgaagcaattgtgaatggcagttcactcatgatttggctctctgtttgtctgttattggtgtataagaatgcttgtgatttttgtacattgattttgtatcctgagactttgctgaagttgcttatcagcagttcctccttgtacctctggtagaattcggctgtgaatccatctggtcctggactctttttggttgttaagctattgattattgccacaatttcagctcctgttattggtctattcagagattcaatttcttcctggtttagacttgggagagtgtatgtgttgaggaatttatccat

SEQ ID NO: 127086 - DNA, 1281 bp, Homo sapiens; identical to SEQ ID NO: 119783

SEQ ID NO: 127087 - DNA, 1527 bp, Homo sapiens
tcaaagatcagatggttgtagatgtgtggtgttatttctgagggctctgttctgttccattggtctatctctctgttttggtaccagcaccatgctgttttggttactgtagccttgtagtatagtttgaagtagtgtgttgcctccagctttgttcttcttgcttaggattgttttggcaatgcaggctcttttttggttccatatgaactttaaagtagttttttccaattctgtgaagaaagtcattggtagcttgatggggatggcattgaatctataaattaccttgggcagtatggccattttcacgatattgattcttcctatccatgagcatggaatgttcttccatttgtttgtgtcctcttttatttcgttgagcagtagtttgtagttctccttgaagaggttctttacatcccttgtaagttggattcctcggtgttttattctctttgtagcaattgtgaatgggagtttgctcatgatttgggtctctgtttgtctgttattggtgtataggaatgcctgtgatttttgcacattgattttgtatcctgagacattactgaagttgcttatctgcttaaggagattttgggctgagatgatggggttttctaaatatacaatcatatcatctgccaacagggacaatttaacttcctcttttcctaatggaatactctttatttctttctcttgtctgatggccctggccagaacttccaacactgttagttgatgcagtttcttcctagcattgatggtctttacagtttggcatgtttttgcagtggctggtacccgttgttcctttccatgtttagtgcttccttcaggagctcttctgaagtctacttgtgtcagctcgtcaaagtcattctctgtccagctttgttctgttgctggcgaggagctgtgatcctttggaggagaagaggtgctctggtttttaggattttcagcttttctgctctggtttctccccatctttgtggttttatctacctttggtcttgaggtaccaggcttgcgtggaggggctgctgtgccttgcatggccatgcagggactcaggccctctccagcgtgtggtttgcaaggttgccctggcccttgctgcttagctggatgggaccggatcacagcgctgagaagcactggggctgaagccttgattggggctgaaggatctacagctgttgatagtttaggccttttgcctgcaaccagctctctgttcctgtccacatgaacttcttgtgctgcttggatgtcctttggtgtggcatctggcctcctccatcctgctgactttatcattttctcacgctgaatcacgatttgtaaattgaggaaggaagcacggataagtagggatggtgccacactacctctcaggctgggcgctcgggggtcttggctcccaactctctgatgattctttggctgtgtccttctgagcaacatttgtttctctacaggatgaatgttgtcggtgttagcgctgagaaccagagt

SEQ ID NO: 127088 - DNA, 1482 bp, Homo sapiens
ttatgttttctttaagtttgaatggtgccttccaattgtcacttgccgtaacaccgagccagcaaataagagcagattgtcagcacgcaaatacatgtgatctgcccactctgactctttttccccctccaccctgagtgaaagcttcctaaagccatcatgagaagcagctgctggcaccatacttcttgtacagcctgtattgcagcaataaggttcctgtgtgcccagcttcctgtttgattcctgttctccagtggggagccattgcatgggcattactttagtctcatggcggtagttaggtggaagaagagctggggaattcactctttctttgggcagtaacgtgtcctgctgacattctgttaagacgggcaccacgacagatactttcaattcgatatatgggagttgataagtgtctggcacagatgcttcaattgagttgggaatgtatccctgatgtacaaattctgcaactgcaccgggcttctctggagccttccctctccaacatgctgttttggttactgtagccttgtagtatagtttgaagtcaggtagcgtgatgcctccaactttgttcttttggcttaggattgatttggcgatgcgggctcttttttcgttccatatgaactttaaagtagttttttccaattctgtgaagaaagtcattggtagcttgatggggatggcattgaatctataaattaccttgggcagtatggccatttccacgatattgattcttcctacccatgagcatggaatgttcttccatgtgtttgtatcctcttttatttcattgagcagtggtttgtagttctccttgaagaggtccttcacatcccttgtaagttggattcctaggtattttattctctttgaagcaattgtgaatgggagttcactcatgatttggctctctgtttgtctgttgttggtgtgtaagaatgcttgtgatttttgtacattgattttgtatcctgagactttgctgaagttgtttatcagcttaaggagattttgggctgagacaatggggttttctagatatacaatcatgtcatctgcaaacagggacaatttgacttcctcttttcctaattgaataccctttatttcctcctgcctaattgccctggccagaacttccaacactatgttgaataggagtggtgagagagggcatccctgtcttgtgccagttttcaaagggaatgcttccagttttttcccattcagtatgatattggctgtgggtttgtcatagatagctcttattattttgagatacatcccatcaatacctagtttattgagagtttttagcgtgaagggttgttgaattttgtcaaaggccttttctgcatctattgagaaaatcatatggtttttgtctttggttctgtttatatgctggattacatttattgaaccagccttgcatcccagggatgaagcccacttgatcat

SEQ ID NO: 127089 - DNA, 1869 bp, Homo sapiens
tcaccagcacctgttgtttcctgactttttaatgatcgccattcttactggtatgagatggtatctcattgtggttttgatttgcatttctctgagggccagtgatgatgagcattttttcatgtgtctgttggctgcataaatgtcttcttttgagaaatatctgttcatatccttcgcccactttttgatggggttgtttgattttttcttgtaaatttgtttaagttctttgtagattctggatatgagccctttgtcagatgggtagattgcaaaaatgttctcccattctgtaggttgcctgttcactctgatggtagtttcttttgctgtgcagaagctctttagtttaattagatcccatttgtcaattttggcttttgttgccattgcttttggtgttttagttatgaagtccttgcccatgcctatgtcctgaatggtatcgcctaggttttcttctagggtttttatggttttaggtctaatatttaagtctttaatccatcttgaattaatttttgtataacgtgtaaggaagggatccagtttcagctttctacatatggctagccagttttcccagcaccgtttattaaataggtaatcctttcccaatgtcttgtttttgtccagtttgtcaaagatcaggtggttgtagatgtgtggtattatttctgagggctctgttctgttccattggtctatatctctgttttggtaccagtgccatgctgttttggttactgtagccttgtagtatagtttaaagtcaggtagtgtgatgcctccagctttgttctttttgcttaggattgtcttggcaatgtgggctcttttttggttccatatgaactttaaagtagttttttccaattctgtgaagaaagtcattggtagcttgatggggatggcattgaatctataaattaccttgggcagtatggccattttcatgatattgactctccctatccataagcttggaatgttcttccatttgtttgtgtcctcttttattttgttgagcactggtttgtagttctccttgaagaggtccttcacatcccttgtaagttggattcctaggtattttattctctttgaagcaattgtgaatgagactgcactcatgatttggctctctgcttgtctgttattggtgtataagaatgcttgtgatttttgcacattgattttgtatcctgagactttgctgaagttgcttatcagtttaaggagatttttggctgagacgatgggattttctaaatatacaatcatgtcatctagcttattgagagtttttagcataaatggctgttgaattttgttgaaggccttttctgcatctattgagatactcctgtggtttttgtctttggttctgtttatatgctggattacgtttattgatttgcatatgttgaaccagccttgcatcccagggatgaagccaacttgattgtggtggataagctttttgatgtgctgctggatttggtttgccagtaatttattgaggatttttgcattgacgttcatcagggatattggtctaaaattctctttttttgttgtgtctctgccaggctttggtatcaggatgatgttggcctcataaaataagttagggaagattccctctttttctattgattggaaaagtttcagaaggaatggtaccagctcttctttgtacctctggtagaattcggctgtgaatccgtctggtcctggactttttttggttgataggctattaattattgcctcaatttcggagcctgttattgttctattcagagattcaacttcttcctggtttagtcttgggagggtgtatttgtccaggaatttatccat

SEQ ID NO: 127090 - DNA, 1638 bp, Homo sapiens
atggataaattcctcgacacatacaccctcccaagactaaagcaggaagaagttgaatctctgaatagaccaataacaggctctgaaattgtggcaataatcaataacttaccaaccaaaaagagtccaggaccagatggattcacagccgaattctaccagaggtacaaggaggagctggtaccattccttctgaaactattccaatcaatagaaaaagagggaatcctccctaactcattttatgaggccagcatcattctgataccaaagccgggcagagacacaaccaaaaaagagaattttagaccaatatccttgatgaacattgatgcaaaaatcctcaataaaatactggcaaagcgaatccagcagcacatgaaaaagcttatccaccatgatcaagtgggcttcatccctgggatgcaaggctggttcaatatacgcaaatcaataaatgtaatccagcatataaacagaaccaaagacaaaagccacgtgattatctcaatagatgcagaaaaggcctttgacaaaattcaacaacccttcatgctaaaaactctcaataaattagctgataagcaacttcagcaaagtctcaggatacaaaatcaatgtaccaaaatcacaagcattcttatacaccaaaaacagacaaacagccaaatcatgagtgaactcccattcacaattgcttcaaagagaataacatacctaggaatccaacttacaagggatgtgaaggacctcttcaaggagaactaccaaccactgctcaatgaaataaaagaggatacaaacaaatggaagaacattccatgctcatggataggaagaatcaatatcgtgaaaatggccatactgcccaaggtaatttatagattcaatgccatccccatcaagctaccaatgactttcttcacagaattggaaaaaactactttaaagttcatatggaaccaaaaaagagcccgcattgccaagtcaatcctaagccaaaagaacaaagctggaggcatcatgctacctgacttcaaactatactacaaggctacagtaaccaaaacagcatggtactggtaccaaaacagacatatagatcagtggaacagaacagagccctcagaaataatgccgcatatctacaactatctgatctttgacaaacctgagaaaaacgagcaatggggaaaggattccctttttaataaatggtgctgggaaaactggctagccatatgtagaaagctgaaactggatcccttctttacaccttttacaaaaattaattcaagatggattaaagacttaaatgttagacctaaaaccataaaaaccctggaagaaaacctaggcattaccattcaggacataggcatgggcaaggacttcatgtctaaaacaccaaaagcaatggcaacaaaagccaaaattgacaaatgggatctaattaaactaaagagcttctgcacagcaaaagaaactaccgtcagaatgaacaggcaacctacagaatgggagaaaattttcgcaacctactcatctttcaaagggctaatatccagaatctacaatgaactcaaacaaatttacaagaaaaaaacaaccccatcaaaaagtgggcaaagaatatga

SEQ ID NO: 127091 - DNA, 1836 bp, Homo sapiens; identical to SEQ ID NO: 116396

SEQ ID NO: 127092 - DNA, 1587 bp, Homo sapiens
atgggagactttaacaccccactgtcaacattagacagatcaatgaggcagaaagttaacaaggatacccaggaattgaactcagctctgcaccaagtggacctaatagacatctacagaactctccattgcaaatcaacagaatatacatttttttcagcaccacaccacacctattccaaaattgaccacataggtggaagtaaatctctcctcagcaaatgtaaaagaacagaaattataacaaactgtctctcagaccacagtgaaatcaaactagaactcaggattaagaaactcactcaaaaccactcaactacatggaaactgaacaacctgctcctgaatgactactgggtacataacgaaatgacggcagaaataaagatgttccttgaaaccaacaagaacaaagacacaacataccagaatctctgggacacgttcaaagcagtgtgtagagggaaatttatagcactaaatgcccacaagagaaagcaggaaagatccaaaattgacaccctaacatcacaattaaaagaactagaaaagcaagagcaaacacattcaaaacctagcagaaggcaagaaataaaaatacaaactaccatcagagaatactacaaacacctctacacaaataaactagaaaatctagaagaaatgaataaattcctcgacacatacaccctcccaagactaaaccaggaagaagttgaatctctgaatagaacaataacaggctctgaaattgtggcaataatcaatagcttaccaaccaaaaagagtccaggaccagatggattcacagccgaattctaccagaggtacaaggaggaactggaaaaccccatcgtctcagtccaaaatctccttaagctgataagcaacttcagcaaagtctcaggatacaaaatcaatgtacaaaaatcacaagcattcttatacaccaacaacagacaaacagagagccaaatcatgagtgacctcccagtcacaattgcttcaaagagaataaaatacctaggaatccaacttacaagggacgtgaaggacctcttcaaggagaactacaaatcactgctcaatgaaataaaagaggacacaaagaaatggaacaacattccctgctcatgggtaggaagaatcaacatcgtgaaaatggccatactgcccaaggtaatttatagattcaatgccatccccatcaagctaccaatgactttcttcacagaattggaaaaaactactttaaagttcatatggaaccaaaaaagagcctgcatcgccaagtcaatcctaagccaaaagaacaaagctggacgcatcacgctacctgacttcaaactatactatgaggctacagtaaccaaaacagcatgggacatggatgaagctggaaaccatcattctcagcaaactattgcaaggacgaaaaaccaaacaccgcatgttctcactcatagatgggaattgaacaatgagaacacatggacacaggaaggggaacatcatacactggggcctgttgtggggtgtggggagtggggagggatagcattaggagatatacctaatgttaattga

SEQ ID NO: 127093 - DNA, 1851 bp, Homo sapiens; identical to SEQ ID NO: 116091

SEQ ID NO: 127094 - DNA, 1632 bp, Homo sapiens
atgaatgaaatgaagcaagaagagaagtttagagaaaaaagagtaaaaagaaacgaacaaagcctccaagaaatatgggactatgtgaaaagaccaaatctacgtctgattggtgtacctgaaagtgacagggagaaaggaaccaagttggaaaacactctgcaggatattatccaggagaacttccccaacctagcaaggcagaccaacattcaaattcaagaaatacagagaatgccacaaagatactcctcgagaagaccaaatccaagacacataattgtcagattcaccaaatttgaaatgaaggaaaaaatattaagggcagccagagagaaaggtcgggttacccacaaagggaagcccatcagactaacagcggatctcttggcagaaactctacaagccagaagagtgttggaagttctggccagggcaatcaggcaggagaaagaaataaagagtattcagttaggaaaagaggaagtcaaattgtccctgtttgcagacgacatgattgtatatttagaaaaccccattgtctcagcccaaaatctccttaagctgataaacaacttcagcaaagtctcaggatacaaaatcaatgtacaaaaatcacaagcattcttatacaccaataacagacaaacagagagccaaatcatgagtgaactcccattcacaattgcttcaaagaggataaaatacctaggaatccaacttacaagggatgtgaaggacctcttcaaggagaactacaaaccactgctcaaccaaataaaagaggacacaaacaaatggaagaacattccatgctcatggataagaagaatcaatattgtgaaaatggccatactgcccaaggtaatttatagattcaatgccatccccatcaagctaccaatgactttcttcacagaattggaaaaaactactttaaagttcatctggaaccaaagaagagccctcattgataagacaatactaagccaaaagaacaaagctggaggcatcacgctacctgacttcaaactatactacaaggctacagtaaccaaaacagcatggtactggtaccaaaacagagatatagaccaatggaacagaacagagccctcaggaataatgccgcatatctacaaccatctgatctttgacatacctgacaaaaacaagaaatggggaaaggattccctatttaataaatggtgctgggaaaactggctagccatatgtagaaagctgaaactggatcccttccttacatcttatataaaaattaatgcaagatggattaaagacttaaatgttagacctaaaaccataaaaaccttagaagaaaacctaggcaataccactcaggacatacgcgtgggcaaggacttcatgtctaaaacaccaaaagcaatggcaactaaagccaaaattgacaaatgggatctaattaaactaaagagcttctgcagagtaaaagaaactaccatcagagtgaacaggcaacctacaacatgggagaaaatttttgcaatctacccatctgacaaagggctaatatccagaatctacaaagaatttaaacaaatttacaagaagaatcaaacaaccccatcagaaagtgggcaaaggatatga

SEQ ID NO: 127095 - DNA, 2623 bp, Homo sapiens
tcacaacagggcagactcttgcaactttcgggggctggcagcctctgcatcccactctggacagaccaccattgtctgggttggtgggcctgctgaacgtggcttccagggccctctggtcagcgccagatctgggcgcagctgctgagtgcacacagctgctaggtttggggcaaggagatcaggaatggattcagggttgggtgtgtcgttggaggcatccgcatagagctgttggagcttagaggccccctggactgaagcatacacgtgggactcgtagtacagagatatgtactgaagctgaaggacttgtgaggtttgtgtgcatgtgtctttatagcagcatgatttatattcctttgggtatatacccagtaatgggatggctgggtcaaatagtatttctagttctagatccctgaggaattgccacactgtcttccacactggttgaactggtttacagtcccaccaacagtgtaaaagtgttcctatttctccacatcctctccagcacctgttgtttcctgactttttaatgattgccattctaattagtgtgagatagtatctcattgtggttttgatttgcatttctctgatggccagtgatgatgagcattttttcatgtgtctgttggctgcataaatgtcttcttttgagaagtgtctgttcatatccttcacccactttttgatggggttgtttgtttttttcttgtaaatttgtttgagttctttgtagattctggatattagccctttgtcagatgagtagattgcaaaaattttcttccattctgtaggttgcgtgttcactctgatggtagtttcttttgctgtgcagaagctctttagtttaattagatcccatttgtcaattttggcttttgttgccattgcttttggtgttttagtcatgaagtccttgcccatgcctatgtcctgaatggtattgcctaggttttcttctagggtttttatggttttaggtctaacatttaagcctttaatccatcttgaattaatttttgtgtaaggtgtaaattttgtataaggatccagtttcagctttccacatatggctagccagttttcccagcaccatttgttaaatagggaatcctttccccatttcttgtttttgtcaggtttgtcaaagatcagatagttgtagatgtgtggtattatttctgagggctctgttctgttccattggtctgaatctctgttttggtaccagtaccatgctgttttggttactgtagccttgtagtatagtttgaagtcaggtagcatgatgcctccaattttgttcttttgggttaggattgacatggcaatgcgggctcttttttggttccatgtgaactttaaagtagttttttccaattctgtgaagaaagtcattggtagcttgatggggatggcattgaatctataaattaccttgggcagtatggccattttcatgatattgattcttcctacccatgagcatggaatgttcttccatttctttgtatcctcttttattttgttgagcagtggtttatagttctccttgaagaggtccttcatatcccttgtaagttggattcctaggtattttattctctttgaagcaattgtgaatgggagttcactcatgatttggctctctgtttgtctgttattggtgtataagaatgcttgtgatttctgcacattgattttgtatcctgagactttgctgaagttgcttatcagcttaaggagattttgggctgagacgatggggttttctagatatacaatcatgtcttctgcaaacaggaacaatttgacttcctcttttcctaattgaataccctttatttccttgtcctgcctaattgccttggccagaaattccaacacattttttattgtgtctatttgattcttctctctcttcttctttattagtcttgctagctgtctatcaattttgttgatcttttcaaaaaaccagtccctggattcattgattttttgaagagttttttgtgtctctatctccttcagttctgctctgatcttagttatttcttgccttctgctagcttttgaatgcgattgctcttgcttttctagttcttttaattgtgacgttagggtgtcaattttagatctttcctgctttctcttgtgtgcatttagtgctatatatttccctctacacactgctttaaatgtgtcccagagattctggtatgttgtgtctttgttctcattggtttcaaagagcatctttatttctgccttcatttcgttatgtacccagtagtcattcaggagcaggttgttcagtttccatgtagttgagaggttttgagtgagtttcttaatcctcagttctagtttgattgcactgtggtctgagagacagtttgttataatttctgttcttttacatttgctgaggagtgctttacttccaactatgtggtcaattttggaataagtgtgatgtggtgctgagaagagtgtatattctgttgatttggggtggagagttctgtagttgtctgttaggtctgcttgatgctgagctgagttcaattcctggatatctttgttaactttctgtcttgttgat

SEQ ID NO: 127096 - DNA, 6128 bp, Homo sapiens
ttaagaatatttggggctgagactgtagggttttccagctagaggattatgccatctgcaaacagggacagtttcagctcctctcttgctatttggatgcctatttttttctttctcttgcctgatttccctggccaggacttccaatgctatgttgaatagcagtggtgagagaaggcatccttgtcttttgcgggtttttaacgagaatgcttccagcttttgcccattcagtatgatgttggctatggggttgtcatagttggctcttattattttgtggtatgttccttcaattactagtttcttgagagtttttaaaatgaatggatgttgaattttatcaaacgtcttttctgcatctattgaaataatcatatgctttttttctttagttctgtttatgtgatgaatcacatttattgatttgcatatgttgaaccaactttgcatcccagagaaaaagcccactacatcgtgttggataagtctttttatgtgctgctggattcgatttctcagtatttcattgaggatttttggattgctgttcatcaaagatattggactgaaattatctttctttgttgtatctcttccaggttttggtatcaagatgatgctgtcctcacagttagttaaggaggagttcttcctcttcaactcaatattttggaatagtttcagaaggaaaagtaccagctcttctttgtacatctggtagaattctgctgtgaatccatctggtctgagcttcttttggttggtaggtgtggttttgatttgcatttctctgatggccattgatggtgagcattttttcatgtgtttttttggctgcataaaatgtcttcttttgagaagggtctgttcatgtcctttgcccactttttgatggggttgtttgtttttttcttgtaaatttgtttgagttcattgtagattctgcatattagccctttgtcagatgagtaggttgagaaaattttctcccattttgtaggttgcctcttcactctgatggtagtttcttttgctgtgcagaagctctttagtttaattagatcccatttgtcaattttggcttctgttgccattgcttttgttcccatttcttttggtgttttagacatgaagtccttgcccatgcctatgtccctgaatggtaatgcctaggttttcttctagggtttttatggttttaggtctaacgtttaagtctttaatccatcttgaattagtttttgtataaggtgtaaggaagggatccagtttcagctttctacatatggctagccagttttcccagcaccatttattaaatagggaatcatcctttccccattgcttgtttttgtcaggtttgtcaaagatcagatagttgtagatatgtggcgttatttctgagggctgtgttctgttccactggtctatatctctgttttggtaccagtaccatgctgttttggtaccagtacagtcccatgctgttttgattactgtaagccttgtagtatagtttgaagtcaggtagccacgatgcctccagctttgttcttttggcttaggattgacttggcaatgtgggctctttttttggttccatatgaacttgaaagtagtttttttccaattctgtgaagaaagtcattggtagcttgatggggatggcattgaatctgtaaattaccttgggcagtatggccattttcacgagattgattcttcctcctacccatgagcatggaatgttcttccatttgtttgtatcctcttttatttcattgagcagtggtttgtagttctccttgaactcctttgaagaggtccttcacatcccttgtaagttggattcctaggtattttattctctttgaagcagttgtgaatgggagttcactcatgatttggctctcttgtttgtctgtgttattggtgtataagaatgcttgtgatttttgtacattgactttgtatcctgagactttgctgaagtttgctatcagcctaaggagactttgggccgagacgatgggggtttctaggatatacatcatgtcatctgcaaacaggggacagtttgacttcctcttttcctaattgaataccctttatttccttctcctgcctaattggccctggcccagaacctccaacactatgttgaataggagtggtgagagagggcatccctgtcttgtgccagttttcaaagggaatgcttccagtttttgcacatttagtatgatattgactgtgggtttgtcatagatagctcttattattgtgagatacttcccatcaatacctaatttattgagagtttgtagcaggaagtgatgttgaattttgtcaaaggccttttctgcatctattgagataatcatgtggtttttgtctttggctctgtttataccctggattacatttattgatttgcgtatattgaaccagacttgcatcccagggatgaagcccacttgatcatggtggataagctttttgatgtgctgctggattcggcttgccagtattttactgaggagttttgcatcaatgttcatcaaggatattggtctaaaattctctgtgctggtggtgtctctgcccggctttgggatcaggatgatgctggcctcataaaatgagttagtggaggattcccgctcccttctattgactggaatagtctcagaaggaatggtaccagttcctccttgtacctctggtagaattcggcagtgaatccatctggtcctggactgtgcatggtgtggtaagctattgattattgccacaatttcagctcctgttattggtctattcagagattcaacttcttcctggtttagtcttgggagagtgtatgtgtcaaggaatgtatccatttcttctagattttctagtttatttgcgtagaggtgtttgtagtattctctgatggtagtttgtatttctgtgggatcggtggtgatatcccctttatcattttttattgtgtctatttgattcttctctctttttttctttattagtcttgctagcggtctatcaattttgttgatcctttcaaaaaaccagctcctggattcattgattttttgaagggttttttgtgtctctatttccttcagttctgctctgattttagttatttcttgccttctgctagcttttgaatgtgtttgctcttgcttttctagttcttttaattgtgatgttagggtgtcaattttggatctttcctgctttctcttgtgggcatttagtgctataaatttccctctacacactgctttgaatgcgtcctagagattctggtatgttgtgtctttgttctcgttggtttcaaagaacatctttatttctgccttcatttcgttatgtacccagtagtcattcaggagcaggttgttcagtttccatgtagttgagcggctttgagtgagattcttaatcctgagttctagtttgattgcactgtggtctgagagatagtttgttataatttctgttcttttacatttgctgaggagagcttcacttccaagtatgtggtcaattttggaatagctgtggtgtggtgctgaaaaaaatgtatattctgttgatttggggtggagagttctgtagatgtctattaggtctgcttggtgcagagctgagttcaattcctgggtatccttgttgactttctgtctcgttgatctgtctaatgttgacagtggggtgttaaagtctcccattattaatgtgtgggagtctaagtctctttgtaggtcactcaggacttgctttatgaatctgggtgctcctgtattgggtgcatacatatttaggatagttagctcctcttgttgaattgatccctttaccatcatgtaatggccttctttgtctcttttgatctttgttggtttaaagtctgttttatcagagactaggattgcaacccctgcctttttttgttttccatttgcttggtagatcttcctccatccttttattttgagcctatgtgtgtctctgcacatgagatgggtttcctgaatacagcacactgatgggtcttgactctttatccaacttgccagtctgtgtcttttaattggagaatttagtccatttacatttaaagttaatattgttatgtgtgaatttgatcctgtcattatgatgttagctggtgattttgctcgttagttgatgcagtttcttcctagtctcgatggtctttacattttggcatgattttgcagtggctggtaccggttgttcctttccatgtttagcgcttccttcaggagctcttttagggcaggcctgctggtgacaaaatcggtcagcatttgcttgtctgtaaagtattttatttctccttcacttatgaagcttagtttggctggatatgaaattctgggttgaaaattcttttctttaagaatgttcaatattggcccccactctcttctggcttgtagggtttctgccgagagatccgctgttagtctgatgggcttccctttgagggtaactcgacctttctctctggctgcccttaacattttttccttcatttcaactttggtgaatctgacaattatgtgtcttggagttgctcttctcgaggagtatctttgtggcgttctctgtatttcctgaatctgaacgttggcctgccttgctagattggggaaagtctcctggataatatcctgcagagtgttttccaacttggttccattctccgcatcactttcaggtacaccaatcagacgtagatttggtcttttcacatagtcccatatttcttggaggctttgctcgtttctttttattcttttttctctaaacttcccttcttgcttcatttcattcatttcatcttccattgctgataccctttcttccagttgatcgcattggctcctgaggcttctgcattcttcacgtagttctcgagccttggttttcagctccatcagctcctttaagcacttctctgtattggttattctagttatacattcttctaaatttttttcaaagttttcaacttctttgcctttggtttgaatgtcctcccgtagctcagagtaatttgagcgtctgaagccttcttctctcagctcgtcaaaatcattctccatccagctttggtccgttgctggtgaggaactgcgttcctttggaggaggagaggtgctctgcgttttagagtttccagtttttctgttctgttttttccccatctttgtggttttatctacttttggtctttgatgatggtgatgtacagatgcgttttcggtgtggatgtcctttctgtttgttagttttccttctaacagacaggaccctcagctgcaggtctgttggaataccctgccgtgtgaggtgtcagtgtgcccctgctggggggtgcctcccagttaggctgctcgggggtcaggggtcagggacccacttgaggaggcagtctgcccgttctcagatctccagctgcgtgctgggagaaccactgctctcttcaaagctgtcagacagggacatttaagtctgcagaggttactgctgtctttttgtttgtctgtgccctgcccccagaggtggagcctacagaggcaggcaggcctccttgagctgtggtgggctgcacccagttcgagcttccccggctgctttgtttacctaagcaagcctgggcaatggcgggcgcccctcccccagccttgctgcggccttgcagtttgatctcagaccgctgtgctagcaatcagcgagattccgtgggcgtaggaccctccgaaggccaggtgtgggatatagtctcgtggtgcgccgttttttaagccggtctgaaaagcgcaatattcgggtgggagtgacccgattttccaggtgcgtccgtcacccctttctttgactcggaaagggaactccctgaccccttgcgcttcccaggtgaggcaatgcctcgccctgcttcggctccgcacggtgcgcgcacccactggcctgcgcccactgtctggcactccctagtgagatgaacccggtacctcagatggaaatgcagaaatcacccgtcttctgcgtcgctcacgctgggagctgtagaccggagg

SEQ ID NO: 127097 - DNA, 747 bp, Homo sapiens
ctccaaattatgttttcttatttcagtgaagaaaaaatgactgctgcccgcattagaaaatgccacaagtgtgggactggcctcatcaaatctgaaggctgcaaccgcatgtcttgccgctgtggtgcccagatgtgctacctctgtcgagtttctattaatggatatgaccatttctgccaacatccccgctcaccaggagccccttgccaggagtgttcaagatgctctctctggaccgatcccactttgggcagctcctaccgattcctcccgagagatctcgtgaacggcccttccagcctcccccatcggactatgctgctcattggctgcagcctcgggaatctcggccacgtgcctggctttcatgggggaggggagaggggtggccgccggaacctcgctgaggtgaccccgacttccctctgcagcagccacctgcccctgccaatctcaagacttgcgccccacgcccccgagggaccacctatcacagcgcagccctcccagttgcgtcatcagcagccaatcagcgcttgctctgctgccgacggcggggaggatgcgggggaacagggggctccggcctgcagtgccctggctgcccccgggacgccccgcgtgtcccaaattccgtcgccatcaccgccttcccagcgcacaatgactggacgccaggtccctccgctccaggctgcgccttactgctcctcccctcagtcttctcgcagctgctatccttag

SEQ ID NO: 127098 - DNA, 797 bp, Homo sapiens
gagaaggtgctcccccagaccatcctgtataagtactatgagcgaaaagccgaggaggaggttgcggcagcctacgccgacgagcttgtcaggtgcccgtcctgtagctttccggctctgttggacagtgatgtgaagaggttcagctgtcctaatcctcactgccgaaaggaaacctgtaggaagtgtcagggactctggaaagaaacataatggcctcacctgtgaagagctggctgaaaaagacgacatcaagtaccgtacctctattgaagaaaaaatgactgctgcccgcattagaaaatgccccaagtgtgggactggcctcatcaaatctgaaggctgcaaccgcatgtcttcccgctgtggtgcccagatgtgctacctctgtcgagtttctattaatggatatgaccatttctgccaacatcgccgctcaccaggagccccttgccaggagtgttcaagatgctctctctggaccgatccccctgaagatgatgagaagcttattgaggaaatccagaaggaggctgaagaggaacagaaaagaaagaatggagagaacaccttcaaacgcattggacccccgctggagaagcctgtggagaaggtgcagagggtggaggccctcccgaggccccgttccgcagaacctgccacagccacagatgccaccctatgccttcgcgcacccacccttccccctgcctcccgtgcggcctgttgtcaacaacttccccactcacatggggcctatcccagccccgtacgtgccccctctgcccaacgtgcgg

SEQ ID NO: 127099 - DNA, 418 bp, Homo sapiens
ttaatctgcaagtcaagtctctgcaggaaatctctggctgacacttcctcaggctgcacaggctgaacatcagattcttgaggactgggaggagggaggtcttccccggccaccactggctcctcttcctgagaaaaactgttatcagcagtttcattttctggagaatcaatggagttaagtccattaaacaacaaaggcttctctgatataactgggatgttcaaagttttcttcagaaatatacaatcattggtaaacagtttattggcccttttaatctgttccatcgtgacaccgtacttgagcgcgatgccctgcagcgtgtcgaaagcgcgcacccggtgctccacatggagctcgatgacgacggcgcccagcggcgcccgcacgctggcggtggtccgttcgaccgaag

SEQ ID NO: 127100 - DNA, 930 bp, Homo sapiens
atggctcactgcagcctcgaactcctggtctcaagtaatcttcccatctctgccttggcagggttctgccagggctctatcgccaatggagcaggggtccacctggggcctaggacgcctgcagatagccctctcttagccccaacggccgcgggcttcagcgctccccggctccctcgctctgcagggtcttcccggtaccggcaggccgcggcgggagctgctttcgctcttaaccttgcaggacccatggcggattcctcgcccgcactgtccctgcgggaaggcggcccccgcgcgccgcggccctcggccccctcgccgccgccgcgctcgcgctccggctccgagtccgaggaggccgagctgtcgctgagcctggcccgcaccaagacccgctcgtacggcagcaccgccagcgtgcgggcgccgctgggcgccggcgtcatcgagcgccatgtggagcaccgggtccgcgcgggcgacacgctgcagggcatcgcgctcaagtacggtgtcacgggaatgcaggtagcggaagctaagcagatcagagtccaaatgccagctgttatttcctgtgtagccttagcctactcacttcgcctctctgagccccagattcctcatctctcagtggatggtaatatccgcttgcagacatcagtacagtcacaaaagcagtcactcgcttacataaagcaaaacacagaaccaggccctgttctaagtgccagagatgtcccgcccaaggaatgcacagcgtcattagagctatggttggccctgctcagtgatgtcatggataggtgtgttactgccaaggagatgagagacttcatcaataaacaagctgatgcttatgtggagaaaggcatccttgacaaggaagaagccgaggccatcaagcgcatttatagcagcctgtaa

SEQ ID NO: 127101 - DNA, 1640 bp, Homo sapiens
atggggttcctcgggaccggcacttggattctggtgttagtgctcccgattcaagctttccccaaacctggaggaagccaagacaaatctctacataatagagaattaagtgcagaaagacctttgaatgaacagattgctgaagcagaagaagacaagattaaaaaaacatatcctccagaaaacaagccaggtcagagcaactattcttttgttgataacttgaacctgctaagggcaataacagaaaaggaaaaaattgagaaagaaagacaatctataagaagctccccacttgataataagttgaatgtggaagatgttgattcaaccaagaatcgaaaactgatcgatgattatgactctactaagagtggattggatcataaatttcaagatgatccagatggtcttcatcaactagacgggactcctttaaccgctgaagacattgtccataaaatcgctgccaggatttatgaagaaaatgacagagccgtgtttgacaagattgtttctaaactacttaatctcggccttatcacagaaagccaagcacatacactggaagatgaagtagcagaggttttacaaaaattaatctcaaaggaagccaacaattatgaggaggatcccaataagcccacaagctggactgagaatcaggctggaaaaataccagagaaagtgactccaatggcagcaattcaagatggtcttgctaagggagaaaacgatgaaacagtatctaacacattaaccttgacaaatggcttggaaaggagaactaaaacctacagtgaagacaactttagggacttccaatatttcccaaatttctatgcgctactgaaaagtattgattcagaaaaagaagcaaaagagaaagaaacactgattactatcatgaaaacactgattgactttgtgaagatgatggtgaaatatggaacaatatctccagaagaaggtgtttcctaccttgaaggcttggatgaaatgattgctcttcagaccaaaaacaagctagaaaaaaaatgctactgacaatataagcaagcttttcccagcaccatcagagaagagtcatgaagaaacagacagtaccaaggaagaagcagctaagatggaaaaggaatatggaagcttgaaggattccacaaaagatgataactccaacccaggaggaaagacagatgaacccaaggggaaaaacagaagccctatttggaagcccatcaggaaaaaatattgaatggttgaagaaacatgacaaaaagggaaataaagaagattatgaccctttccaaagatgagaggtttccttcaataacaaagctgatgccttatgtggagaaaggcatccttgacaaggaagaagccgaggccatcaagcgcatttatagcagcctgtaaaaatggcaaaagatcccaggagtctttcaactgtttcagaaaacataatatagcttaaaacacttctaattctgtgattaaaattttttgacccaagggttattagaaagtgctgaatttacagtagttaaccttttacaagtggttaaaacatagctttcttcccgtaaaaactatctgaaagtaaagtttgtatgtaagactgaaaaaaaaaaaaaaaaaaa

SEQ ID NO: 127102 - DNA, 882 bp, Homo sapiens
atgggaagtggagccagtgctgaggacaaagaactggccaagaggtccaaggagctagaaaagaagctgcaggaggatgctgataaggaagccaagactgtcaagctgctactgctggctgcctgcaagctcctgccgataggaggtgcatcacttctgccctacttgattgatggggctcacaagatcacccagagcaacgccatcctgtgctacattgcccgcaagcacaacctgtgtggggagacagaagaagagaagattcgtgtggacattttggagaaccaggctatggacgtctccaatcaactggccagagtctgctacagccctgactttgggagtccctccctggtaaagagccactggctgggacccaactataccaaggaaggccctgaggggaatgacatccgccggaccaatgtgccagacatccgcgtgggctaccggtacgagaccctgtgccaggagctggcgctcatcacgcaggcagtccagagtgagatgctggagaccattccagaggaggcggtgcttcaggcttcagcagccttggagaagcatcagctgagaggagctatcacatgggagccgggactgctcagcaaagctggttatgccatctgcctgttcggggaatacgcagactcacactatgggaatttggaacaagtgaacaattctaaacttttcaactgctacgtgtttcagaagaaccaagacagctcctgctcccccgccaggtttttggaaggcccaaccccccacttaactctgtactggcctggttccccattttgggtacattcctatggttcccgaaccgggaacaccctattcaccttcttaatttctaaagcccaactcaggctcttataa

SEQ ID NO: 127103 - DNA, 1076 bp, Homo sapiens
ctcctgattatgacagaagccagtggctgaatgaaaaattcaagctgggcctggactttcccaatgtaggccctggtctcctctttgcccttgcatatgggaaggggatgctggggagcctggtggcccaactgagcttccccggtttcccatctatccagctgccctacttgattgatgggactcacaagatcacccagagcaacgccatcctgcggtacattgcccgcaagcacaacctgtgtggggagacagaagaggagaagattcgtgtggacattttggagaaccaggctatggacgtctccaatcagctggccagagtctgctacagccctgactttgagaaactgaagccagaatacttggaggaacttcctacaatgatgcagcacttctcacagttcctggggaagaggccatggtttgttggagacaagatcacctttgtagatttcctcgcctatgatgtccttgacctccaccgtatatttgagcccaactgcttggacgccttcccaaatctgaaggacttcatctcccgctttgagggcttggagaagatctctgcctacatgaagtccagccgcttcctcccaaaacctctgtacacaagggtggctgtctggggcaacaagtaatgccttgaaggccaggaggtgggagtgaggagcccatactcagcctgctgcccaggctgtgcagcgcagctggactctgcatcccagcacctgcctcctcgttcctttctcctgtttattcccatctttacccccaagactttattgggcctcttcacttcccctaaacccctgtcccatgcaggccctttgaagcctcagctacccactttccttcatgaacatccccctcccaacactacccttccctgcactaaagccagcctgaccttccttcctgttagtggttgtatctgctttaaagggcctgcctggcccctcgcctgtggagctcagccccgagctgtccccgtgttgcatgaaggagcagcattgactggtttacaggccctgctcctgcagcatggtccctgccttatgcctacctgatggaag

SEQ ID NO: 127104 - DNA, 406 bp, Homo sapiens
  misc_feature (1)...(406): n = a,t,c or g
ggaaggctgttttcaaaagatcaagcttgaccacatattatcccctccacccatgccgttttggaaatgcagcaacccagatgtggcttttggccctggaaaatccctgaagtataaaagacagctgagttaggatggaagacagctaaggcgagggagcctgggaggagccctgactgggaggtaccttcttccaaacccggtggcgggacaggcctggccggcctctgcagagacgtccaacctcgtgggcatgcgcagccaggccctgggccagtcggcgccctcgctcaccgccagcctgccctgtgtgtccaaatgctgggagaacatccccccttggatgaattgcccccccattaaataaaacatatccaaagctcnnnnnnnnnnnnnnnnnnnnnnn

SEQ ID NO: 127105 - DNA, 500 bp, Homo sapiens
tttgagctttggatatgttttatttaatgtggtggcaattcatccaaggggtgatgttctcccagcatttggacacacagggctgacaatctcataacagcatcttgcctagaaagcagtttctctcacttctcttgtctattacccagtcacaatcactgcttctgcacaaacttcctcttctggggagactcagctccttcaggctggcggtgagcgagggcgccgactggcccagggcctggctgcgcatgcgcacgaggttggacgtctctgcagaggccggccaggcctgtcccgccaccgggtttggaagaaggtacctcccagtcagggctcctcccaggctccctcgccttagctgtcttccatcctcactcagctgtcttttatacttcagtgattttccagggccagaagccacatctgggttgctgcatttccgaaacggcatgggtggaggggataatatgtggtcaagctcctcgtcctgctcctcc

SEQ ID NO: 127106 - DNA, 1359 bp, Homo sapiens
atgcattacaacgaaagaaagaagagacaacgcaggagagacgcagaacgagaacaaacaacaaaaccaacacgacagaaagacggacaacacgacacagcaaaagaaaagaagacagaaagagcagagagacacagaacagaacgagaaaagaggaagaaagacacgacggaaaaaagagaacaacgctatacggatcttgaccacatattatcccctccacccatgccgtttcggaaatgcagcaacccagatgtggcttctggccctggaaaatcactgaagtataaaagacagctgagtgaggatggaagacagctaaggcgagggagcctgggaggagccctgactgacattgcgctaaaggttaaagctagaaaacagaaaagatacagtcatcttccttgggacacttccatccaagtccacagacacaaaaccacaaccattaagacaacatggcaaaagtcgggacagagtcaggcagcaactgcttcctatggaccagatgctgaaggcatcgtgcagctcatcacattacaccacccaaaaggatcagaaaacagtgcatctaatctatacatcttcgaatataaggaacatcatgtggacgtcaaaagtgatgagcaaatagtatcatttggccgtttccttcttttttttgttttctcacacaatcgtaggtcccagtggacaggggagagcggcaccaagaaccagacaacaacaagagacaacgagagagaagaaaagagacgaacacaagaaacacgacaaagaaaagaaagaggaaaaaagaagaacagagacacaacagaagaacacaagaagaaacacaaaacaaaagatctatgtgtcacaggaaaaggggagacatctgcccgatctgaccccagaggtcaacgatgccagggcgacacactccccaggcggccacagaatggacgcaacctcccacgaggacctgcggaccagacacgccgggcccgcaccgccacacgggaacgaccgaatacactccatgggcgacaacggaccaagacccccacacacgggccacaccggaagacaaccgcccggcgcccagaccacgcgcaccgacctgccaccggcccaccgcggtcccaccggcccaaaacggcacggcaggaccggtccattttatgtatttattttcaactgccacacgtcaggcctctggtgtctggttgggttcagccccatggggagatccctggcacggagaccacggatgacccagaacggatggggatgaaattacgacgaaactttggtcgacttccgaacactcacttgctccctggctccctgctggtggctttagcactggatggctga

SEQ ID NO: 127107 - DNA, 447 bp, Homo sapiens
cattacgccaagcttggcacgaggccgaggttgaagttcatgagttcgcccagcctcagtgacctgttcaagagagagccggccgccgccgcggacgagcggggcacgcagcagcgccgggcctgcgccaacgccacctggaacagcatccacaacggggtgatcgccgtcttccagcgcaaggggctgcccgaccaggagctcttcagcctcaacgagggcgtccggcagctgttgaagacagagctggggtccttcttcacggagtacctgcagaaccagctgctgacaaaaggcatggtgatccttcgggacaagattcgcttctatgagggtgagtgtgggccccttggcggccactctgggccatgctgggtcctggctggctgctggactgctgggcctcgtgctgggggcctctgggtgcaaggtgtggctctctggtcc

SEQ ID NO: 127108 - DNA, 654 bp, Homo sapiens
gttcgcccagcctcagtgacctgggcaagagagagccggccgccgccgcggacgagcggggcacgcagcagcgccgggcctgcgccaacgccacctggaacaggtaaggccgcgccctcccggccacccggaggctcatctgcaaaatgggtggccaagtcacagggaagggtagagttaaagcagatgaggacgttaggagcatggtggcagctgcctgctttgtggtgtgggcagcatcgtgtggacagctgtcccctccaaggtgagaagtgtggtgctggtctgccataggacgcaaggggctgcccgaccaggagctcttcagcctcaacgagggcgtccggtgagtgcctgtcccaccttggtccagggtctccgtgcagaatacagccagggtgtctgtctggggcagtctctcttctagcgtcccatgtggctcatactgttctgcttttgaccatgagaagcgtgcatctgagtcctcaggttagcgcaggagttcatggacaggagctggaccctatgcaaacatccgattggttgtggaaagtgacccatcagaagctgaagttacaaagttatactcctatgcaaatgaagacttggcccaaccaattgtggtaggggacgaatcagaggttcttgcagttt

SEQ ID NO: 127109 - DNA, 2378 bp, Homo sapiens
atcgctaccgggacacgcttcgccgcgccatcctgctgctcagcccacagggagcccactccttcatcaacgaggccgtggagaccaacctggcttccaaggacagccactgggtctttgtgaatgaggaaatcagtgacccggagatcctggatctggtccatagtgcccttggaaggatgaccgtggtccggcaaatctttccgtctgcaaaggacaatcagaaatgcacgaggaacaaccaccgcatctcctccctgctctgcgacccccaggaaggctacctccagatgctgcagatctccaacctctatctgtatgacagtgttctgatgctggccaacgcctttcacaggaagctggaggaccggaagtggcatagcatggcgagcctcaactgcatacggaaatccactaagccatggaatggtgggaggtccatgctggataccatcaaaaagggccacatcactggcctcactggggtgatggagtttcgggaggacagttcgaatccctatgtccagtttgaaatccttggcactacctatagtgagacttttggcaaagacatgcgcaagttggcgacatgggactcagagaagggcttgaatggcagcttgcaagagaggcccatgggcagccgcctccaaggattgactcttaaagtggtgactgtcttggaagagcctttcgtgatggtggctgagaacatcctaggacagcccaagcgctacaaagggttctccatagatgtcctggatgcactggccaaggctctgggctttaaatatgagatttaccaagcccctgatggcaggtacggtcaccagctccataacacctcctggaacgggatgatcggggagctcatcagcaagagagcagacttggccatctctgccatcaccatcaccccagagagggagagcgttgtggacttcagcaagcggtacatggactattcagtggggattctaattaagaagcccgaggagaaaatcagcatcttctccctctttgctccatttgatttcgctgtgtgggcctgcattgcagcagccatccctgtggttggtgtgctgatatttgtgttgaacaggatacaggctgtgagggctcagagtgctgcccagcccaggccgtcagcttctgccactctgcacagcgccatctggattgtctatggagccttcgtacagcaaggtggcgaatcttccgtgaactccatggccatgcgcatcgtgatgggcagctggtggctcttcacgctcattgtgtgctcctcctacacagccaaccttgctgccttcctcacagtgtccaggatggacaaccccataaggactttccaggacctgtccaaacaagtggaaatgtcttatggcactgtccgggattctgctgtatatgagtacttccgagccaagggcaccaaccccctggagcaggacagcacgtttgctgaactctggcggaccatcagcaagaacggaggggctgacaactgcgtgtccagtccttcagaaggcatcaggaaggcaaagaaggggaactacgccttcctgtgggatgtggccgtggtggaatacgcagccctgacggatgacgactgctcggtgactgtcatcggcaacagcatcagcagcaagggttacgggattgccctgcagcatggcagcccctacagggacctcttctcccagaggatcctggagctgcaggacacaggggacctggatgtgctgaagcagaagtggtggccgcacatgggccgctgtgacctcaccagccatgccagcgcccaggccgacggcaaatccctcaagctgcacagcttcgccggggtcttctgcatcctggccattggcctgctcctggcctgcctggtggctgccctggagttgtggtggaacagcaaccggtgccaccaggagacccccaaggaggacaaagaagtgaacttggagcaggtccaccggcgcatgaacagcctcatggatgaagacattgctcacaagcagatttccccagcgtcgattgagctctcggccctggagatggggggcctggctcccacccagaccttggagccgacacgggagtaccagaacacccagctctcggtcagcacctttctgccagagcagagcagccatggcaccagccggacactctcatcagggcccagcagcaacctgccgctgccgctgagcagctcggcgaccatgccctccatgcagtgcaaacacaggtcacccaacggggggctgttccggcagagcccggtgaagacccccatccccatgtccttccagcccgtgcctggaggcgtccttccagaggctctggacacctcccacgggacctccatctga

SEQ ID NO: 127110 - DNA, 2196 bp, Homo sapiens
atggatctcctgaccatctgggaactgaaggaaggagcaggaaacggaactcgcgttgagccctcatgctgtaccaggaaacaattcttagcccctgagacagtagggtcactggagagctgggctgtgacaatgggcaccctgctttttctgctgcactgtgcagaaggaaggaggccgagcctcgatatccgtaatcacaaaagggccaccccatcacagctgcctattgatgattctgtgcatagagacctgggtggtaacaagcaggtgaagggtgcacactggtcatggcgtggaggggctgacatgataggagagccaaagaagcttgggacagaaccatcaactattccgttcagggccttttcctcaaaggtctgtcttccttccattctgagctccaggggtgataggacagccactgaggctgcagctggccccagcttcacattcccttacatggagatacacagaaggccagagaggaagacagatatccccgcacattgcagatgtagtgagttaagcagtgtccttccagggaagagacagcataaggacagagagctcactacctggtataatgcagagtcctgtaaggagcgagggacgcccacccctgtcctcacccctgacctgccaggaatgcccttatggaccaatgaatggaggagagatgaaggagacgtgcctatcacaggtgtggtctctattaacctcacatgcacgatgcaacttgctgatgtcattcaaccagttatttcaccaacagttcctgaatgtctactaggtctgtatgggggatcccagaagcacagagaagtagctaacccatgggtaggagctaaagaaatgcttcctagaagagggaacattaagctgagtcagaaagggactttccaggacctgtccaaacaagtggaaatgtcttatggcactgtccgggattctgctgtatatgagtacttccgagccaagggcaccaaccccctggagcaggacagcacgtttgctgaactctggcggaccatcagcaagaacggaggggctgacaactgcgtgtccagtccttcagaaggcatcaggaagtcaatttcccacaatgactcgaattcagcattatcctcttatacagctgaggatcgggtggctctgactcatgactccttgggttacaagctggggaactggcatttatccaacacagtgaggcccactgggaagatggtcgtgcacaggatgacttgtacaggatcccatgctcaggatgatttttcattgccatttagccacattgaacagcagaagatgtctaggctctggagcttgacatatttaggtgtgaattccagtttcagagcagaccagtctggagatggctgtgccctaagtgaggatgacgacttgaatccagaaactacagaacaaatccagcaagtagggtattatgggcctagtattcagggaggaacagcctctccaaatcccaaacagagtctgctgccatgcagtgtaggcagcctggcaaaggtcaggtggggatccagggaagatgctggagaccatgttacagctccaatccaaagggactctgaagacactgcgctgagcatgtctggggagggcaggccatatactgtggtccttgcaaaagaccctccatcgggcagcttgctgtttaatatgggaagtgagagagatgcggaaatgccagcagaacaacctggagtgatgtgtcagaaactctacaaggctatagaagaagcaatcaataggactttgtatttctccatgatcacagaaccatcttcaccacgggcgaagattgagctagtgcctttgaaggtggttgttttgctttgccccactgggtgcattgtggctgtagccttgggctcagacagacatttgaaaggaaggagacgatggaccgaaagatggcgaaaactcacatacaccggacagaacaactccgccgttcgccggacacagcagaccagctgtgcgcacgcgagaagcgcttccacctcccaggctgcgcctacgctgcagccctgcgacactcacgcacatcccctgcgcccgcacgccccgctcctccggcataacgcgctccttcagccccgggagatatctgtaaaagcatatggaaaatacgagggatgtgtacaatggtatactattcagccttaa

SEQ ID NO: 127111 - DNA, 2727 bp, Homo sapiens
  misc_feature (1)...(2727): n = a,t,c or g
atggatacattcctcgacacatacactctcccaagactaaaccaggaagaagctgaatctctgaatagaccaataacaggagctgaaattgtggcaataatcaatagtttaccaaccaaaaagagtccaggaccagatggattcacagccgaattctaccagaggtacaaagaggaactggtaccattccttctgaaactattccaatcaatagaaaaagagggaatcctccctaactcatttgatgaggccagcatcattctgataccaaagccgggcagagacacaaccaaaaaagagaattttagaccaatatccttgatgaacattgatgcaaaaatcctcaataaaatactggcaaaccaaatccagcagcacatcaaaaagcttatccaccatgatcaagtgggcttcatccctgggatgcaaggctggttcaatatccgcaaatcaataaatgtaatccagcatataaacagagccaaagacaaaaaccacatgattatctcaatagatgcagaaaaagcctttgacanaattcaacaacccttcatgctaaaaactctcaataaattaggtactgatgggacgtatttcaaaataataagagctatctatgacaaacccacagccaatatcatactgaatgggcaaaaactggaagcattccctttgaaaactggcacaagacagggatgccctctctcaccactcctattcaacatagtgttggaagttctggccagggcaatcaggcaggagaaggaaataaaaggtattcaattaggaaaagaggaagtcaaattgtccctgtttgcagacgacatgattgtttatctagaaaaccccattgtctcagcccaaaatctccttaagctgataagcaacttcagcaaagtctcaggatacaaaatcaatgtacaaaaatcacaagcattcttatacaccaacaacagacaaacagagagccaaatcatgagtgaactcccattcacaattgcttcaaagagaataaaatatctaggaatccaacttacaagggatgtgaaggacctcttcaaggagaaccacaaaccactgctcaaggaaataaaagaggatacaaacaaatggaagaacattccatgctcatgggtaggaagaatcaatatcgtgaaaatggccatactgcccaagctgagagaagaaaagttacaagaggaaaaaccctctgaagatcaaatccacaagctgttaccagaggatacagaaacagggaaaaggaaaatggatgaacagaaaaaaagagatgaaccattagtactgaaaacaaatctggaacgttgtcctgcacgtctctcagattcagagaatgaagaaccttctcgaggccagatgacacagacacatcgctcggcatttgtttccaagaacaactcctactccttagctttcctggcagggaagctaaactccaaggtggaaaggagtcagagctgtagtgacacagcccaggaaagagcgaagagcagagtcagagcagttccaggcaacaaagccaaggtcacaactatgactccagcctccaaccccatcattggtgtcctcttgtcaactcaaaacaaccgctgcgtctcggcccctgacttaaccatcgaaaagcgtctacccttcagctccctttcatccttggcttccctgcataagccagagcgttctgtcagccctgagagcaatgacagcatctccgaagaactaaaccatttcaagcccattgtctgctcaccatgtactcctcccaagagactccctgatggccgtgtgctaagtcctctcatcatcaaatcaactccacgcaacctaaacagaagcctgcagaagcagacttcttatgaggccagtccacggatcctcaaaaagtgggaacagatctttcaggagcggcagatcaaaaagaccctttcaaaagccactcttacctctctggctcctgaaatgggggaagagttactaggctctgaaggtatccattctagcaaggagaagccacttgtggctgtaaatacaagattatctggtgggcaggtcctctctgagtatactggacccacctctgctgatcttgatcatttcccctctgttagccaaacaaaagcagaacaggacagtgataataaaagtagcactgagatcccactggaaacctgctgttcctcagaactcaaaggaggaggcagtgggacttctttggagagggagcagtttgaggggttagggtcaactccagatgccaagttagacaaaacctgtataagcagagccatgaaaatcaccacagttaattcagtgctaccccaaaacagtgttttgggtggagtcctcaaaacaaagcaacaattgaagacattaaatcattttgatctgactaatggtgttctagttgagagcctaagtgaagagccacttccttctttgcgtcgaggccggaaaagacactgcaagaccaagcacttagaacaaaatggctcccttaaaaaactgcgacaaaccagtggggaggtgggtctggccccaacagacccagtcctgcgagagatggagcagaagcttcagcaagaggaagaagaccgacagttggctctgcagttgcagcgcatgttcgacaatgagaggcggactgtgagccggcgaaaaggaagtgtggatcagtatctcctacggtccagcaacatggccggggccaagtag

SEQ ID NO: 127112 - DNA, 533 bp, Homo sapiens
acgcttaattcactttatttttcttgtataaaaaccctatgttgtagccacagctggagcctgagtccgctgcacggagactctggtgtgggtcttgacgaggtggtcagtgaactcctgatagggagacttggtgaatacagtctccttccagaggtcgggggtcaggtagctgtaggtcttagaaatggcatcaaaggtggccttgcgaagttgcccagggtggcagtgcagccccgggctgaggtgtagcagtcatcgataccagccatcatgagcagcttcttaggcacaggtgcggagacgatgccagtgcccctgggtgcagggatgaggcgtaccagcacagagccgcagcgggtctgcttctgcactggcataatcttcaaaacctcatccttgagagaggcccccaggaagaaatcaatgatctctgattccttaatgggcagggagaagagatagatctcctccagggacttgatcttcatgtccttgaccaagcggcccaacttggtgacgggcatcactcc

SEQ ID NO: 127113 - DNA, 822 bp, Homo sapiens; identical to SEQ ID NO: 125458

SEQ ID NO: 127114 - DNA, 896 bp, Homo sapiens
  misc_feature (1)...(896): n = a,t,c or g
atggctagaaggaaaaacgggaaatgggaatctgagatcattgacttttgcctggggggctctctcaaggatgaggttttgaagattatgccagtgcagaaacagacccgcgccggccagtgcaccaggttcaaggcgtttgttgctatcggggactacaatggccacatcggtctgggtattaagtgctccaaggagcggccactgccatccgcagggccatcatactggccaagctctccattgtccccgtgtgcagaggctactgggggaacaagatcagcaaaccccacattgtcccttgcaaggggcactggcattgtctcagcacctgtgtccaagaagctgctcatgatggctagtatcaatgactgctacacctcagccaggggctgcactgccatcctgggcaacttcgacaaggccacctttgatgccatctctaagacctacagctacctgactcccaacctctggaaggagactgtattcaccaagtctccctatcaggagttcactgaccaccttgtcaagacctacaccagagtctccatgcagagcacccaggctccagccttggcgaagttgcccagggtggcagtgcagccccgggctgaggtgtagcagtcatcgataccagccatcatgagcagcttcttaggcacaggtgcggagacgatgccatttctaagacctacagctacctgacccccgacctctggaaggagactgtattcaccaagtctccctatcaggagttcactgaccacctcgtcaagacccacaccagagtctccgtgcagcggactcaggctccagctgtggctacaacatagggtttttatacnnnnnnnnnnnnnnggggcggccgtttaaaagaaacccttggggggccc

SEQ ID NO: 127115 - DNA, 1288 bp, Homo sapiens
  misc_feature (1)...(1288): n = a,t,c or g
aaatggcgaataaccccggtgccaacgggcaggcccggggccctggtggcccggggatgggaaaaccccgttgctttccggcgaggttttcggcattgtcatccgggccgggagtcccggccctggaacggggccgggccgaagngcgcgaagctgccggagcaaaggccgaggattaggagttggatgcccgtccaccaagttgggccgcttggtcaaggacatgaagatcaagtccctggaggagatctatctcttctccctggccataaagaaatcagagatcatgagttttcttctggggggcctcctctcaagggatgaggtttttgaatgattatgcccagtgcaagagcaagacccgtgccggccagccgcaaccaggttcaaggcgtttgttgccttgactacattggggactacaaatggcccacgtcggtctgggttgttaagttcctccaagggaggtggccaccggcaattcgtgggggccattcatccttggccaggctctccattcgtccccggtgcgcagaggcctactggggggaaccaagaattcggccaagcccccaacacttgtcccttggcaaaggtgaccaagggccgcttgcgggctctgtgctgggtacgccttcatccccttgcaacccaggggccaattggcatcggtctccgcaacctgtgccttaagaagctgctcatgatggctggtaccgatggcctgcaacaactctcagcgccggggctgcactgccaccgtggggcaaccttgccaaagccaccacctttgatgccatttctaagacctacagctacctgacccccgacctctggaaggagactgtattcaccaagtctccctatcaggagttcactgaccacctcgtcaagacccacaccagagtctccgtgcagcggactcaagctccagctggggctacaacataagggttttattccagaaaaaaataaggtgaattaagcgtgaaaaaaaaagacaactaaaaaggggccgccgtttttaagggatccctgaggggccccaagtttacccgggcttgcaaggcaaaacctttttccttaaagggggccgtattaaaacctacctgggaatttttggaaaggaccctaattttgggggggggaaaaattgggccaaattactttcggagattaaaagttttagggtaatattaaaattttaaagcgaataaggggtaaaactacttcgtaaacgtttgttgtttaaaaactttgctaacggatgtggattaaagaaaaattg

SEQ ID NO: 127116 - DNA, 478 bp, Homo sapiens
  misc_feature (1)...(478): n = a,t,c or g
gggggggaaaccggtgtaattattagccatggtcaaaccccaccgtgttntttngacattgccgtcgacgggcgagcccttgggccgcgtntcctttgagctgtttgcagacaaggtcccaaagacagcaggttggatggcaagcatgtggtgtttggcaaagtgaaagaaggcatgaatattgtggaggccatggagcgctttgggtccaggaatggcaagaccagcaagaagatcaccattgctgactgtggacaactcgaataagtttgacttgtgttttatcttaaccaccagatcattccttctgtagctcaggagagcacccctccaccccatttgctcgcagtatcctagaatctttgtgctctcgctgcagttccctttgggttccatgttttccttgttccctcccatgcctagctggattgcagagttaagtttatgattatgaaataaaaactaaataacaaaaaaa

SEQ ID NO: 127117 - DNA, 857 bp, Homo sapiens
aaaccgtgtactattagccatggtcaaccccaccgtgttcttcgacattgccgtcgacggcgagcccttgggccgcgtctcctttgaggtaaggggcctggataccaagaagtgactgctcatctaatccataaagctatgttaacagattggagctgtttgcagacaaggtcccaaagacagcagaaaattttcgtgcctctgaagcattgaagagaaaggatttgggttataaggggttccctgctttcacagattatttcccagggttttatgtgtcaggggtggtgactttcacaccgccataaatggcacctggtggcaagtccattctatggggagaaaatttgaagatgagaacttcatccctaaagcatacgggtcctggcatcttgtcccatggcaaaatgctggacccaaacacaaatggttcccagtttttcatctgcactgccaagactgcagtggttggatggcaagcatgtgtgtgtttggcaaagtgaaagaaggcatgaatattgtggaggccatggaggctctttgggtccagggattgcaagaccagcaagaagatcaccattgcttgactttggacaacttcgaattaagtttgactttgtgtttttatctttaaccaccaagatcatttccttctgtgctctcctctcaggagagcaccccctccaccccatttggctcggagtaatcctagaatctatgtggctctcgcttgcagttcccttttgggttccatgttttccttgttccctcccatgcctagctggattgcagagttaagtttatgattattgaaataaaaactaaataacaattgtcaaaaaaaaaaaaaaaagcgg

SEQ ID NO: 127118 - DNA, 723 bp, Homo sapiens
atgagctgggaggtggtgtgcgcccttctcctgcctccagctcctctctggacccctgtcctggcacctcttcggtccctggttcggtctgcccctttcccaccgcggcccgtcttaggccaggatgtgctccctgccctgcggactctggagcagggcccggccactccccggagcctgtatgacgggaaccgccccgcgccctctcccctacgcggggcaggccagccctggggcgccttaaaaaccggagctggcgcttggcatcgccactctgggcaggatccaacgtcgctccagctgctcttgacgactccacagataccccgaagccatggcaagcaagggcttgcaggacctgaagcaacaggtggaggggaccgcccaggaagccggtttaccatggaaccatctctgcaatgcagccccttccacattgccccagccccatggagctggtgctccggtggcgctgtgcaattgcctgttcctgtgtgcctctgctcccccgacactaggagccctggagggcagggccagggtgcatctgagaaagacatcgtgcactctggcttggcatacacaatggagcgttctgccaggcaaattatgcgcacagccatgaagtataacctgggattggacctgagaacagctgcctatgttaatgccattgagaaagtcttcaaagtgtacaatgaagctggtgtgaccttcacatag

SEQ ID NO: 127119 - DNA, 3100 bp, Homo sapiens
gggcaacccgcgcgggacccttcctccctagtcgcggggagtctgagaaagcgcgcctgtttcgcgaccatcacgcacctcccctccgcttgtggccatgtaccgctacctgggcgaagcgctgttgctgtcccgggccgggcccgctgccctgggctcggcgtccgccgactcggccgcgttgctgggctgggcccggggacagcccgccgccgccccgcagccggggctggcattggccgcccggcgccactacagcgaggcggtggccgaccgcgaggacgaccccaacttcttcaagatggtggagggcttcttcgatcgcggcgccagcatcgtggaggacaagctggtggaggacctgaggacccgggagagcgaggagcagaagcggaaccgggtgcgcggcatcctgcggatcatcaagccctgcaaccatgtgctgagtctctccttccccatccggcgcgacgacggctcctgggaggtcatcgaaggctaccgggcccagcacagccagcaccgcacgccctgcaagggaggtatccgttacagcactgatgtgagtgtagatgaagtaaaagctttggcttctctgatgacatacaagtgtgcagtggttgatgtgccgtttgggggtgctaaagctggtgttaagatcaatcccaagaactatactgataatgaattggaaaagatcacaaggaggttcaccatggagctagcaaaaaagggctttattggtcctggcattgatgtgcctgctccagacatgagcacaggtgagcgggagatgtcctggatcgctgatacctatgccagcaccatagggcactatgatattaatgcacacgcctgtgttactggtaaacccatcagccaagggggaatccatggacgcatctctgctactggccgtggtgtcttccatgggattgaaaatttcatcaatgaagcttcttacatgagcattttaggaatgacaccagggtttggagataaaacatttgttgttcagggatttggtaatgtgggcctacactctatgagatatttacatcgttttggtgctaaatgtattgctgttggtgagtctgatgggagtatatggaatccagatggtattgacccaaaggaactggaagacttcaaattgcaacatgggtccattctgggcttccccaaggcaaagccctatgaaggaagcatcttggaggccgactgtgacatactgatcccagctgccagtgagaagcagttgaccaaatccaacgcacccagagtcaaagccaagatcattgctgaaggtgccaatgggccaacaactccagaagctgacaagatcttcctggagagaaacattatggttattccagatctctacttgaatgctggaggagtgacagtatcttactttgagtggctgaagaatctaaatcatgtcagctatggccgtttgacggttcaaatatgagagggattctaactaccacttgctcatgtctgttcaagagagtttagaaagaaaatttggaaagcatggtggaactattcccattgtacccacggcagagttccaagacaggatatcgggtgcatctgagaaagacatcgtgcactctggcttgggcattacacaatgggagcgttctgcccaggcaaattatgcggcacagcccatggaagttattaacctgggggattgggaccttgaggaacagctggcctattgtttaatggccctttggaggaaagtctttccaaagtgttacaatgtaagctggtgtgaccttcacatagatggatcatgggctgacttcctcactattcctcttcacatgtaaacttctggcagacctattcacaagtttacatgttaaccacaggaaatccctttcttctcctggactcattactaatgggatacctttcttcaacaagtcaatccaagtcagcccgttaagggaggaaaggaaatttaaggttaggcgggtccatgttacaagctgagtgtggaagttgggaattcacctacaccaggggagccttttgggtatttttgcctttaaataaaaagcctcctttatctggctgtgcagccttgctctgtggcttttcccaacacaatcagtgctagtgctggggaggaacagtcaagagcagtcagttgcttgcttattttttctggatgagtctgggacacactgtaactttaacacatttaagaagtaggtgtgtggccttttcagaaggtggcatggtcctcaagtgagttcttagtattttatatcagcaaaataattcaattttgcaggttgcaaacaaatataaaacctgtttctgtttatgaatattattcttttagaatagaataagtacatgctgctgtaataaaattgcctttaatcacttaacaagcctaaccttgactcaaacagtgaatgcctatagaaataataaatgaaaaaaactagtatttttatatcataaaacaatgtcatttatagcttatcattcatgtattgtccagcagacattaaaagccctgtggataattaagttatcttcatacctgcaaaatggtggaggctattttcattaaaactgtcagaatttgcttaccataattatgatacagtccaaagaatgcagtcactttttatcatgttaactaattgttctcttttgaagatctatggttgactaattaaacaataattcaagtagagtgtcccagaaaaaaaccacttgggctccctgtttggagtctggctggctctgagcattgccaatggcccctactcacctgactttgtatcctctccttttagaggctttgcattctgcacccagcttcactaacagtgggctgaaaacatccttgggttgagtgtttcatttgggagttatttggccagggccttttgaacagtagtgtccccatgaagtgctagataatatatgtgtaagagtcagcttttttttttttttttaactctaacacccttcagaaatttctaactgactttgtaactgcatggcttaacctggtgataaaagcagttattaaaagtctacgttttccaaaaaaaaaaaaaaa

SEQ ID NO: 127120 - DNA, 990 bp, Homo sapiens
atggaaactggcaaacactacaaacctgagctttcctgttctctccactggagacctgtggttaaacatttacccacagatgacggggtcaacaagcagaagtggctgcaagtggcccttcaaggagtgaagctgcagaccttcgcagtgagtgctacagctcttaaggcagctcgtctggagttgttcgttcctcccgatgggctcgaggtcttgctggcttcaggaatgaagctgcagaccttcgtggtgagtgttacagctcataaaggcagtgtggacccaaagactagacataaaggttctccacgtccccaccagactcaggagcccagctggcttcacccagtggatgctgcactggggctgcaggtggagctgcctgccagtcctgcgccagtcccgtgccgtgtgcctgcaatcctcagcccttgggtggtcaatgggactgggcaccatggagcagggggcggagctcgtcggggaggctcaggcggcacaggagcccacggagtgggggaggatcaggcttggcgggctgcaggtcccgagccctgccccgcgggaaggcagctaaggcccggcgagaaattaagcacagcagctgctggcccaggtgctaagcccctcattgcccggggctggtgggggcccgccggccgctccgagtgcggggtccgccgagcccacgcccacccggaactcgcgctggcccgcaagcaccacgcgcagcccggttcccgcctgcacctctccctccacacctcctcccaagctgagggagccggctccgaccttggccagctcaggaaggggctcccacagtgcagcggcgggctgaagggctcctcaagtgccgtcaaagtgggagcccaggcagaggaggcgccgagagcgagcaagggctgtgaggactgccagcacgctgtcacctctcagtgggagagtggaatgcttgatatggagcctatagaggaatcgctgttgtag

SEQ ID NO: 127121 - DNA, 342 bp, Homo sapiens
ctggccaaatttcgcagtctcctgtgcacagcggagggtgaagcagcagcttttctgcaacctgagggagccggctccggccttggccagcccagaaaggggcccccacagtgcagcggcgggctgaagggctcctcaagtgccgccaaagtgggagcccaggcagaggaggcgctgagagcgagcaagggctgcgaggactgccagcacgctgtcacctctcattatcagtctttccactacggaggaaaaatacaacaatcctttacttaccatacttatatagaaaaatcctgttatggaaccttgatcgaggaatgtgttgaatcggggaaaagttaa

SEQ ID NO: 127122 - DNA, 444 bp, Homo sapiens
atggcggaaggtgaaggggaagcaagtgtactagtgttgaacagctgtggaataacctgtgcaggagatgaaaaagaaattgctgctttctgcgctcatgtgtcggaactagatctttctgacaacaaactcgaagactggcatgagtgcagcggtgggctgaagggctcctcaagtgccgccaaagtgggagcccaggcagaggaggcgccaagagcgagcgagggctgtgaggactgccagcacgctgtcaccactgccagcacgctgtcacctctcagcatggccacagtcaaaagtagcctcagtggtgaggaccatgagaagagcggagtaaaatgtacaaggtggatgctgcatggatactctgttgacagacttacttctgagctcaggtacctttggggacacccagaaacgcttaagaggctagttgccctgtga

SEQ ID NO: 127123 - DNA, 2784 bp, Homo sapiens
atggtgcccctcacaagccgcagcggctggtgcccgggctaccagggacatgccagagggctcgatgacttgtctctgcagggcgctttggtggttgttcagctggctaaaggttcaccggtgaaggcagggccagcagggccggccggctgctccgagtgcggggcccgccaagcccacgcccacccggaactccagctggctcttgctcgcagccccggttcccactcgcacctctccctccacacctccctgcaagctgagggagccggctccggccttggccagcccagaaaggggctcccacagtgcagcggtgggctgaagggctccacaagtgccgccaaagtgggagcgcaggcagaggaggcgcagagagcagcgagggctgtgaggactgccagcacgctgtcatctctcagcaacactcttgcattgtgtagacagtgcagtttcctgtgcatgaagctggggaaggcagccgtgtctgaaccagtccgtccatttccaacgacttcaggaccaggcagtgtggcctcttctgcagccagagtgggaaatggaggcaggaatcagcaaatggaactgctattgttagaatgtcccttgcaaaactcatgtggaaatttaattgccattgtgatggtattaaaaaggcatctatttccgggctgtaagcagctgacacctgcccagtggaagctggcatccctccccttgtgggttcagagctgcaagaagcaccaggctcggccacttcagaagccccagcctcgacctagcccaccctctcagggccacagtgcagaagcctgcacacctgccaagtctctccgactccttgcagctgctgtcagcatggcccaggctcctgctgacccgggcagagaaggccaccttgaacaaagaatcctgcaggtgctgacagaggctggctccccggtgaaacttgcccagctggtgaaggaatgccaagcacccaagagggagctcaaccaagtcctctaccgaatgaaaaaggagttgaaagtctccctcacatcccctgccacctggtgcttgggcgggactgatcctgaaggcgagggtcctgcagagctggccttgtccagccctgccgagaggccccagcaacatgcagctacaattccagagacccctggccctcagttcagccaacaacgggaggaagacatctacaggtttctcaaagacaatggtccccagagggccctggtcatcgcccaagcactgggaatgaggacagcaaaagatgtgaaccgagacttgtacaggatgaagagcaggcaccttctggacatggatgagcagtccaaagcatggacgatttaccgcccagctctggcctcccacttggccctactgactcggaacgcccagggtattttaacaagctccccaggagaatttggtgctgccgactggtattgggaacccctgacccatagacagtggcaaagggatacagttgaatattattttgcagaagattctggaagaagagcaaagtcagcctcaattatttaccagcacaatccaatcaacatgatctgccagaatggacccaacagctggatttccattgcaaactccgaagccatccagattggacacgggaacatcattacaagacagacagtctccagggaggacggtgattcctcaacttgggggaccctagttgatccctgggggccccaggacatccacatggagcagtccatactgagacgggtgcagctgggacacagcaatgagatgaggctccacggcgtcccgtccgagggccctgcccacatcccccctggcagccccccagtctctgccactgctgccggcccagaagcttcgtttgaagcaagaattcccagtccaggaactcaccctgagggggaagccgcccagagaatccacatgaaatcgtgctttctcgaggacgccaccatcggcaacagcaacaaaatgtctatcagcccaggggtggctggcccaggaggagtcgcagggtctggagagggggagccaggggaggacgcaggtcgtcgtcccgcagacacacaatccagaagtcactttcctcgagacattggtcagcccatcactcccagccactcgaagctcacccccaagctggaaactatgactcttggaaacaggagtcacaaagctgcagaaggcagccactatgtggatgaagcctcacacgaggggagctggtggggaggtctcgactgcaggggcggcctggaggggaggagcgcggagccggcctttcacagccttggcccgagcgccctctgctggccgcacgccgccggccgccgctcaccaggctgggctcggaaacttccagggcctgagtctagctccttgtttgagtctgacaatgtgctcagacccctggaccaggggctggtccccgaggtcccatccagggtcagagtttctgattctgagaccccctacacccaccccatctctgcagaccctcaaatcccaagtcaggccgttcgtctgcggagcacaggtgatgctctgcgcatgcccgtctgcccagagcccactgtgattcctggaccagggccatggcagccaggatgcatctcggattccctgggggccacagttgggtccggaaagatcaaggtgcccggtcaccagaacacccccattggaatgtttgtgccatcctcgtgctcaacccaggccgtcctgtggcctgaaaactccatccaggccaagtcccgaatccacggagaatga

SEQ ID NO: 127124 - DNA, 1066 bp, Homo sapiens
tcagcccttgggtcgtcgatgggactgggcgccgtagagcagggggcggtgcttgtcggggaggctccggcagcacagcagcccacagagagggggaggctcaggcatggcgggctgcaggtcccgagccatgccccgcagggaggcagctaaggccggtgagaaatcgagcccagtgccggtgggcggcactgctctgagtacagggcctccacagccgctggccctggtgctaagcccctcattgcatggggccggcagggcctgccggctgctccgagtgcgggcccgccaagcccacgcacacctggagctccagctggcccggaagtgcccgcacagcccctgttcccgctcatgcctctccctccacacctccttgcaagctgagggagccagctccggccttggccagcccagaaaggggctcccacagtgcagcggtgggctgaagggctcctcaagtgccgccaaagtgggagcccaggcagaggaggcgccgagagcgagcgagggctgtgaggactgccagcacgctgtcacctctcaagctgacatcggcagctgtgaggacccacctgttagtctgcacttgaaacagagctataattgtccagtgaatgcagaggaagaagctccagtgtgctgctctgctcgttacaacttagcaattttggccttttttggtttcttcattgtgtatgcattacgtgtgaatctgagtgttgcgttagtggatatggtagattcaaatacaactttagaagataatagaacttccaaggcgtgtccagagcattctgctcccataaaagttcatcataatcaaacgggtaagaagtaccaatgggatgcagaaactcaaggatggattctcggttcctttttttatggctacatcatcacacagattcctggaggatatgttgccagcaaaataggggggaaaatgctgctaggatttgggatccttggcactgctgtcctcaccctgttcactcccattgctgcagatttaggagttggaccactcattgtactcagagcactagaaggactaggagag

SEQ ID NO: 127125 - DNA, 580 bp, Homo sapiens
atgatctcctttgacctcatgtctcacatccaggtcacagtgatgccaaaggtctttgggcctgtgatgagaggggctgccatgaaggattttgcagaaaagaagtccacagcaaaggccctggaagatgtaaaggcaaacttttactgtgaattatgtgacaagcagtatcacaaacaccaggagtttgacaatcatattaattcttatgaccatgctcataagcagactcaggagcccagctggcttcacccagtggatcccacaccggggttgcatgtggagctgcctgccagtcctgggccatgcgctcacactccttagcccttgggcggtcgatgggactgggcgctatggagcagggggtggcactcgttggggaggctccggcggcacaggggcgcacggagcagctgagggacccagctccggccttggccagcccaggaaggggctctcactgtgcagcggcgggctgaagggctcctcaagtgccgccaaagtggaagcccaggcagaggaggcgctgagagtgagcgagggctgtgaggactgccagcacgctgtcacctctcaatag

SEQ ID NO: 127126 - DNA, 2395 bp, Homo sapiens
tgggctggtggtctcgctggcttcaggagtgaagccgcagaccttcgcggtgagtgttacagttcttaaggcggcgcgtctggagttgttcattcctccccgtgggctcgtggtctctctggcttcaggagtgaagctgcagaccttcgcggtgagtgttacagctcataaaagcagcgtggacccaaagaactcaggagcccagctggcttcacctagtggatcccgcaccagggcagcaggtggagctgcctgccagtgccacgctgtgcgctcgcactcctcagcccttgggtggtcgatgggactgggtgccgtggagcagggggtggtgctcgtcggggaggctcgggccgcacaggagcccatggagtgggtgggaggctcaggcatggcgggctgcatgtcccgagccctgccccatggaaaggcagctaaggcctggcgagaaatcgagcacagcgccggtgggccggcactgctgggggacctagtacaccctctgcagccgctggcccgggtgccaagtccctcactgccttgtgcgagcagggctggccggctgctccgagtgcaggcccgccaaacccacgcccacccggaactccagctggcccccaagcgctgcacgcagccccggttcccgctcgcgcctctccctccacacatccctgcaagctgagggagccggctgtggccttggccagcacagaaaggggctcccacagtgcagcggtgggctgaagggctcctcaagtgccgccaaagtgggagcccaggcagaggaggcactgagagcgagcgagggctgtgaggactgccagcacgctgtcacctctcaactcagtctcccacatggcgtggccacccttgtgtctgttaaactctttctctacaaaaatgccatggtctttctttgtgcagtggtcaggaaaaaccccttgggcagatacaaaagttctttcaggcatctgtttccagaatagcgaggtttcctccatattgaagatttgctgtggcaagtaaatctcctccataatcaagcttccaaaactcttcagctgccttcacatcagcacccacagactcagcattcatgttaacattatgtaatgcataacgatcctcaaatcatgtaaaccacccggaactggcagtaaatctgataccaaagtcaggtccagcctttcctttcaacatcaaaaacatactttttgctctggccatgaccgccgtggtgctgaaaccgcctctgcaaaaattataacagaaaattatgaccgtgaaaggacaactaacctaaccgactccatcttgcttctaatctccaagctgtccttgttcatccccgggcgtaggctcaacctactttgggaggaacttagtttacagtgtgaaaggaaaataaatcttggggccccaaaatcactaagccaaagcagaaagtcaagctgggaactgcttagggcaaacctgcctcccattctattcctaaaaaagatagctactacgattaaaaagctacatacctccctcacaaggaaattccttgtggacaaatgacagaactcaaagccacctctgctcactgagatagatgcgtctctgcctgcctcctttggaaaggccaatcagaaactcaaaagaatgcaaccgtttgcctcttatctacctatgacccagaagtccctccctgcttcgagttgtcccacctttctggatggaaccaatgtataccttacatatactgattgatgtcccatgtctccctaaaatgtataaaaccaagctgtgcccgaccaccttgggcacatgtcgtcaggacttcctgaggctgtgtcacgggcacacatccttaactttggcaaaataaacttcctaaatcgactgagacctgtctcagatatttggggttcacaatggtttaactttgaaacaaagacaataacaactcttttccaaaacaaagtccctgcctgcctgaggatcagactgcctttgtaggactaacaaatttgccatgagattagaaattatggtgtaggagtaatgcagctggaggtggcgggattctgaacctccttaaattgctcctgtgataacctaagatgagtgcttaacatcttttacagaccctgtattcagtggatcagctggcaccacccaaatagataaattggcccatctggtcttgtggcccccacccaggaatggactcagctcaagaggacagcttcagctccctaagattttatcttggacccgaacaatcagcactcccgacttactggccctctactcaccaagttatccttaaaaacctcaatccctgagttttcagagagactgatttgaataataataaaactccggtcttccacacggccgactctgc

SEQ ID NO: 127127 - DNA, 326 bp, Homo sapiens
  misc_feature (1)...(326): n = a,t,c or g
ggcacgaggtacttcccccaccttaatgacatctcaggttgcttcagagcctggagaggcaaagaagatggaagacaaggaaaaggataataagcttatctcagctaactcctcggagaagtatatctttcagaggccttcagtcttgattcacatgaagcactgagggccctaacagagcaagatgtaaaacttgnnnnnnnnnnnnnnnnnnnnnnnnnnnnnnnnnnnnnnnnnnnnnnnnnnnnnnnnnnnnnnnnnncccagatgcattataaatcatattttctctcaggcagaattatggacatgtcacatgtaaagaa

SEQ ID NO: 127128 - DNA, 1113 bp, Homo sapiens
atggcttcactcctgaagtcagcaagaccacaaacccactggaaggaagaaactccagagacatctaaacgtctgaaggaacaaactccggacataccatctttaagagctgtaacactcatcgcgaaggtccacagcttcattcctgaagtctgcgagaccaagaacccactggaaggaatacattctggacacattttggcgcccaatgtggggccttcaccaagcagaagacaggcaagggtgcaggttttcgagaatgtgtcagtaagggccactaaatctgatcttcctcagtcctccttgtggtctaggaggaaaactactgtttctgctgctgcgtcgaagaaaacaagcaaagaaatctccaaaggaccacaaaaacccccaggttatcggttacgtccccttcaagctgtagggggaggggaatttggcccaacccaggtacatgtccacttctccctctctgatttaaagcagatcaaggtagatctggggaagatttcagatgatcctgataggtatatagatgtcctacagggtttagggcagaccctcgatctctcttggagagatgtcatgctattgttagatcaaaccctggcctttaatgaaaagaatgcggctttagctgcagcccaagagtttggagatacctggtatcttagtgaagtaaatgacagaatgacagctgaagaaagggacaaattccctaccgaggatggggaaccaatcaagtgtgactgccaacaaattatagtccagacttatgccgctcaagatgatatcttagaagtccccttagctaatcctgaccttaacctatataccgatggaagttcatttgtggagaatgggatacgaagggcaggttatgccatagttagtgatgtaaccatacttgaaaggccaaatctcttccgggccatccaacaggtagtcaaagcctgtgaggtgtgccaaaggaagaatcctttggtccatcctcctaattacctgtacaagactctcaacttaacccactctctgttaaaccagtccaatccttccctggcaaatgactgttggctttgtagctctctatccgtcagcgcagagccatacaactaa

SEQ ID NO: 127129 - DNA, 1779 bp, Homo sapiens
atgcaggactgggcggcggccaaagcggatcggacagtgctccgagaacgggtgcgcatagaaattgcatcaacgcatatagcgctacagcacgccatagtgactggcgatgctgtcggaatggacgatatcccgcaagaggcccggcagtaccggcataaccaagcctatgcctacagcatccagggtgacggtgccgaggatgacgatgagcgcattgttagatttcatacacggtcccaggagaaaaaggaagaagctatcaccttactgaaggattccatcaaatatggtccagagtttgcagatgcatattcaagcttagcttcgttattggctgagcaggcccctgaaggcctttgtccgttgtcgtcaggactaggtcggtctcgcccaatggcgacagagtggtcacccgggaaccggatctgcgcggctccgtggcctaaagaggtggccgagcctgcttgcgtccctaggccgccttcccgggccctccacgccttaatggcctccgccgcgcggcgttcaagcggccgccatactttccggcccaccacgcccggcgccgcccaaaggcgctgcgtcccagcgactctgcgggggtttcgtcgaggcccggcaggcttgggtcgggagacgcggcggccggcggggtcccgtcggggagacgcagccgccgccatcagtcatccagccgccctcccgcggggcagggctcgggaccagcagcccgccatgcctgagcctcccaccccctccgtgggctcctgtgcggcccgagcctcccagattagcgcggccccctgctccacggcgcccagtcccatcgaccacccaagggctgaggagtgccggcgcaccgtgtgggactggcaggcagctccacctgcagcccaggtgcgggatccattgggtgaagccagctgggctcctgagtctggtggagatgtggagaacctttatgtcttgctcagggattgtaaatacaccagtcagcaccctgtgtctagctcagggtctgtgaatgcaccaatcgacactctgtatctagctactctgctcagggattgtaaatacaccaatcggcactctgtatctagctcaaggtttgtaaacacaccaatcagcaccgtgtctagctcagagtttgcgaatgcaccaatcgacactctgcatctagctactctgaaggaagaaactccgaacacatctgaacatcagaaggaacaaactccggacatgccgcctttaagaactgtaacagtcacggcgagggtccgcggcttcattcttgacgtcagtgagaccaagaacccaccaattccagacacattttggcgacccagatgggaccttcgccaatcaccaagcaatcaaaccctggcgtttaatgaaaagaatgcggctttagctgcagcccaagagtttggagatacctggtatcttagtcaagtaaatgacagaatgacagccgaagaaagggacaaattcccgactgaatttattccttctagtgggttcttggtcttgctgacttcaagaatgaagccgcagacatttgcggcgagtgttacagctcttaaagatggcgtgtctagagtttgttccttcagatgtgtccagagtttcttccttccgagtgctgattggtgcatttacaaacctttagctcgatacagagcgctgattggtgcatttttacagagtgctcattggtgcgtttacaaacctttagctagacacagtgtgctgattggtgcatttacaaacctttag

SEQ ID NO: 127130 - DNA, 2020 bp, Homo sapiens
atggcagagggcaaggcaggcggcgcggccggcctcttcgccaagcaggtgcagaagaagtttagcagggcccaggagaaggtgctgcagaaattggggaaagctgtagaaaccaaagatgaacgatttgaacaaagcgctagcaacttctaccaacaacaggcagaaggccacaagctgtacaaggacctgaagaacttccttagtgcagtcaaagtgatgcatgaaagttcaaaaagagtgtcagaaaccctgcaggagatctacagcagcgagtgggacggtcatgaggagctgaaggccatcgtatggaataatgatctcctttgggaagactacgaggagaaactggctgaccaggctgtaaggaccatggaaatctatgttgcccagttcagtgaaattaaggagagaattgccaagcggggtcggaaactcgtggactatgacagtgcccgacaccacctggaggcagtgcagaatgccaagaagaaagatgaggccaagactgccaaggcagaggaagagttcaacaaagcccagactgtgtttgaagatctgaaccaagaactactagaggagctgcctattctttataatagtcgtattggctgctatgtgaccatcttccaaaacatttccaacttgagggatgtcttctacagggaaatgagcaagctgaaccacaatctctacgaggtgatgagcaaactggagaagcaacattccaataaagtctttgtggtgaagggactgtcaagcagcagcaggcgctctttagtcatttctcccccagttcgaacagctacagtctccagtcctcttacctcacctactagtccctctacactttccttgaagagtgagagtgaatctgtctcagcaactgaagatctggcacctgatgcagcccaaggggaagacaattctgagatcaaggagctcttagaagaggaggaaatagagaaggaaggatctgaagcaagctcctctgaggaagatgagcctctaccagcctgcaatggccccgcccaggcccagccctctcctaccactgaaagggccaagtcccaggaggaagttctccccagctccacaactccatcaccaggcggagccctgagcccttcagggcagccttcatcatctgccacagaagtagtcctccgaacccgcaccgcaagtgaaggatctgaggcgaccaaaaaagacagcctctatccagaggacctcagcaccccctaggaggcctcctccacccagagccactgcaagccccaggccctgctcagggaacataccttccagccctacagcctctggaggggggtcagcgcaccagccctagggcctccttggggactgggactgcaagtcctaggacctccctagaggtctctcctaatccagaacgcaccagagaagccagtaagaactcctgaggccaaagaaaatgaaaacatccacaatcagaaccctgaagaactttgtacttcccccaccttaatgacatctcaggttgcttcagagcctggagaggcaaagaagatggaagacaaggaaaaggataataagcttatctcagctgactcctcggagggccaagaccagcttcaagtctccatggtaccagaaaacaacaacctcacagcacctgaacctcaagaagaggtatccacaagtgaaaatccacaactctgaagagaaactaccaagactcctcctgccccaaacctcgccagagaagctcttcaaccagagggtataggtcagagagatataagagccagcatccatccctgggttctcagtaggaatgctggtgctgtctaaagacctggcattaatggaggcggaggagcagccttacgggagggatggagggaggcaggctggggagaagagaacattagactcagggaatatttaattctggttttagcattattagaataagactttatacattaactaaagtggagctttaatcactataaaaagcaaaagtatctatagacat

SEQ ID NO: 127131 - DNA, 470 bp, Homo sapiens
taacattaggtggcaaatgggtcacagacactctgctgctttgcaccctctttgcacagaacgagggctgtgcacaccctagtttaggcggcatgcagtcaaggattcctgtcagttactcagaaaaactgcaagaaaaagccacctcagagaagtatcagggtagttctaagcagtgcatcatggtgtgggcacgcatgcttttcccgtcttctaggcatacttttgttgttttcttccgtgtgatgatggctgaactagagaagacggtgaaaaaaattgagcctggcacagcagcagactcgcagcagtgcagccgcatgctggacagctcctcaagcgtggccagagtggtggccaaggccaaggaggtgccgagagtgagcgagggccgcgagggctgccagcacattgtcacctctcagaagtacaaattaaacgtcaataagataccactatacatcaattag

SEQ ID NO: 127132 - DNA, 448 bp, Homo sapiens
aaaacaccgggaagatgttctgagcttactggaaaccttccagttggacacaaggctgcttcatcaccctgtgtgggcattccccaagattcaccaggacacgagacctcaccccaacatgtgccctctgcctcaaaaagacccctggaacttttagtttgcagagtcaaagctatgctcactctcaacaattgtagagaggctttctggctgggcaatctaaaaaaaccgggacttgcagggtgaagagattaagtcccaaaattcccaggagagcacagcagatgagagtgaggatgacatgtcatcccaggcctccaagagcaaagccactgaggatggtgaagaagacgaagtaagtgctggagaaaaggagcaagatagtgatgagagttatgatgactctgattagaccccagataaattgttgcctgcttctgtgtctcaa

SEQ ID NO: 127133 - DNA, 678 bp, Homo sapiens
atgactatcactggtgatcaggaagatgcttctagaggagaagatctaggacgtcagattgtgctgggcctcaaagcttcccttgccagacaattcctctgtcgggtgtggccaagtggggataaagagaagagcaacatctctaatgaccagctccatgctctgctctgtatctacctggagcacacagagagcattctgaaggccatagaggagattgctggtgttggtgtcccagaactgatcaactctcctaaagatgcatcttcctccacattccctacactgaccaggcatacttttgttgttttcttccgtgtgatgatggctgaactagagaagacggtgaaaaaaattgagcctggcacagcagcagactcgcagcagatttcatgaagagaaactcctctactgggaacatgggctgttcgagacttcagtatcctcattcaacttggattaaaggtattttgatagttcatcctgttctggcatgtatgtttgaagggtgaagagattaagtcccaaaattcccaggagagcacagcagatgagagtgaggatgacatgtcatcccaggcctccaagagcaaagccactgaggatggtgaagaagacgaagtaagtgctggagaaaaggagcaagatagtgatgagagttatgatgactctgattag

SEQ ID NO: 127134 - DNA, 373 bp, Homo sapiens
  misc_feature (1)...(373): n = a,t,c or g
actggcttgaaattcttgctgccagcacagaaatcaacctgaaatcaacctgaaatgctcaagcttggtgcnnnnnnnnnnnnnnnnnnnnnnnnnnnnnnnnnnnncagttttaccctcaccgtnnnnnnnnnnnnnnnnnnnnnnnnnnnnnnnnnnnnnnnnnnnnnnnnnngcaaggccactgtnnnnnnnnnnnnnnnnnnnnnnnnnnnnnnnnnnnnnnnnnntctctgaaaaacaggcagcagccccagtcaggggcttgtagataaaacccccatctaactgggacagagcacccagggaaaggggcggctgtgggtgcagcttcagcagaattaaacgctcatgcctgacggctgtgaagacn

SEQ ID NO: 127135 - DNA, 716 bp, Homo sapiens
  misc_feature (1)...(716): n = a,t,c or g
attggggaagggaagctaccgctttgtttgtaagtttccttaaaccacagggccttttcaacagtctgcggaatttctggagagtccactccaaacccttttgcctagatttctccacggaagcctccaaacaaccaaagattccggccttgttcctcctttggaattcctcatccaaaggacgcacccccccaaatgccagccagagttctcctgtatagggtgtctgttgtccctnnnnnnnnnnnnnnnnnnnnnnnnnnnnnnnnnnnnnnnnnnnnnnnnnnnnnnnnnnnnnnnnnnnnnnnnnnnnnnnnnnnnnnnnnnnnnnnnnnnnnnnnnnnnnnnnnnnnnnnnnnnnnnnnnnnnnnnnnnnnnnnntgaagctgcacccacagccgcccctttccctgggtgctctgtcccagttagatgggggttttatctacaagcccctgactggggctgctgcctgtttttcagagannnnnnnnnnnnnnnnnnnnnnnnnnnnnnnnnnnnnnnnnnacagtggccttgcnnnnnnnnnnnnnnnnnnnnnnnnnnnnnnnnnnnnnnnnnnnnnnnnnnacggtgagggtaaaactgnnnnnnnnnnnnnnnnnnnnnnnnnnnnnnnnnnnngcaccaagcttgagcatttcaggttgatatcaggatgatttctgtgctggcagcaataatttcaatccagt

SEQ ID NO: 127136 - DNA, 654 bp, Homo sapiens
atggatgaaactggaaaccattctcagcaaactaacacaggaacagaaaaccaaccactacatattctcactcataagtgggagttgagcaatgagaacacatggaaacatggaggggaacatcacacagctgggcctgctggagggtgggggggtgcactgtcccagagagatgggagttttatctataagcccctgactggggctgctgcctttctttcagagatgccctacccagagaggacgagtctagagatgcaggatgcagtctggctacagcagctttactatgctgcagtgggctccacccagtctgaatgtcccggcagctttgtttaccctgtgaggggaaaaccacttattcaagcctcagtaatggtggatgcccctccccccaccaagctccaatgtcccaggtcgacttctgactactgtcctggcaacaagaatttcaagccagtggatcttagcttgctgggctctgtgggtcccaataagatgaaccgggtacctcagttagaaatgcagaaatcacccacgttctgtgttgatccctttgggaactgcagaccggagctgttcctatttgaccatcttgcccagaacccaatagatcctttagataaaaaagccctcaaaacacatgtttcataa

SEQ ID NO: 127137 - DNA, 606 bp, Homo sapiens
ccccagaggaggcactctgtgccttagcagagctcgagcgctgtgctgggagagctgctgctctcttcagagccgagaggcagaaacgtttacgtctgctgaagctgcacccacagccgccccattcccccaggtgctctgtcccagggagatgggagttttatctataagcccctgaggggggctgctgcctttctttcagagatgccctgcccagagagcagttttacaggctttttacagacagatcagaccgagtccctgaaaactccgtgacagatgtttgtcacattgaaagtaaaatggagcctctccgcctcggcccacaaacgtctccattatgagaccaagcctggtctgctcgttcaccactctggtctttaatttcctcaaatgctcagagctctctcgtagcttagggtctttggagttgctgtttcctctccctaaatggttcctctcaatccttgcataattagtcattgagatatcagcttaaatagcacctgttcagtgagacatttttttcaccaggcattctgaggtagttatgtcgtcccttttgatctccgggtacggaccggaatctcgtaatgcatggtcatg

SEQ ID NO: 127138 - DNA, 887 bp, Homo sapiens
  misc_feature (1)...(887): n = a,t,c or g
ccaggaaatgaaataataaaaattagagcagaaatcaattcaattgaaaataggaaccagagaaaaataatgtaatcaaaagccagcgctttgaaaagatccataaaattgataagcccgctaaccgttcccctttccttgaaaaaggggctgcaagcaagggagccaagtggtctggctcgggtgggtcccacccccaaaggagcccagcaagctaagatccactggcttgaaattcttgctgccagcacagaaatcaacctgaaatcaacctgaaatgctcaagcttggtgcnnnnnnnnnnnnnnnnnnnnnnnnnnnnnnnnnnnncagttttaccctcaccgtnnnnnnnnnnnnnnnnnnnnnnnnnnnnnnnncaatcccgccgcagctcagcaaggccactgtnnnnnnnnnnnnnnnnnnnnnnnnnnnnnnnnnnnnnnnnnntctctgaaaaacaggcagcagccccagtcaggggcttgtagataaaacccccatctaactgggacagagcacccagggaaaagggcgggtgtggggggcaacttttcccaaaaattaaacgctttttgcctgaagggttggaaaaacaacagcagatctcccagcacagcactcaagtctctgctaagggcgcagacttgcttctcaacttgggtccctgaccttggggatcctgactgggagaaacccttcaataaggggacaacagacaccctctacacgggaaaactctgttgggcatctggtggggtgctctttggggaaggaaaattccaagggagggaaccgggccgattttttggttgtttggaactctcggtgggaaacctaaggaaaacgggtttggaagtggcctctcagaaatctccagaaac

SEQ ID NO: 127139 - DNA, 359 bp, Homo sapiens
  misc_feature (1)...(359): n = a,t,c or g
gcatagggctcggcccatattttaccaccttgattcagtgatcacaccaatggaaatggtttcagagttttgcttttgttttgtctttggcctaaaaaagcacacttttatgagttcagtttctgcgagtcagatgtccaggcacagactagctgggccccctcctcagaacctcacacagctgcaatcaagggttggctgggttgggttttgttgaaggctttgctggaaaagannnnnnnnnnnnnnnnnnnnnnnnnnnnnnnnnnnnntgttcagacctccaggtctgagggcctgggatactgtctggctcaaggctggaagctactttcagttcttagaggctacctgtggtc

SEQ ID NO: 127140 - DNA, 1338 bp, Homo sapiens
atgactgcgcccaagattgcatacaaaggtgcacacttcggggagcaaaattatggattccggatgctcataatccggaacaaaggagccacagaagacatgcctgcttcaccttcaccttcagccatgatagtgagtttcctgaggtctctgcaaccatgcttcctgtacagcctgcagaactttataaaactagacaaatatatgaagcaactgttctcaggctttggaccactgaagagagtccttgaagagacaaggagaaaaagagcattaaaacacgaggccctaatgcaggaaacagtggccctgatcatagttgcatttggccttaacgtgtcatatgctggatgcaatcagctgtcgtttatggaaagcttacaagctgagtgcgtgaagccagggggcttaaaaactgaactcataaaagtgtgcttttttaggccacagacaaaacaaaagcaaaaatctgaaaccatttccattggtgtgatcactgaatccagtggtcaatatgggccaacagggatagggatgaggcctcctaaacagggcttccaatactttcgcaagccccgttactgggggaacctttatgccgaaaattaccacaagtttcccagggtccttcctaagcacactgctattcatggcatctttctggcagctccccagtctggaaggtttacatccctgataaatgatgtctctatggataggaatctggatagtgctgggaatgaagtagtgaataaaaacatcaagaatcgccattctcaaggcgctaacattccagtgaggaagcggccagcaagcagactcctgagaaggacacacggcacctcagagagcagcgtgctagagaggagaacaagcgggaagggcattagagatggctggaaggagggggatgtggttttaaattggttggtggtaaaacactgtctccctgagaagcagacatttgaacaaagacttgaaggaggggaccaaatctactccttggataaaggcatggtcaggtctaatgctgttgctgctgctgctgccgctgctgctgatgatgatgacgacgatgactcagcgtgtggtgatgaagcacaaggtgcccccaccatcaggctgctgagaagtctggaaggggatcaagagcaacaagcagacagctctgagagcaggtcttttaatgatctgtgctgtgggaaaccagacagcacagggtcctgtcccacagcctggagttggaggacaagtggctgtgaacagcagaagaaatacggtcgtgtgcagatcacagcacgagcagccacagatggctggggacccaaggagtcttaa

SEQ ID NO: 127141 - DNA, 759 bp, Homo sapiens
atggggagaaaccacaatagaaaagctgaaaattctaaaaaccagaacccctcttatcctccaaaggattgcagctcctcgccagcaacggaacaaagctggatggagaatgactttcacaagttgacagaaatatgcttcagaagatcagtaataacaaacttctccaagctaaaggaggatgttcaaacccatcgcaaggaagctgaaaaccttgaaagaagattagaagaatggctaactggagtaaacagcatacagaagaccttaaatgacctgacagagctgaaaaacatggcacgagaactactgttagaagttctagccagggtaatcaggcaggagaaagaaataaagggtattcaattaagaaaagaggaagtcaaattgtccctgtttgcagatgacgtgactgtatatttagaaaaccccatcgtctcagcccaaaatctccttaagctgataagcaacttcagcaaagtctcaggatacaaaatcaatgtgcaaaaatcacaagcattcttatacaccaacaacagacaaacagagagccaaatcatgcatgacttcccattcacaattgcttcaaagagaataaaatacctaggaatccaacttacaagagatgtgaaggacctcttcaaggagaactacaaaccactgctcaacgaaataaaagaggacacaaacaaatggaagaacattccatgcccatggataggaagaatcaatatcgtgaaaatggccatactacccaag

SEQ ID NO: 127142 - DNA, 604 bp, Homo sapiens
accaaatctacgtctgattggtgtacctgaaagtgacggggagaatgtaaccaagttggaaaacactcttcaggatattatccaggagaacttccccaacctagcaaggcagaccaacattcaaattcaggaaatacagagaacaccacaaagatactcctcaagaagagcaaccacaagacacataattgtcagactcaccaaggttgatatgaaggaaataatgttaagggcagccagagagaaagatgacatgattgcatatttagaaaaccccatcatctcagcccaaaatctccttaagctgataagcaacttcagcaaagtctcaggatacaaaatcaatgtgcaaaaatcacaagcattcttatacaccaataacagacaaacagagagccaaatcatgagtgaaatcccattcacaactgcttcaaagagaataaaatacctaggaatccaacttacaagggatgtgaaggacctcttcaaggagaactacaaaccactactcaacaaaataaaagaggacaaaaacaaatggaagaacattccatgctcatggataggaagaatcaatatcgtgaaaatgggtatactgcccaag

SEQ ID NO: 127143 - DNA, 558 bp, Homo sapiens
atgaacattgatgcaaaaatcctcaataaaacactggcaaaccgaatccagcagcacatcaaaaagcttatccaccatgatcaagtgggcttcatccctgggacgcaagtgttggaagttctggccagggcaatcaggcaggagaaggaaataaagggcactcaattaggaaaagaggaagtgaaattgtccctgtttgcagatgacatgattgtatatctagaaaaccccatcgtctcagcccaaaatctccttaagctgataggcaacttcagcaaagtctcaggatacaaaatcaatgtacagaaatcacaagcattcttatgtactaataacagacaaacagagagccaaatcatgagtgaactcccattaacaattgcttcaaagagaataaaatacctaggaatccaacttacaagggatgtgaagcacctcttcaaggagaactacaaaccactgctcaatgaaataaaagaggatacaaacaaatggaagaatattccatgctcatgggtaggaagaatcaatatcgtgaaaatggccatactgcccaag

SEQ ID NO: 127144 - DNA, 1055 bp, Homo sapiens
aaatacaaactaccatcagagaatactataaacacctctatgcaaataaactagaaaatctagaagaaatggataaattcctggacacatataccctcccaagactaaactgggaagaatttgaattgctgaatagaccaataacaggctctgaaattgaggcagtaatcaatagcctaccaacccaaaaaaaaagtccaggaccaggtgaattcacagctgaattctaccagagatacaaagagaagctggtaccattccttctgaaactattccagtcaatagaagaagagggaatcctccctaactcattttatgaggccagcatcatcctgataccaaagcctggcagagacacaacaaaaaacgagaattttagaccaatatccctgatgaacatcaatgcgaaaatcctcaataaaatactggcaaagcaaatccaacagtacatcaaaaagcttatccaccacaaacaagttggcttcatccctgggatgccaggctggttcaacatatgcgaatcgataaacataaatcatcatattaacagaaccaaagacaaaaaccacatgattatctcaatagatgcagaagaggccttcgacaaaattcaacagcccttcatgctaaaacctctcaataaattaggtattgatggaacgtatctcaaaataataagacctatttatgacaaacctacagccaatatcatactgaatgggcaaaaactggaagcattccctttgaaaactggcacaagacagggatgccctctctcaccactcttattcaacatagtgttggaagttctggccagggcagtcaggcaagagaaagaaataaagggtattcaattaggaaaagaggaagtcaaattgtccctgttgagaataaaatacctaggaattcaacttacaagggatgtgaaggacctcttcaaggagaactacaaaccactgctcaacgaaataaaagaggacacaaacaaatggaagaacattccatgctcatggataggaagaatcaatatcgtgaaaacggccatactgcccaag

SEQ ID NO: 127145 - DNA, 466 bp, Homo sapiens
atggataaatttctcgacacatacactctcccaagactaaaccaggaagaagttgaatctctgaatagaccaataacaggagctgaaattgtggcaataatcaatagcttaccaaccaaaaagagtccaggaccagatggattcacagctgaattctaccagaggctgataagcaacttcagcaaagtctcaggatacaggatcaatgtacaagaatctacaagcattcttatacaccatcaacagacaaacagagagccaaatcatgagtgcactcccactcacaattgcttcaaagagaataaaatacctaggaatccaacttacaagggatgtgaaggacctcttcaaggagaactacaaaccactgctcaacgaaataaaagaggatacaaacaaatggaagaacattccatgctcatgggtaggaagaatcaatatcgtgaaaatggccatactgcccaag

SEQ ID NO: 127146 - DNA, 850 bp, Homo sapiens
agctcctgaaggaagcactaaacatggaaaggaacaacgggtaccagccactgcaaaaacatgccaaactgtaaagaccatcaatgctaggaagaaactgcatcaactaacagtgttggaagttctggccagggccatcagacaagagaaagaaataaagagtattccattaggaaaagaggaagttaaattgtccctgttggcagatgatatgattgtatatttagaaaaccccatcatctcagcccaaaatctccttaagcagataagcaacttcagtaatgtctcaggatacaaaatcaatgtgcaaaaatcacaggcattcctatacaccaataacagacaaacagagacccaaatcatgagcaaactcccattcacaattgctacaaagagaataaaacaccgaggaatccaacttacaagggatgtaaagaacctcttcaaggagaactacaaactactgctcaacgaaataaaagaggacacaaacaaatggaagaacattccatgctcatggataggaagaatcaatatcgtgaaaatggccatactgcccaaggtaatttatagattcaatgccatccccatcaagctaccaatgactttcttcacagaattggaaaaaactactttaaagttcatatggaaccaaaaaagagcctgcattgccaaaacaatcctaagcaagaagaacaaagctggaggcaacacactacttcaaactatactacaaggctacagtaaccaaaacagcatggtgctggtaccaaaacagagagatagaccaatggaacagaacagagccctcagaaataacaccacacatctacaaccatctgatctttga

SEQ ID NO: 127147 - DNA, 625 bp, Homo sapiens
atggataaattcctggacacatacaccctcccaagactaaaccaggaagaagttgaatccctgaatagaccaataacaggctctgaaattgaggcaataattaatagcttaccaaccaaaaaaagtccaggaccagatggattcacagccgaattctaccagaggtacaaggaggagctggtaccattccttctgaaactattccaatcaatagaaaaagaaggaatcctctctaactcattttatgaggccagcatcatcctgataccaaagcctggcagagacacaacaaaaaagaagaactttagaccaatagccctgatgaacattgatgcaaaaatcctcagtaaaatactggcaaaccgaatccagcagcacatcaaaaagcttatccaccatgatcaagtgggcttcatccctggaatgcaaggctggttcaacatacacaaatcaataaacaataaaatacctaggaatccaacttacaagggatgtgaaggacctcttcaaggagaactacaaaccactgcttcacgaaataaaagaggacacaaacaaatggaagaacattccatgctcatggagaggaagaatcaatatcgtgaaaatggccatactgcccaag

SEQ ID NO: 127148 - DNA, 745 bp, Homo sapiens
accactggcaagactaataaagaaaaagagaagaatcaaatagatgcaataaaaaatgataaaggggatatcaccacagatcccacagaaatacaaactaccatcagagaatactacaaacacctctacacaaataaactagaaaatctagaagaaattgataaattccttgacacatacacactccccagactaaaccaggaagaagttgaatctctgaatagaccaataacaggatctgaaattgtggcaataatcaatagcttaccaatcaaaaagagtccaggaccagatggattcacagccaaattctatgagaggtacaaggaggaactggtacccttccttctgaaactattccaatcaatagaaaaagagggaatcctccctaactcattttatgaggctagcatcatcctgataccaaagcctggcacagacatgaccaaaaaagagaattttagaccaatattcttgatgaacattgatgcaaaaatcctcagtaaaatactggcaaaccgaatccagcagcacatcaaaaaacttatccactgtgatcaagtgggcttcatccctgagaataaaatacctaggaatccaacttacaagggatgtgaaggacctcttcaaggagaactacaaaccactgctcaaggaaataaaagaggatacaaacaaatggaagaacattccatgctcatgggtaggaagaatcaatatcgtgaaaatggtcatactgccgaag

SEQ ID NO: 127149 - DNA, 742 bp, Homo sapiens
atgaacatcgatgcaaaaatcctcaataaaatactggcaaaccgaatccagcagcacatcaaaaagcttatccaccatgatcaagtgggcttcatccctgggatgcaaggctggttcaacatacgcaaatcaataaacgtaatctggcatataaacagaaccaaagacaaaaaccacatgattatctcaatagatgcagaaaaggtcttcgacaaaattcaacagcccttcatgctaaaaactctcaacaaattaggtattgatgggacatatctcaaaatactaagagctatttatgacaaacccacagccaatatcatactgaatgggcaaaaactggaagcattccctttgaaaactggcacaagacagggatgccctctctcaccactcctattcaacatagtgttggaagttctggccagggcaatcaggcaggagaaagaaataaagggtattcaattaggaaaagaggaagtcaaaccgtccctgtttgcagatgacgtgattgtatatttagaaaaccccatcatctcagtccaaaatctccttaagctgataagcaacttcagcaaaaataaaatacctaggaatccaacttacaaggaatgtgaagtacctcttcaaggagaactacaaatcactgctcaacgaaataaaagaggacacaaacaaatggaagaacattccatgctcatggataggaagaatcaatatcgtgaaaatggccatactgcccaag

SEQ ID NO: 127150 - DNA, 1461 bp, Homo sapiens; identical to SEQ ID NO: 122738

SEQ ID NO: 127151 - DNA, 1641 bp, Homo sapiens; identical to SEQ ID NO: 121942

SEQ ID NO: 127152 - DNA, 1098 bp, Homo sapiens; identical to SEQ ID NO: 117582

SEQ ID NO: 127153 - DNA, 2916 bp, Homo sapiens; identical to SEQ ID NO: 120941

SEQ ID NO: 127154 - DNA, 1887 bp, Homo sapiens
agcctttgacaaaattcaacaacccttcatgctaaaaactctcaataaattaggtattgatgggatgtatttcaaaataataagagctatctatgacaaacccacagccaatatcatactgaatgggcaaaaactggaagcattccctttgaaaactggcacaagacagggatgccctctctcaccactcctattcaacatagtgttggaagttctggccagggcaattaggcaggaggaggaaataaagggtattcaattaggaaaagaggaagtcaaattgtccctgtttgcagacgacatgattgtatatctagaaaaccccattgtctcagccccaaatctccttaagctgataagcaacttcagcaaagtctcaggatacaaaatcaatgtacaaaaatcacaagcattcttatacaccaacaacagacaaacagagagccaaatcatgagtgaactcccattcacaattgcttcaaagagaataaaatacctaggaatccaacttacaagggatgtgaaggacctcttcaaggagaactacaaaccactgctcaaggaaataaaagaggatacaaacaaatggaagaacattccatgctcatgggtaggaagaatcaatatcgtgaaaatggccatactgcccaaggtaatttacagattcaatgccatccccatcaagctaccaatgactttcttcacagaattggaaaaaactactttaaagttcatatggaaccaaaaaagagcccgcatcaccaagtcaatcctaagccaaaagaacaaagctggaggcatcacactacctgacttcaaactatactacagggctacagtaaccaaaacagcatggtacttgtaccaaaacagagatatagatcaatggaacagaacagagccctcagaaataacactgcatatctacaactatctgatctttgacaaacctgagaaaaacaagcaatggggaaaggattccctgtttaataaatggtgctgggaaaactggctagccatatgtagaaagctgaaactggatcccttccttacatcttatacaaaaatcaattcaagatggattaaagacttaaacgttagacctaaaaccataaaaaccctagaagaaaacctaggcattaccattcaggacataggcatgggcgaggacttcatatctaaaacaccaaaagcaatggcaacaaaagacaaaattgacaaatgggatctaattaaactaaagagcttctgcacagcaaaagaaactaccatcagagtgaacaggcaacctacaaaatgggagaaaattttcacaacctactcatctgacaaagggctaatatccagaatctacaatgaactcaaacgaatttacaagaaaaaaacaaacaccaccatcaaaaagttggcgaaggacatgaacagacacttctcaaaagaagacgtttatgcagccaaaaaccacatgaaaaaatgctcatcatcactgggcatcagagaaatgcaaatcaaaaccacaatgagataccatctcacaccagttagaatggcaatcattaaaaagtcaggaaacaacaggtgctggagaggatgtggagaaatagattttcagcaaactaacacaggaacagaaaaccaaacgctgcatattctcactcataagtgggagttgaacaatgagaccacacggacacagggaggggaacatcatacactggggcttgtcgaagggtggggggctaggggagggatagcatggaatggagaaggccaaagaggagaggccagggaagatgctaaatatgtggtccatgtagatattgaaattaccaagatgtcaaggatagaggtacaacaaaagcctatgagcttttggccatcttctgt

SEQ ID NO: 127155 - DNA, 975 bp, Homo sapiens
atggtactattccttctgaaactttcccaatcaatagaaaaagagggaatcctccctaattcattttatgaggccaacatcatcctgataccaaagcctggcagagacacaacaaaaaaagagaattttagaccaatatccctgatgaacatcgatgcaaaaatcctcaataaaatactggcaaacccaatccagcagcacatcaaaaagcttatccaccatgatcaagtgggcttcatccctgggatgcaaggctggttcaacataagcaaatcaataaatgtaatccatcatattaacagaaccaaagacaacaaccacatgattatctcaatagatgcagaaaaggcctttgacaaaattcaacagcccttcatgctaaaaactctcaataaactagcgataagcaacttcagcaaattctcgggttacaaattcaatgtgcaaaaatcacaaggattcctatacaccaataatagacaaacagagaggcaagtcatgagtgaactcccattcacaattgcttcaaagacaataaaataccaaggaatccaacttacaagggatgtgaaggacctcttcaaggagaactacaaaccactgttcaacgaaataaaagaggacacaaacaaatggaagaaaattccatgctcatggataggaagaatcaatattttgaaaatggccatactgcccaaggtaatttatagattcaatgccatccccatcaagctaccaatgactttcttcacagaattggaaaaacctactttaaagttcatgtggaaccaaaaaagagcccacattgccaagtcagtcctaagccaaaagaacaaagctggaggcatcatactacctgacttcaaactatactacaaggctacagtaaccaaaacagcatggtactggtaccaaaacagagatatagaccaatggaacagaatagagcccccggaaataataccacacatctag

SEQ ID NO: 127156 - DNA, 876 bp, Homo sapiens
atggaagatcaaatgaatgaaatgaagcaagtagagaagcttagagaaaaaagagtaaaaagaaatgaacaaaacctccaagaaatatgggactatgtgaaaagaccaaatctacgtctgattggtgcacctgaaagtgacggggagaatggaaccaagttggaaaacactctgcaggatattatccaggagaacttccccaatctagcaaggcaggcagacattcaaatttgggaaatacagagaatgccacaaagattatcctcgagaagagcaactccaagacacataattatcagattcaccgaagttgaaatgaaggaaaaaatgttaagggcagccagagagaaagtgttggaagttctggccagggcaatcaagcaggataaagaaataaagggcattcaattaggaaaagaggaagtcaaattgtccctgtttgtagatgacaggattgtatatttagaaaaccccatcatctcagcccaaaatctccttaaactgataagcaacttcagcaaagtctcaggatacaaaatcaatctgcaaaaatcacaagcatccttatacaccaataacagacaaacagagagccaaatcatgagtgaactcccattcaaaattgcttcaaagagaataaaatacctaggaatccaacttacaagggatgtgaaagacctcttcaaggagaactacaaaccagtgctcaacgaaataaaagaggacacaaacaaatggaagaatattccatgctcatggataggaagaatcaatatcatgaaaacggccgtactgcccaaggtaatttatagattcaatgccatccccatcaagctaccaatgactttctacacagaattggaaaaaactatttaa

SEQ ID NO: 127157 - DNA, 1368 bp, Homo sapiens; identical to SEQ ID NO: 119509

SEQ ID NO: 127158 - DNA, 870 bp, Homo sapiens
atgggagactttaacaccccactgtcaacattagagagatcaacaagacagaaagttaacaaggatatccaggaattgaactcagctctgcaccaagcaaacctaatagacatctacataactctccacgccaaatcaacagaatatacattcttctcagaaccagctcacacttattccaaaattggccgcatagttggaagtaaagcactcctcagcaaatgtaaaagaacagaaattacaaaaaactgtctctcagaccacagtgcaatcaaactagaactcaggattaaaaaactcattcaaaactgctcaactacatggaaactgaacaacctcctcctgaatgactactggctgataagcaacttcagcaaagtctcagcatacaaaatcaatgtgccaaaatcacaagcattcttatacaccaataacagacaaacagagagccaaatcaagagtgaactcccactcacaattgcttcaaagagaataaaatacctaggaattcaacttacaagggatgtgaaggacctcttcaaggagaactacaaaccactgctcaacgaaataaaagaggacagaaacaaatggaagaacattccgtgctcatggataggaagaatctgtatcatgaaaatggccatactgcccaagataatttatagtttcaatgccatccccatcaagctaccaatgactttcttcacagaatttgaaaaaactactttaaagttcatatggaaccaaaaaagagcccgcattgccaagacaatcctaaaccaaaagaacaaagctggaggcatcatgctacctgacttcaaactatactacaaggctacagtaaccaaaacagcatggtactggtag

SEQ ID NO: 127159 - DNA, 594 bp, Homo sapiens
atggtgttggaagttctggccagggcaatcaggcaggagaaagaaataaagggtattcaattaggaaaagaggaagtcaaattgtccctgtttgcagatgacatgattgtatatctagaaaaccccatcgtctcagcccaaaatctccttaagctgataagcaacttcagcaaagtctcaggatacaaaatcaatgtgcaaacatcacaagcattcttatacggcaataacagaaaaacagagagccaaatcatgagaaaactcccattcacaattgcttcaaagagaataaaatacccaggaatccaacttacaagggatgtgaaggacctcttcaaggggaactacaaaccactgctcaacgaaataaaagagaacacaaacaaatggaagaactttccatgttcatggataggaagaatcaatattgtgaaaatggccatactgcccaaggtaatttatagattcaatgccatccccatcaagctaccaatgactttcttcatagaattggaaaaaactactttaaagttcatatggaaccaagtcaatcctaagccaaaagaacaaagctggagacatcacgctacctga

SEQ ID NO: 127160 - DNA, 993 bp, Homo sapiens
atggagctgaaaaccacagcacaagaacttcgtgttgcatgcacaagcttcaatagcagattcgatcaagtggaagaaaggatatcagtgattgaagatcaaattaatgaaataaaaaccaacgacaaaaaccacatgattgtctcaaaagatgcagaaaaggccttcgataaaattcaacacccattcatgttaaaaactctcaatcaactaggtattgatggaatatatctcaaaataataagagctatttatgacaaacccacagccaatatcatactgaatgggcaaaaactggaagcattccctttgaaaactggcacaagacaaagatgccctatctcagcactcctattcaacatagtgttggaagttctggccagggcaatcaggcaagagaaaaaaataaagggtattcaattaggaaaagaggaagtcaaattgactctgtttgcagatgacatgattgtatatttagaaaaccccatcagctcagcccaaaatctccttaagctgataagcaaagtctcaggatacaaaatcaatgtgcaaaaatcgcaagcattcctatacaccaataatagacaaacagagagtcaaatcatgagtgaactcccattcacaattactacaaagagaataaaatacctaggaatccaacttacaagggatgtgaaggatctcttcaaggagaactacaaaccactgctcaatgaaataaaagagtacacaaacaaatggaagaacattccatgctcatggataggaagaatcaatatcttgaaaatggccatactgctcaaggtaatttatagattcaatgccatccccatcaagctaccactgactttcttcacagaattggaaaaaactactttaacgttcctatggaaccaaaaaagagcctgcaaagccaagacaatcctagcaaaaagaataaacctggaggcatcacactaccggacttcaaactatactacaaggctacagtaa

SEQ ID NO: 127161 - DNA, 2112 bp, Homo sapiens
atgggagactttaacaccgcactgtcaacattagacagatcaatgagacagaaagttaataaggatatccaagaattgaactcagctctgcaccaagcagacctaacagacatctacggaactctccaccccaaatcaacagaatgtacattcttctcagcaccacaccacacctattccaaaattgtccacatagttggaagtaaagcactcctcagcaaatggaaaagaagagaaattataacaaactgtctctcagaccacagtgcaatcaaactagaactcaggattaagaaactcaatcaaaactgctcaactacatggaaactgaacaacctgctcctgaataattactggactaataaagaagaaaagagagaagaatcaaatagatgcaataaaaatgataaaggggatatcaccaccaatcccacagaaatacaaactaccatcagagaatactataaacacctctatgcaaataaactagaaaatctagaagaaatggataaattcctcgacacatacaccctcccaagactaaaccaggaagaagttgaatctctgaatagaccaataacaggctctgaaattgaggcaataattaatagcttaccaaccaaaaaaagtccaggaccagatggattcacagccgaattctaccagaggatgaactacatttctttcaaaagcacctggaaaattataaagaatgcatacagtttagcccatagccgagaactgagagatggaggtcaaagtcagaaaatctgcgaacagttttatattttgttcctgacacacttctccagatatgagcgacatgttaaagaacatacagtggagaaatccaactcatacagtcctgaaaagattagaaaagaagaatctaaacaggatacaaagctcaatgatgaaaatgactctgaaaggaaagcctcagttcatctgctggaaacagacaactgtgcttctgcaatgcatcactgttttgttttgtttgtggcaaagccagtagctcattatgaagtgggtattgactttatgattgccaaacaaatgcacagggatattttatcaagagctgtggattcttatttactgaacagaattcgttccaatgtccagaataatatgctgaagcagccatttacaaaagcaagccacaaccctttaccattgtccttcagcaggcagccagcctcagggggtctgcagatagcaacttgtggcaccaatgtcttcctttatataatgcacgtatcaccatcacgatacgagagcaactcgaagaatcttaacgtataccacggtaaacacctacggcacccaactcagtctacagcaggacacccaaaagttaaattcactttggctgtggctgtgctccaggggtctgggactgtctgcatctctgaaacaactcctgtgttggaagttctggccagcgcaatcaggcaggagaaggaaataaagggtattcaattaggaaaagaggaagtcaaattgtccctgtttgcagacgacatgattgtttatctagaaaaccccatcgtctcagcccaaaatctccttaagctgataagcaacttcagcaaagtctcaggatacaaaatcaatgtacaaaaatcacaagcattcttatacaccaacaacagacaaacagagagccaaagcatgggtgaactcccattcacaattgcttcaaagagaataaaatacctaggaatccaacttacaagggatgtgaaggacctcttcaaggagaactacaaaccactgctcaaggaaataaaagaggacacaaacaaatggaagaacattccatgctcatgggtaggaagaatcaacatcgtgaaaatggccatactgcccaaggtaatttacagattcaatgccatccccatcaagctaccaatgactttcttcacagaattggaaaaaactactttaaagttcatatggaaccaaaaaagagcccgcatcgccaagtcaatcctaagccaaaagaacaaagctggaggcatcacactacctgacttcaaactatactacaaggctacagtaaccaaaacagcatggtactggtaccaaaacagagatatagattaa

SEQ ID NO: 127162 - DNA, 846 bp, Homo sapiens
atggcacgagaactatgtgacgaatgcacaagcttcagtagccaattcaatcaacgggaaaaaaggatatcagtgattgaagatcaaatgaatgaaatgaagcgagaagagaagtttagagaaaaaagagtaaaaagaaacaaacaaagcctccaagaaatatgggactatgttaaaagacaaaatctatatctgattggtatacctgaaagtgatggggagaatggaaccaagttggaaaacattctgcaggatattatccaggagaatttccccaacctagcaagacaaacagagagccaaatcatgagtgaactcccattcacaattgcttcaaagagaataaaatacctaggaatccaacttacaaggaacgtgaaggacctcttcgaggagaactacaaaccactgctcaatgaaataaaagaggatacaaacaaatggaagaacattccatgctcatggataggaagaatcaatatcatgaaaacggccatactgcccaaggtaatttatagattcaatgccatccccatcaagctaccaatgactttcttcacagaattggaaaaaactactttaaagttcacatggaaccaaaaaagagcccgcattgccaagacaatcctaagccaaaagaacatagctggaggcatcatgctacctgacttcaaactatactacaaggctacagtaaccaaaacagcacagtactggtaccaaaacagagatatagaccaatggaacagaagagagccctcagacatagtaccacacatctacaactatctgatatttgacaaacctgacaaaaacaagaaattggggaaaggattccctatttaa

SEQ ID NO: 127163 - DNA, 1206 bp, Homo sapiens; identical to SEQ ID NO: 117980

SEQ ID NO: 127164 - DNA, 1221 bp, Homo sapiens
atggaaagtgaggtgctaaatgtgctgttcatgggcgtcattgcccttagctcaggcaacaatatcttgggctttaacactgacaactttgtcatagacatcagtagactcaccagcatcaacaaaacagttactttgacagttatgcagaatgatgcagattgtcctcagtggtcaatagtgaaagagtctccatgttttgaaaggagcaaaagatttgaagatgagttactaaagaatctagttcaggctagcagaactgctggtcctccttatttacttgttcatgagagcacttctggaactgacaagattctaaatcaagtgagtttccctggtaccagcgctaagactattggtttcatagcctgtctcatccaggttgaactgtctagcagtagagctacagtgttggaagttctggccagggcaattaggcacgagaaggaaataaagggtattcaattaggaaaagaggaagtcaaattgtctctgtttgcagatgacatgattgtatatctagaaaactccattgtctcagcccaaaatctccttaagctgataagcaacttcagcaaagtctcaggatacaaaatcaatgtacaaaaatcacaagcattcttatacactaataacagacaaacagagagccaaatcatgagtgaactcccattcacaattgcttcaaagagaataaaatacctaggaatccaacttacaagggatgtgaaggacctcttcaaggagaactacaaaccactgctcaacgaaataaaagaggatacaaacaaatggaagaacattccatgctggtgggtaggaagaatcaatatcgtgaaaatggccatactgcctaaggtaatttacagattcaatgccatccccatcaagctaccaatgtctttcttcacagaattggaaaaaaccactttaaagttcatatggaaccaaaaaagagcccgcattgccaagtcaatcctaagccaaaagaacaaagctggaggcatcacactacctgacttcatactatactacaaggctacagtaaccaaaacagcatggtactggtaccaaaacagagatatagatcaatggaacagaacagagccctcagaaataacactgcatatctacaactatctgatctttgacaaactgagaaaaacaagcaatggggaaaggattccctatttaataaatggtgctgggaaaactggctag

SEQ ID NO: 127165 - DNA, 1095 bp, Homo sapiens
atggctcacacctgtaatcccagcactttgggaggccgaggtgcccccatcgaccccatcttcttgctgagccgcaccgtttccaacgtcatcagttccgttgtcttcagaagtcgcttcgactatgaggacaagcagttcctgaatctgctgcggttgatcaatgagagtttcattgagatgagcactccctgggcacagctatatgacatgtactctggaatcatgcagtatttgccaggaagacacaatctcatctactacttggtagaagagctcaaggacttcattgcctccagggtcaagatcaacgaagcatcctttgacccccaaaaccctcgggacttcattgactgctttctcatcaagatgcaccagggcaccgatgtcatcaccctccttaacaccgtccactacgaccccagccagttcctgacgccccaggagttcaaccccgagcattttttggatgccaatcagtccttcaagaagagtccagccttcatgcccttctcagctgcccaaaatctctttaagctgataagcaacttcagcaaagtctcaggatgcaaaatcaatgtgcaaaaatcacaagcattcttatacaccaataacagacaaacagaaagccaaatcatgagtgaacgcccattcacaactgcttcaaagagaataaaatacctagaaatccaacttacacgggatgtgaaggaccttttcaaggagaactacaaaccactgctcaacgaaataaaagaggatacaaacaaatggaagaactttccatgctcatggataggaagaatcagtatcgtgaaaatggccatactgcccaaggtaatttatagattcagtgccatccccatcaagctaccaatgactttcttcacagaattggaaaaaactactttaaagttcatatggaaccaaaagagagcccacattgacaggacaatcctaagcaaaaagaacaaagctggaggcatgatgctacctgacttcaaactatactacaaggctacaataaccaaaacagcatggtactggtaccaaaacagagatacagaccaatggaacagaacagaggcctcataa

SEQ ID NO: 127166 - DNA, 931 bp, Homo sapiens
atgttggaagttatggccagggcaatcaggcaagagaaagaaataaagggcattcaattaggaaaagaggaagtcaaattgttcctgtttgcggataacatgattgtgtatttagaaaaccccatcgtctcagcccaaaatctccttaagctgataagcaacatcagcaaagtctcaggatacaaaatcaatgtgcaaaaatcacaagcattcctatacaccaataacaggcaaccacagagccaaatcatgactgaactcccattcacaattgctacaaagagaataaaatacctaggaatccaacttacaagggatgtgaaggacctcttcaaggagaactacaaaccactgctcaacgaaacaaaagaggacacaaacaaatggaagaacattccatgctcatggataggaagaatcaatatcgtgaaaatagccatactgcccaaggtaatttatagattcaatgccatccccatcaagctaccaatgactttcttcacaaaactggaaaaaactactttaaagttcatatggaaccaaaaaagagcttgcattgccaagacaatcctaagccaaaggaacaaagctggaggcatcacactacgtgacttcaaaccatactacaaggctacagaaaccaaaacagcaagtgaaatgaagtactatttggagaataagatacctttcaaggttttgcatatggtttataatgttcccacacatcctccttttattggtgatcttcatcccaataccaaggtagtgtctctccctccaaacattacctctttgattgaaccaatgaatcaaggtgttatatcagcttttaaggactgctacctgaggaagacctttgtccaggctgttgctacacctgagggagagactgagatgacagtgatgcaattctggaaggattacaacacag

SEQ ID NO: 127167 - DNA, 1296 bp, Homo sapiens; identical to SEQ ID NO: 119528

SEQ ID NO: 127168 - DNA, 544 bp, Homo sapiens
atgagtgaaatctcattcacaattgcttcaaagggaataaaatacctaggaatccaacttacaagggatgtgaaggacctcttcaaggaaaactacaaaccactgctcaacgaaataaaagaggacacaaacaaatggaagaacattccaggctcatggataggaataatcagtatcgtgaaaatggccatactgcccaaagtaatttatagattcaatgccatactcatcaagctacaaatgactttctgcacagaattggaaaaaactactttaaagttcatatggaaccaaaatagagcccacattgccaagacaatcctaagccaaaagaacaaagctgggggcatcacgctacctgacttcaaactatactacaaggctacagtaaccaaaacaacatgccccgccaccctcaagccacaccccattgatcatttgctaaagattttagtacctggctctggcctgctttccaccgtcaacactcacatcaaggcacctggatctcttctccgccggcaatcctgccttccgccttcag

SEQ ID NO: 127169 - DNA, 718 bp, Homo sapiens
atgacatgattttatatctagaaaaccccatcgtctcagcccaaaatctccttaagctgataggcaacttcagcaaattctcaggatacaaaatcaatgtgcaaaaatcacaagcattcttatacatcaataacatacaaacagagagccaaatcatgagtgaactcccattcacaattgcttcaaagagaataaaatgcctaggaatccaacttacaagggatgtgaaggacctcttcaaggagaactacaaaccactgctcaaggaaataaaagaggatacaaacaaatggaagaacattccatgctcatgggtaggaagaatcaatatcatgaaaatggccatactgcccaaggtaatttacagattcaatgccattgccatcaagctaccaatgactttcttcacagaattgggaaaaactactttaaagttcatacagaaccaaaaaggagcctgtattgccaagtcaatcctaagccaaaagaccaaagctggaggcatcacactacctgacttcaaactatactgtaaaggctacagtaaccaaaacagcatggttcacagaaaggcagcaaagtgttgtgtgaaccctggtgctgtggacctcagagactttggccccaccttgctctctggccacctctcctggctgtctcactccctgcacgctctcaccctccgcttggcagctctgatgctcttcgatttatccag

SEQ ID NO: 127170 - DNA, 1464 bp, Homo sapiens; identical to SEQ ID NO: 117985

SEQ ID NO: 127171 - DNA, 2817 bp, Homo sapiens
ataacttatttggacctgctctggaagcacactcgtgtgaacaaagtacctggctgtcctggagcagatctggatggacgtgttccacagtcacttgtgctgaatccacagtcacttgtgctgaatccacctggacctgaagcaatgcaagggcagagggtcattgtgaccgccttcatccacacctgtggcacccgagctcttgtctggcatccaggaaaaatcaggtcagatgagcaaattgaaggaaggcgaatgcagaggattttattgctgatgaaagtggctctcagagggaagcctctcattccatgctttcccttctcatggcataatgtaccccatacccttccctacccctccatttccccacaagagccagggttctccctcttctcaggacttgctggtgcagggctgctgaggtttgctgggcatctgctccagtccctagttgcctcagattttctggtacctgaagatatcaccagtgaagcctgcaaaacagcaaagtggcagcctgcccctttctctgggagctccattccagtggggtacagacatgttgccagcccaaatgcacctgcaggaggtcgctggagaccctggtacttcatcccaaagagaaatcgaaactctgtctacaggagaacacaggcagaggtggctgtaggccccagtttggaggtcctgcccagagatgatgaatggattgggatcctgtttaaagaaatggtctggccaaatttttgtggagcagctgtgctgtgctgggggatcccttctctccccagtcagtctggactctctgaagcctgcaggctggaaaagctgggtcattcaaacagcaaagatagtggcccacccctcccgtcaggaacaccaacctgtcctgggaaggcacaacactattgccagggactggctggaattccaagccaggcaatcaggcaggagaaggaaataaagggtattcaattaggaaaagaggaagtcaaattgtccctgtttgcagacgacatgattgtttatctagaaaaccccatcgtctcagcccaaaatctccttaagctgataagcaacttcagcaaagtctcaggatacaaaatcaatgtacaaaaatcacaagcattcttatacaccaacaacagacaaacagagagacaaatcatgagtgaactcccattcacaattgcttcaaagagaataaaatacctaggaatccaacttacaagggatgtgaaggacctcttcaaggagaactacaaaccactgctcaaggaaataaaagaggacacaaacaaatggaagaacattccatgctcatgggtaggaagaatcaatatcgtgaaaatggtcatactgcccaaggtaatttacaggttcaatgccatccccatcaagctaccaatgactttcttcacagaattggaaaaaactactttaaagttcatatggaaccaaaaaagagcccgcatcgccaagtcaatcctaagccaaaagaacaaagctggaggcatcacactacctgacttcaaactatactacaaggctacagtaaccaaaacagcatggtactggtaccaaaacagagatatagatcaatggaacagaacagagccctcagaaataacgccgcatatctacaactatctgatctttgacaaacctgagaaaaacaagcaatggggaaaggattccctatttaataaatggtgctgggaaaactggctagccatatgtagaaagctgaaactggatcccttccttaccccttatacaaaaatcaattcaagatggattaaagacttaaacgttagacctaaaaccataaaaaccctagaagaaaacctaggcattaccattcaggacataggcgtgggcaaggacttcatgtccaaaacaccaaaagcaatggcaacaaaagccaaaattgacaaatgggatctaattaaactaaagagcttctgcatagcaaaagaaactaccatcagagtgaacaggcaacctacaacatgggagaaaattttcacaacctactcatctgacaaagggctaatatccagaatctacaatgaactcaaacaaatttacaagaaaaaaacaagcaaccccatcaaaaagtgggcaaaggacatgaacagacacttctcaaaagaagacatttatgcagccaaaaaacacatgaaaaaatgctcatcatcactggccatcagagaaatgcaaatcaaaaccactatgagatatcatctcacaccagttagaatggcaatcattaaaaagtcaggaaacaacaggaattccactcctggcatttttgctcaaagaaataatcctaaggacaacagacgccttagacatgacagtgttcattatttcatgattcataaaagtaaaaacaaaaataaaacacctaaaagtctaaaagcacaggaaaggcaagactggcccactcttcagttcctgattttgttaaacaagtgcactgctgtcgacatgacaaaaggtcttccaggtggggcctggggagtgtggactgacagaggccacttcctgggcttctccattggctctacccccaccaaaggtgagcatgagctgagggagggtgcttttcatgcttctccattgtttctgcccatgctaagggtaaacacatgcaaagagcctcttgctggctcttacttctcagcatcatctactggctggaagcctgaattacacctccaaataaaagtaaatcactacaacaataaacttgaggaagacactgcatatctgcaaccaaggagcccttacagagccttggtcctctga

SEQ ID NO: 127172 - DNA, 1305 bp, Homo sapiens
atgatgctgaaacagaaacttcatggggtctttcttccagtctggcctcatgactgttgtaaagggaagggccttggagctggctctctcccaagagaatttcaacaaagaattgttttgaactcaagtcaaaaagatgcccttcaagcattgtttaagcagaactcctaccctggcataccaaccagagagcaactggccaaagaaatcggcagtctggagtctagcatacagaaggtctgtatctgcatcacagatgtgaatccacaacaaatccttcccatggctttgacccatttctctataccaggctctctcccaagagaatttcaacaaagaattgttttgaactcaagtcaaaaagatgcccttcaagcattgtttaagcagaactcctaccctggcataccaaccagagagcaactggccaaagaaatcggcagtctggagtctaggatacagagaataaaatacctaggaatccaacttacaagggatgtgaaggacctcttcaaggagaactacaaaccactgctcaatgaaataaaagaggatacaaacaaatggaagaacattccatgctcatgggtaggaagaatcagtatcgtgaaaatggtcatactgcccaagaattggaaaaaaactactttaaagttcatatggaaccaaaaaacagcctgcatcaccaagtcaatcataagccaaaagaacaaagctggaggcatcacgctacctgacttcaaattacactacaaggctacagtaaccaaaacagcatggtattggtaccaaaacagagatatagatcaatggaacggaacagagccctcagaaataacaccgcatatctacaactatctgatctttgacaaacctgagaaaaacaagcaatggggaaaggattccctatttaataaatggtgctgggaaaactggctagccatatgtagaaagctgaaactggatcccttccttacaacttatacaaaaattaattcaacttggatcaaagacttacatgttagacctaaaatcataaaaaccccagaagaaaacctaggcaataccattcaggacataggcatgggcaaggacttcatgtctaaaacaccaaaagcaatgggaacaaaagccaaaattgacgaagcggatctaattaaattaaagagcttctgcacagcaaaaggaactaccatcagagtgaacaggcaacctacaaaatgggagaaaatttttacaacctactcatctgacaaagggctaatatccagaatctacaatgaactcaaacaaatttacaagtaa

SEQ ID NO: 127173 - DNA, 1545 bp, Homo sapiens; identical to SEQ ID NO: 124207

SEQ ID NO: 127174 - DNA, 1328 bp, Homo sapiens
acaagttgctgtgctcggttatcacagccatgctgaagttttggtggcccctcctcaatcccagtaacccaaattccatcacgaaagggagaatacaaagtgctcatttcacttcccatctggggcatgttgaaacagtccaaacatctgaaaggaggactagagagaaagaaggctcacctcggaaaaaaccacacaaaaacaaaaagcggccgccaacaaaaacagggagcccaaaccaaacgtcacgtgacgcggaagggggaacagggcataaacccaccgctccacaaaaagcccaaaaaaaggcagaaaacactcagctaaagctaaggccacggcacaaacacaccagcgatagctcaaaccacagcaagagccaacgcagaaacccccttttatttactcttgaaatacaaactaccatcagagaatactacaaacacctctatgcaaataaactagaaaatctagaagaaatggataaattcctcgacacatacaccctcccaagactaaaccaggaagaagttgaatctctgaatagaccaataacaggctctgaaactgtggcaataatcaatagcttaccaaccaaaaagagtccaggaccagatggattcacagctgaattctaccagaggtacaaggaggaactgagaataaagtacctagaaatccaacttacaagggatgtgaaggacctcttcaaggagaactacaaaccactgctcaaggaaataaaagaggacacaaacaaatggaagaacattccatgctcatgggtaagaagaatcaatatcgtgaaaatggccatactgcccaagagaataaaatacctaggaatccaacttacaagggatgtgaaggacctcttcaaggagaactacaaaccactgctcaacgaaataaaagaggacacaaacaaatggaagaacattccatgctcatggataggaagaatcaatatcatgaaaatggccatactgcccaagcacaagcaggacgatatggaagtaaagacagagaaccgtagagggcaacagaaaaaaatggccaaacccatccccgaaaaaggagatataaggaggagacgcctctatcctccaatcggagagctgagcacctccggaggtgagggtttctttttctccagcaggtggttttcgcagagatctgttatatctgaagttccgccagagaaggccactgtcatcactcaccttgacgactgcagacgactcctaacgattcgactgtcagtctttcccacttctaatctagcaatggctcattcaacaaatacctgctgtgtgcctactatgtaa

SEQ ID NO: 127175 - DNA, 1026 bp, Homo sapiens; identical to SEQ ID NO: 124210

SEQ ID NO: 127176 - DNA, 1724 bp, Homo sapiens
atggcgtccccaggacctgcacccacagccagtcccaaaatccactctgagctgttaacagcaaccagagaagctcagagacatcatcctgtgccccgtggtcaagacctagtgacctcagaatcattctcgctctccttctgcttctcagctgccatcttcatttttgaacttttgggttcaaactcagaaggagtcacagatcttagactgtggctatgccagccagcgcccaggtgcggggagtggacctacaaccccttggagcagtgctgtgatgacggtgtcatcctagacttgaaccagacccggctctgcggctccagctgcaccttctggccctgcttccagcactgctgcctggagtctttgggctctcagaaccagacagttgtgaggttcaaggtcccaggcatgaagccagattgcaagtcctcccctatcaccaggatctgtgcccaggctggagtgcaaataagcaacttcagcaaagtctcaggatacaaaatcaatgtacaaaaatcacaagcattcttatacaccaacaacagacaaacagagagccaaatcatgagtgaactcccattcacaattgcttcacagagaataaaatacctaggaatccaacttacaagggatgtgaaggacctcttcaaggagaactacaaaccactgctcaaggaaataaaagaggatacaaacaaatggaagaacattccatgctcatgggtaggaagaatcaatatcgtgaaaatggccatactgcccaaggtaatttacagattcaatgccatccccatcaagctaccaatgactttcttcacagaattggaaaaaactactttaaagttcatatggaaccaaaaaagagccctcatcgccaagtcaatcctaagccaaaagaacaaagctggaggcatcacactacctgacttcaaactatactataaggctacagtaaccaaaacagcatggtactggtaccaaaacagagatatagatcaatggaacagaacagagccctcagaaataacgccgcatatctacaactatctgatctttgacaaacctgagaaaaacaagcaatggggaaaggattccctatttaataaatggtgctgggaaaactggctagccatatgtagaaagctgaaactggatcccttccttacaccttatacaaaaatcaattcaagatggattaaagacttaaacgttagacctaaaaccataaaaaccctagaagaaaacctaggcattaccattcaggacataggcatgagcaaggacttcatgtctaaaacaccaaaagcaatggcaacaaaagacaaaattgacaaatgggatctaattaaactaaagagcttctgcacagcaaaagaaactaccatcagagttgaacaggcaacctacaaaatgggagaaaatttttgcaacctactcatctgacaaagggctaatatccagaatctacaatgaactcaaacaaatttacaagaaaaatacaaacaacctcatcaaaaagtggagaggagtacagggcacccgtggaaccttggatcttgttgcttggccaccttatgtctctgctccctgcattccagtgcaatgctctgtggctgccccagctgtggctcaggcacaccaagacgcagctcaagctgccacttcagagggcacaagcaatgagccttggtggtgtccctatggtgctaattctgcag

SEQ ID NO: 127177 - DNA, 1041 bp, Homo sapiens
atggacgtgaagccagtagtgtgggaggttatggatgtgaagccaaagaagctcagtaattgtgctaatggtagtgatgagtccatccctctaaattcagaagttgaagactatgttgcaagaaatgctaaaaggatcaacaccatgtggaagctgccaaggcttggggctgaagcaatggcccgagctataccttggccccctttagccatggctggagctgaagcatctgggatgcacagcaccatgtccctaggctacgcaaagcaggaggtgttggaagttctggccagggcaatcaggcaagaaaaagaaataaaggatattgaattaggaaaagaggaagtcaaattgtccctgtttgcagatgacatgattgtatatttagaaaaccccatcatctcagctcacaatctccttaggctgataagcaaattcagcaaactctcaggacacaaaatcaatgtgcaaaaatcacaagcattcttatgcagcaataacagacaaatggagagccaaatcatgagtgaactcccatttgcaattgcttcaaagaaaataaaatacctaggaatccaacttacaagggatgtgaaggacctcttcaaggagaactacaaaacactgctcaacgaaataaaagaggacacaaacaaatggaagaacattccatgctcatggataggaagaatcattatcatgaaaatggccatactgcccaaggtaatttatagattcaatgccatccccatcaagctaccaatgactttcttcacagaattggaaaaaactactttaaagttcatatggaaccaaaaaagagcctgcattgtcaagacaatcctaagccaaaagaacaaagctggaggcatcacgctacctgacttcaaactatactacaaggctacagtcaccaaaacagcatggtactggtaccaaaacagagatatagacaaagggaacagaaaagagccctcagaaataatgctgcatatctacaaatatctgatctttgacaaatctgacagaaacaagcaatga

SEQ ID NO: 127178 - DNA, 1712 bp, Homo sapiens
gagacacaaccaaaaaagggaattttagaccaatatccttgatgaacattgatgcaaaaatcctcaataaaatactggcaaaacaaatccagcagcacatcaaaaagcttatccaccatgatcaagtgggcttcatccctgggatgcaaggctggttcaatatacgcaaatcaataaatgtaatccagcatataaacagaaccgaagacaaaaaccacatgattatctcaatagatgcagaaaaggcctttgataaaattcaacaacccttcatgctaaaacctctcaataaattaggtatcgatgggacgtatttcaaaataattagagctatctatgacaaatccacacccaatatcatactgaatgggcaaaaactggaagcattccctttgaaaactggcacaagacagggatgccctctctcaccactcctattcaacatagtgttggaagttctggccagggcaattaggcaggagaaggaaataaagggtattcaattaggaaaagaggaagtcaaattgtccctgtttgcagacgacatgattgtatatctagaaaaccccactgcctcagcccaaaatctccttaagctgataagcaacttcagcaaagtctcaggatacaaaaaaaaaatcaatgtacaaaaatcacaagcattcttatacaccaataacagacaaacagagagccaaatcatgagtaaactcccattcacaattgcttcaaagagaataaaatacctaggaatccaacttacaagggacgtgaaggacctcttcaaggagaactacaaaccactgctcaaggaaataaaagaggatacaaacaaatggaagaacattccatgctcatgggtaggaagaatcaatatcgtgaaaatggccatactgcccaaggtaatttatagattcaatgccatccccatcaagctaccagtgactttcttcacagaattggaaaaaactactttaaagttcatatggaaccaaaaaagagcccgcatagccaagtcaatcctaagccaaaagaacaaagctggaggcatcacactacctgaccagactgaatcccataaactcaggctccaattctgccccagttcccagtcagctcccatggaattaggcttcaggccaatccctgtggactcagggactaggaccatccctgaaccaggcctgaccccatggacccaggcttcaggatggacaccaaagacatgtgcttcaggcttcttcctacagatccagttgacaagtccactctggtggactccagtactaggcttgcaccacaaacccaggattcaggtctacacagaaggcccaagccccaggccagcgcctttagactcagatgccagctctacccacctgctgactcaggcatcagaaagaagaatcaaaactatgaataatcacaccgtgaatagaaaatctaagagagaacattgctgtacaaaagagaaaccaccggaaatacctgatgaacagagggagaagaaaattcagagaagcaagcagatggtgcaaggcgatgaagtttggagtataaatgaatgtcccagtcacgacgttgtaaagcgacggccagtgccaagcttgcatgcctgcaggtcgactctagaggatcccccaaaaactttagctagaatgaccaagaaagaacaaagacacaaactattaaaattaagaataaaaagatga

SEQ ID NO: 127179 - DNA, 1989 bp, Homo sapiens
atgaaaaacaagcccagtaaaagatgtattcacagctgtattctaccagataccccaagaggaactggtaccattcctactgaaactactccaaaaattgaggagaaaggactcctctccaactcattctatgaggccagcctcaccctgaaactaaaacctgggagagacacaacaagaagaaatgttcaggccaacatttttaggaacattgatgcaaaaagactcaacaaaatgctggcaatcggaatcgagaagcatacccataagctattccacaacaatcaggcaggcttaatcccgtggttagaagtaagtcctggccagaacaatcaggcaagagagaaacataaagggccttcccaaatagaaagagagaaactcaaactatccctgtttgcagatgacatgattctatatttagaaaatcttcatagtgttcacccaaaatctccttcagctgataaacaactgcggcaaagtttcaggatacaagatcaacatcttcaaatcagtagcatccttatacaccaccaacagccaaaccaagagcctaatcaggaacacaatcctattcagaattgccacaaaaagaataaaatttctagaaatatggttaatcagggaaggacaaatgggtatttccagtatacccggtgtaaccacccagagacactccgggcaccaccctcaattgccaggggttgtggtagagtggtgtcagcgattcaagggtgttttttctacctctttagtgcctttttcagtgataaaaagttaaaagcagatattgctttcaatttgatgtttgattcttatgaagctgataagcaacttcagcgaagtctcaggatacaaaagcaatgtacaaaaatcacaagcattcttatacaccaacaacagacagagagccaaatcatgagtgaactcccattcacaattgcttcaaagacaataaaatacctaggaatccaccttacaagggacgtgaaggacctcttcaaggagaactacaaaccactgctcaatgaaataaaagaggatacaaacaaatggaagaacattccatgctcatgggtaggaagaatcaatatcgtgaaaatggtcatactgcccaaggtaatttatagattcaatgccatccccatcaagctaccaatgactttcttcacagaattggaaaaaactactttaaagttcatatggaaccaaaaaagagcccgcattgccaagtcaatcctaagccaaaagaacaaagctggaggcatcacactacctgacttcaaactacactacaaggctacagtaaccaaaacagcatgtttgttaaacagaagggctctccccctggcaaaccggggaagaaaaaaccctgtttttggggggcccccaaaaacggtgccgatatccccagccaaagttggcggccatccggaaacccgggaacaaccccccctctcccgaaaccccccagttttttccctggggcccccagaatggggcaatcccaagcttggggccacaaaggcttttggttcaaaaagggcaagccaaccgaaccccccggaaaaaaggcccgggttaaaaagccccccgggggccaatcccccaaggccattggacccacccgtggcccgggaaaaccaccaaaacccgatatgcgggcccccaagccccccacagattccggtcaccaaacccagaagccctcatgaccggcagacagcgctttcacaccgcacatcaacgtttcacggtccgaccccagaaccaccgctcgctcatccagcgccgaccgtgtcaacgccagcgagtacccaacatccagcgaggagacatcaggtcgctcgtccagataggtcatcaacgccgttgcctgcgcggatagcgcttcgggtgttttgcccgacaccatccacggcaccaccggaacatccacgacagaacccgaacccggccccgcagactgactcggcactcccgggggct

SEQ ID NO: 127180 - DNA, 1736 bp, Homo sapiens
atgatttcacaattcattccagaaaattatttttcaggaaagtccagcgcgacttccgggtgggcgcgggctcagcgcgacttccgggtgggcgcgggctcggcgcgccccgcactcttgagcggtcggctggcgccgccggccctgggcagtgagaggcttagcacccgggccagcagctgcggagggctcccgcgcgccaccccgaggggacgggcgccacctcctgctacgcggcacccggtcccgtcaaccgcccaacggctgaggagtgcggcagcgcgccagagactggcgggcagctccgcccgcggccgggatgcactaggcaaagccagctgggctcctgagtccgtgttggaagttctggccagggcagtcaggcaagagaaagaaataaagggcattctattaggaaaagaggaagtcaaattgtccctgtttgcaggtgatatgattgtatatttagaaaaccccatcatctcagcccaaaatctccttaagctgatgagcaacttcagcaaagtctcaggttacaaaatcagtgtgcaaaaatcacatgcatttgtatacaccaataacagacaatcagagagccaaatcatgagtgaactcccattcacagttgctacaaagagaataaaatacctaggaatccaacttacaagggatgtgaaggacctctttaaggaaaactacaaaccactgctcaacgaaatacaagaggacacaaacaaatggaagaacattccatgctcatgggtaggaagaatcaatatcgtgaaaatggccatactgcccaaggtaatttatagattcaatgccatccccatcaagctaccaatgactttcttcacagaattggaaaaaactaaagttcatatggaatcaaaaaaagagcccatattgccaagacaatcctaagcaaaaagaacaaagctggaggcatcacgctacctgacttcaaactatactacaaggctacagtaaccaaaacagcatggctgcccttcatcctccagagctccaccagggtgatcgtagaccagaagggtccagtccaaaatctccttaagctgataagcaacttcagcaaagtctcaggatacaaaatcaatgtacaaaaatcacaagcattcttatacaccaataacagacaaacagagagccaaatcatgagtaaactcccattcacaattgcttcaaagagaataaaatacctaggaatccaacttacaagggacgtgaaggacctcttcaaggagaactacaaaccactgctcagtgaaataaaagaggatacaaacaaatggaagaacattccatgctcatgggtaggaagaatcaatattgtgaaaatggccatactgcccaaggtaatttatagattcaatgccatccccatcaagctaccaatgactttcttcacagaattggaaaaaactactttaaagttcatatggaaccaaaaaagagcccgcatcgccaagtcaatcctaagccaaaagaacaaagctggaggcatcatgctacgtgacttcaaactatactacaaggctacagtaaccaaaacagcatggtactggtaccaaaacagagatatagatcaatggaatagaacagagccctcagaaataacgccacatatctacaactatctgatctttgacaaacctgagaaaaacaagcaatggggaaaggattccctatttaataaatggtgctgggaaaactga

SEQ ID NO: 127181 - DNA, 1644 bp, Homo sapiens
atggataaattcctcgacacatacactctcccaagactaaaccaggaagaagttgaatctctgaatagaccaataacaggatctgaaattgtggcaataatcaatagcttaccaaccaaaaagagtccaggaccagatggattcacagctgaattctaccagaggtacaaggaggaactggtaccattccttctgaaactattccaatcaatagaaaaagagggaatcctccctaactcattttatgaggccagcatcattctgataccaaagccaggcagagacacaacaaagaaagagaattttagaccaatatccttgatgaacattgatgcaaaaatcctctataaaatactggcaaaacgaatccagcagcacatcaaaaagcttatccaccatgatcaagtgggcttcatccctgggatgcaaggctggttcaatatacgcaaatcaataaatgtaatccagcatataaacagagccaaagacaaaaaccacatgattatctcaatagatgcagaaaaagcctttgacaaaattcaacaacccttcatgctaaaaactctcaataaattagcccaaaatctccttaagctgataagcaacttcaacaaagtctcaggatacaaaatcaatgtacaaaaatcacaagcattcttatacaccagcaacagacaaacagagagccaaatcatgagtgaactcccattcacaattgcttcaaagagaataaaatacctaggaatccaacttacaagggatgtgaaggacctcttcaaggagaactacaaaccactgctcaaggaaataaaagaggatacaaacaaatggaagaacattccatgctcatgggtaggaagaatcaatatcgtgaaaatggccatactgcccaaggtaatttacagattcaatgccatccccatcaagctaccaatgactttcttcacagaattggaaaaaactactttaaagttcatatggaaccaaaaaagagcccacatcgccaagtcaatcctaagccaaaagaacaaagctggaggcatcacactacctgacttcaaactatactacaaggctacagtaaccaaaacagcatgtcttgctagcggtctatcaattttgtccagggcaatcaggcaggagaaagaaacaaaaggtactcaattaggaaaagaggaagtcaaattgtccctgtttgcagacgacatgattgtgtatctaaaaaacccaatcgtctcagcgcaaaatctcctcaagctgataagcaacttcagcaaagtctcaggatacaaaatcaatgtagaaaaatcacaagcattcttatacaccaataacagacaaacagagagccaaatcatgagtgaactcccattcacacttgcttcaaagagaataaaatacctaggaatccaacttacgagtgacgtgaaggacctcttcaaggagaactacaaaccactgctcaaggaaataaaagaggatacaaacaaatggaagaacattccatgctcatgggtaggaagaatcaatatcgtgaaaatggccatactgcccaagcccccagacaaccacttgcatcagtatcacccaaaagaagcagattcctgggccccaacttctaccactgaatcagaacctctatgg

SEQ ID NO: 127182 - DNA, 1560 bp, Homo sapiens
atgaaggcagaaataaagatgttctttgaaaccagtgagaacaaagacacaatataccagaatctctgggacacattcaaagcagtgtgtagagggaaatttatagcactaaatgcccacaagagaaagcaggaaagatctaaaattgacaccctaacatcacaattagaagaactagagaagcaagagcaaacacattcaaaagctagcagaaggcaagaaataactaaaatcagagcagaactgaaggaaatagagacacaaaaaacccttcaaaaaattaatgaatccaggagctggttttttgaaaagatcaacacaattgatagaccgctaacaagactaataaagaagaaaagagagaagaatcaaatagacgcaataaaaaatgacaaaggggatattaccactgatcccacagaaatacaaactaccatcagagaatactataaacacctatacacaaataaactagaaaatctagaagaaatggataaattccttgacacaaacactctcccaagactaaaccaggaagaagctgaatctctgaatagaccaataacaggagctgaaattgaggcaataattaatagcttaccaaccaaaaaaagtccaggaccagatggattcacagccgaattctaccagaggtacaaggaggagctggtaccattccttctgaaaccattccaatcaatagaaaaagagggaatcctccctaactcattttatgaggccagcatcatcctgataccaaagccagtgttggaagttctggccagggcaatcaggcaggagaaagaaataaagggcattcaattaggaaaagaggaagtcaaattgtccctgtttgcagatgacatgattgtatatctagaaaaccccactgtctcagcccaaaatcttcttaagctgataagcaacttcagcaaagtctcaggatacaaaatcaatgtacaaaaatcacaagcattcttatacaccaataacagacaaacagagagccaaatcatgagtaaactcccattcacaattgcttcaaagagaataaaatacctaggaatccaacttacaagggatgtgaaggacctcttcaaggagaactacaaaccactgctcaatgaaataaaagaggacacaaacaaatgggagaacattccatgctcatgggtaggaagaatcaatatcgtgaaaatgggcatactgcccaaggtaatttatagattcaatgctgtccccatcaagctaccaatgactttctccacagaattggaaaaaactactttcaagttcatatggaaccaaaaaagagcctgcattgccaagtcaatcctaagccaaaagaacaaagctggaggcatcacgctacctgacttcaaactatactataaggctacagtaaccaaaacagcacgaatccaacctgcacctgcagacagagaggatttggacaggactctcatgtctgcttccttaacccaggaagttcaccagtctctgcatgggtttgcactccatgtaccacctcctggaaaccttcttcaagtagtaatatga

SEQ ID NO: 127183 - DNA, 4035 bp, Homo sapiens
atggataaattcctcgacacatacactctcccaagactaaaccaggaagaagttgaatctctgaacagatcaataacaggatcagaaattgtggcaatactcaatagtttaccaaccaaaaagagtccaggaccagatggattcacagctgaattctaccagaggtacaaggaggaactggtaccattccttctgaaactattccaatcaatagaaaaagagggaatcctccctaactctttttatgaggccagcatcatcctgataccaaagccgggcagagacacaagcaaaaaagagaattttagaccaatacccttgatgaatattgatgcaaaaatcctcaataaaatactggcaaaacgaatccagcagcacatcaaaaagcttatccaccatgatcaagtgggcttcatccctgggatgcaaggctggttcaatatacgcaaatcaataaatgtaatccagcatacaaacagagccaaagacaaaaaccacatgattatctcaatagatgcagaaaaagcctttgacaaaattcaacaactcttcatgctaaaaactcttaataaattaggtattgatgggatgtatctcaaaataagaagagctatctatgacaaacccacagccaatatcatactgaatgggcaaaaactggaagcattccctttgaaaactggcacaagacagggatgccctctctcaccactcctattcaacatagtgttggaagttctggccagggcaattaggcaggagaaggaaataaagggtattcaattaggaaaagaggaagtcaaattgtccctgtttgcagatgacatgattgtatatctagaaaaccccattgtctcagcccaaaatctccttaagctgataagcaacttcagcaaagtctcaggatacaaaatcaatgtacaaaaatcacaagcattcttatacaccaacaacagacaaacagagagccaaatcatgagtgaactcccattcacacttgcttcaaagagaataaaatacctaggaatccaacttacaagggatgtgaaggacctcttcaaggagaactacaaaccactgctcaacgaaataaaagaggatacaaacaaatggaagaacattccatgctcatgggtaggaagaatcaatatcgtgaaaatggccatactgcccaaggtaatttacagattgaatgccatccccatcaagctaccaatgcctttcttcacagaattggaaaaaactactttaaagttcatatggaaccaaaaaagagcccgcgttgccaagtcaatcctaagccaaaagaacaaagctggaggcatcacactacctgacttcaaactatactacaaggctatagtaaccaaaacagcatggtactggtaccaaaacagagatatagatcaatggaacagaacagagccctcagaaataacgccgcatatcaacaactatctgatctttgacaaacctgacaaaaacaagcaatggggaaaggattctctatttaataaatggtgctgggaaaacgggctagccatatgtagaaagctgaaactggatcccttccttacaccttatacaaaaattaattcaagatggattaaagacttaaacgttagacctaaaaccagaaaaaccctagaagaaaacctaggcattaccattcaggacataggcatgggcaaggacttcatgtctaaaacaccaaaagcaatggcaacaaaagacaaaatagacaaatgggatctaattaaactaaagagcttctgcacagcaaaagaaactaccatcagagtgaacaggcaacctacaaaatgggagaaaattttcgcaacctactcatctgacaaagggctaatatccagaatctacaatgaactcaaacagatttacaagaaaaaaacaaacaaccccatcaaaaagtgggcgaaggacatgaacagacacttctcaaaagaagacatttatgcagccaaaaaacacatgaaaaaatgctcatcatcactggccatcagagaaatgcaaatcaaaaccacaatgagataccatctcacaccagttagaatggcaatcattaaaaagtcaggaaacaacagcactattcacagtagcaaagacatggattcaacccaaatgtgcatcaatgatacactgtatgaagaaagtgtagaacatatacaccatgaaatacaatccagccataaaaaaggagttcacatcctttgcagcaatatggatggagctgaaagccactttcctaagcaaactaatgcaagaacagaaagccaaatactgcatgttctcacttataagtgggagctgaatgatgagaacacatggacacatggttggggcaggcatataaacggaaccaaagacaaaaaccacatgattatctcaatcgatgcagaaaaggcctttgacaaaattcaacaacgcttcatgctaaaaactctcaataaatttggtattgatgggacgtatctcaaaataataagagatgacatgattgtatatctagaaaaccccatcgtctcagcccaaaatctccttaagctgataagcaacttcagcaaagtctcaggatacaaaatcaatgtacaaaaatcacaagcattcttatacacaaataacagacaaacagagagccaaatcatgagtgaactcccattcacaattgcttcaaagaggataaaatacctaggaatccaacttacaagggatgtgaaggacctcttcaaggagaactacaaaccacttctcaatgaaataaaagaggatacaaacaaatggaagaacattccatgctcatgggtaggaagaatcaatatcgtgaaaattgccatactgcccaaggtaatttatagattcaatgccatccccatcaagctaccaatgactttcttcacagaattggaaaaaacttctttaaagttcatatggaaccaaaaaagagccctcatcaccaagtcaatcctaagcctaaagaacaaagctggaggcatcatgctacctgacttcaaactatactacaaggctacagtaaccaaaacagcatggtactggtaccaaaacagagatatagatcaatgcaacagaacagagccctcagaaataacacctcatatctacaactatctgatctgtgacaaacctgagaaaaacaagcaatggggaaaggtttccctatttaataaatggtgctgggaaaactggctagccatatgtagaaagctgaaactggatcccttccttacaccttatacaaaaattaattcaagatggattaaagacttaaatgttagacctaaagccataaaaaccctagaagaaaacctgggcaataccattcaggacataggcatggacaaggacttcatgtctaaaacaccaaaagcaatggcaacaaaagccaaaattgacaaatgggatctaattaaactaaagagcttctgcacagcaaaagaaactaccatcagagtgaacaggcaacctacacaatgggagaaaatttttgcaacctactcatctgacaaagggctaatatccagaatctacaatgcactcagacaaatttacaagaaaaaaacaaacaaccccatcaaaaaggacatggatgaaaccggaaaccaccattctcagcatactatcgcaaggacaaaaaaccaaacaccgcatgttctcactcatggatgggaactgaacaatgagaacacatggacacaggaaggggaacatcacactctggggactgttgtgtggaatcaaaagagccctagtccatcactaatgcagaaacacaagcacaatgctgagggtggaatactcacagagaaacgaccagatagaggttggaaaacaaaagcagccaatgtgactagcatcccttcaaaaactgagagggcatgggggataagacgcaggtggatttcagataatcaaagtcaccctgcatctcctattaagcagcttgaactttatcctgaaggctatgggacccccattaaagctgttaacacaggacagtga

SEQ ID NO: 127184 - DNA, 2686 bp, Homo sapiens
atggtgaagggatcaattcaacaagaggagctaactatcctaaatatttatgcacccaatacaggagcacccagattcataaagcaagtcctgagtgacctacaaagagacttagactcccacacattaataatgggagactttaacaccccactgtcaacattagacagatcaacgagacagaaagtcaacaaggatacccaggaattgaactcagctctgcaccaagcagacctaatagacatcaacagaactctccaccccaaatcaacagagtatacatttttttcagcaccacaccacacctattccaaaattgaccacatagttggaagtaaagctctcctcagcaaatgtaaaagaacagaaattataacaaactatctctcagaccacagtgcaatcaaactagaactcaggattaagaatctcactcaaagccgctcaactccatggaaactgaacaacctgctcctgaatgactactgggtacataacgaaatgaaggcagaaataaagatgttctttgaaaccaacaagaacaaagacaccacataccagaatctctgggacgcattcaaagcagtgtgtagagggaaatttatagcactaaatgcctacaagagaaagcaggaaagatccaaaattgacaccctaacatcacaattaaaagaactagaaaagcaagagcaaacacattcaaaagctagcagaaggcaagaaataacgaaaatcagagcagaactgaaggaaatagagacacaaaaaacccttcaaaaaatcaatgaatccaggagctggttttttgaaaggatcaacaaaattgatagaccgctagcaagactaataaagaaaaaaagagagaagaatcaaatagacacaataaaaaatgataaaggggatatcaccaccgatcccacagaaatacaaactaccatcagagaatactacaaacacctctacgcaaataaactagaaaatctagaagaaatggatacattcctcgacacatacactctcccaagactaaaccaggaagaagttgaatctctgaatagaccaataacaggctctgaaattgtggcaataatcaatagtttaccaaccaaaaagagtccaggaccagatggattcacagccgaattctaccagagagctatctatgacaaacccacagccaatatcatactgaatgggcaaaaactggaagcattccctttgaaaactggcacaagacagggatgccctctctcaccgctcctattcaacatagtgttggaagttctggccagggcaatcaggcaggagaaggaaataaagggtattcaattaggaaaagaggaagtcaaattgtccctgtttgcagatgacatgattgtttatctagaaaaccccatcgtctcagcccaaaatctccttaagctgataagcaacttcagcaaagtctcaggatacaaaatcaatgtacaaaaatcacaagcattcttatacaccaaaaacagacaaacagagagccaactcatgagtgaactcccattcacaattgcttcaaagagaataaaatacctaggaatccaacttacaagggatgtgaaggacctcttcaaggagaactacaaaccactgctcaacgaaataaaagaggacacaaacaaatggaagaacattccatgctcatgggtaggaagaatcaatatcgtgaaaatggccatacttgcccaaggtaatttacagattcaatgccatccccatcaagctaccaatgactttcttcacagaattggaaaaaactactttaaagttcatatggaaccaaaaaagagcccgcatcgccaagtcaatcctaagccaaaagaacaaagctggaggcatcacactacctgacttcaaactatactacaaggctacagtaaccaaaacagcatggtactggtaccaaaacagagatatagaccaatggaacagaactgagccctcagaaataataccacacatctacaaccatctgatctttgacaaacctgagaaaaacaagcaatggggaaaggattccctatttaataaatggtgctgggaaaactggctagccatatgtagaaggctgaaactggatcccttccttacaccttatacaaaaatcaattcaagatggattaaagatttaaacgttagacctaaaaccataaaaaccctagaagaaaacctaggcattaccattcaggacataggcgtgggcaaggacttcatgtccaaaacaccaaaagcaatggcaacaaaagccaaaattgacaaatgggatctaattaaactcaagagcttctgcacagcaaaagaaactaccatcagagtgaacaggcaacctacaacatgggagaaaattttcgcaacctactcatctgacaaaggtctaatatccagaatctacaatgaactcaaacaaatttacaagaaaaaaacaaacaaccccatcaaaaagtgggcgaaggacatgaacagacacttctcaaaagaagacatttatgcagccaaaaaacacatgaagaaatgctcatcatcactggccatcagagaaatgcaaatcaaaaccactatgagatatcatctcacaccagttagaatggcaatcattaaaaagtcaggaaacaacagggacatggatgaaattggaaaccatcattctcagtaa

SEQ ID NO: 127185 - DNA, 1152 bp, Homo sapiens
atgactaaagaaagatactcgatactccaagctattatggaaaaagcaggacaaaatggttggcatgtcagcgctatatgtgtggaaaattttaatgatgtcagctataggcaacttctagaagaacttgacagaagacaagagaagaagtttgtaatagactgtgagatagagagacttcaaaacatattagaacagatgcagaaaaggcctttgaccaaaattcaacagcccttcatgctaaaacctctcaataaactaggtattgatgggacgtatctcaaaataataagagctatttatgacaaactcacagccaatatcatactgaatgggcaaaaactggaagcattccctttgaaaactggcacaagacaggggtgccctctctcaccactcctattcaacatagtgttggaagttctggccagggtaatcaggcaggagaagaaaataaagggtattcaattaagaaaagaggaagtcaaattgtccctgtttgcagatgacatgattgtatatttagaaaaccccatcatctcaggccaaaatctccttaagctgataagcaacttcagcaaagtctcaggatacaaaatcaacgtccaaaaatcacaagcattcctatacaccaataacagacaaacagagagccaaatcatgagtgaactcccattcacaattgcttcaaagagaataaaatacctaggaatccaacttacaagggatgtgaaggacttcttcacggagaactacaaaccactgctcaacgaaataaaagaggacacaaacaaatggaagaacattccatgctcatggataggaagaattaacatcatgaaaatggccatactgcccaaggtgatttatagattcaatgccatccccatcaagctaccaatgacttccttcacagaattggaaaaaactactttaaagttcatgtggagccaaaaaagagcccgtattgccaagacaatcctaagtcaaaagaacaaagctggaggcatcatgctacctgacttcaaactatcctacaaggccacagtaaccaaaacagcatggtactgttaccaaaacagatatagatcaatggaacagaacagagccctcagaaataataccacacatctacaaccatctgatctttga

SEQ ID NO: 127186 - DNA, 845 bp, Homo sapiens; identical to SEQ ID NO: 117377

SEQ ID NO: 127187 - DNA, 2113 bp, Homo sapiens
atggaggaaaagattcatgacactggtctgagcaatgatttcttggatgcagcaccaaaacacagcataaatggttgtatcctggaaaatctagagtataagcttccctctgggggcattcgtgtacttgaagcaataactagcccaatgccagacgtcctttctgtttggccaatcgacagcactggaaggagatcaaagggtagaaggagagattcaggtatctgttcccctggtcacttccctgctgggctatggcttggcactggctgggatcctttacctaaggcacagccatcacctggtcctgctaactgcttcccccaatccctgacccttcctgctgtcattgtctttcggcctccgctgctgatacccaggcaaacagggtctggagtggacctctggcaaactccaacggacctgcagctgagggtcctgactgttagaaggaaacctaacaaacagaaaggacatccacaccaaaaccccatctgtacgtcaccatcaccaaagaccaaagcgttggaagttctggtcagggcaatcaggcaggagaaggaaatacagggtattcaattaggaaaagaggaagtcaaattgtctctgtttgcagatgacatgattgtatatctagaaaaccccatggtctcagcccaaaatctccttaagctgataagcaacttcagcaaagtctcaggatacaaaatcaatgtgcaaaaatcacaagcactcctatacaccaataacagacaaacagagagccaaatcatgagtgaactaccattcacaattgtttcaaagagaataaaatacctaggaatccaacttaaaaggaacgtgaaggacctcttcaaggagaactacaaaccactgctcaatgaaataaaagaggacacaaacaaatggaagaacattccatgctcatgggtaggaagaatcaatattgtgaaaatggtcatactgcccaaggtaagttatagattcaatgccacccccatcaagctaccaatgactttcttcacagaattggaaaaacactactttaaaattcatatggaaccaaaaaagagcccgcatcgccaagtcaatcctaagccaaaagaacaaagctggaggcatcacgctacctgacttcaaactatactacaaggctacagtaaccaaaacagcatggtactggtaccaaaacacagatatagaccaatggaacagaacagagccctcagaaataatgctgcatatctacaactatctgatctttgacaaacctgagaaaaacaagcaatggggaaaggattccctatttaatatatggtgctgggaaaactggctagccatatgtagaaagctgaaactggatcccttccttacaccttatacaaaaattaattcaagatggattaaagacttaaatgttagatctaaaaccataaaaaccctagaagaaaacctaggcaataccattcaggacataggcatgggcaaggacttcatgtctaaaacaccaaaagcaatggcaacaaaagccaaaattgacaaatgggatctaattaaactaaagagcttctgcacagcaaaagagactaccatcagcgtgaacaggcaacctacagaatgggagaaaatttttgcaatctactcatctgacaaagggctaatatccagaatctacaatgaactcaaacaaatttacaagaaaaaaacaaacaaccccatcaaaaagtgggtgaaggatacgaacagacacttctcaaaagaagacatttatgcagccaaaagacacatgacaaaatgctcatcatcactggctgttagagaaatgcaaatcaaaaccacaatgagataccatctcacaccagttgaagaggtgagggcgggtgagatggccaagacaagaagatgccaaaatgtcaaaggtgccagtgaggaaggcatcagagctcttgctttgtttctcattaacctcactgtccatatggagggcaaccacattgatggagacattgaaattcaaaccaatagaagtcccttgcaagcccctggagaaatctgtgagtcttttactgctttgatggcaatgcaactgctcagtaaattgttttggagttga

SEQ ID NO: 127188 - DNA, 1023 bp, Homo sapiens
atgcttattatggacgaggaacagaacagaggtcagtatagttggaatagagtgactgaaaggaaagggtggttggaagccagggctccaccgggtgaatcatctctaatcatgaacaagttaaaatgccctcattgtagctatgtagccaaatacagacgaacactaaaaaggcacttgctcattcacacaggagtgagatcatttagctgtgatatttgtggaaaactgtttactcgaagagaacatgtaaaaagacattccctggtgcataaaaaggataaaaaatacaaatgtatggtgtgtaagaagatcttcatgttagcagccagtgttggaataagacatggatctcgacgttatggtgtttgtgtagactgtgcagataaatcacagccaggagggcaagaaggtgtagatcagggacaggatacagaattccctcgggatgaagaatacgaggagaatgaagtaggagaagctgatgaagagctagttgatgatggagaagatcagaatgatccctctcgatgggatgaatcaggagaagtttacagccaaatcatgagtgaactcccattcacaattgctttaaagagaataaaatacctaggaatccaacttacaagggatgtgaaggacctcttcaaggagaactacaaaccactgctcaacgaaataaaagaagacacaaacaaatgggagaacattccatgctcatggataggaagaatcaatatcgtgaaaatggccatactgcccaagaattggaaaaaactaaagttcatatggaaccaaaaaagagcccgcgttgccaagacaatcctcagccaaaagaacaaagctggaggcaccacgctacctgacttcaaactatactacaaggctacagtaaccaaaacagcatggtactggtaccaaaacagagatatagaccaatggaacagaacagagccctcagaaataataccacacatctacaaccatctgatctttgacaaacctgacaaaaacaagaaatga

SEQ ID NO: 127189 - DNA, 2011 bp, Homo sapiens
ttatgagtcctttgtcagatggttagttcgcaaatattttctcccattctgtgagctgtgtcttcgctttgttgtttctttcgtgcgcagaagtgtttggacttgatgtgatcctgttttacgtttctgctttgtttgccttgaattgtagtgcccataatgcccacatgtcatggaagagacgctgtgagaggtaattgaatcatggggtgaatcccccatgctattcttgtaatagtaaggtctcaggagatccgatggttttattaaggacctttccactcccagctgttcccaatcttctccttccttgccagccagtgagacgggcaacagctgagtgcccttcaccgcgctgccctgagagagttgcagcaagcggtccacgctgtttgcaccagcaggcgaaaatcctgtttgatggtggtccgaaatcggcaagtccttatagatcaaaggatagcccgagatagggttgagtgttgttccagttggacgagagtcacagtaacatgctgttttggttactgtagccttgtagtatagtttgaagtcgggtagtgtgatgcttccacctttgttcttttgcttaggattgacttggcaatgcgggctctcttttggttccatatgaactttaaagtagtttttttccaattcttgggcagtatggccattttcacgatattgattcttcctatccacgagcatggaaagttcttccatttgtttgtgtcctcttttatttcgttgagcagttgtttgtagttctccttgaagaggtccttcacatcccttgtaagttggattcctaggtattctattctctttgaagcatttggaaaacactctacaggatattatccaggagaacttccccaacctagcaaagcaagccaacattcaaattcaggaaacacagagaacaccacaaagttactcctcaagaagagcaactccaagacacataattgtcagattcaccaaagttgaaatgaaggaaaaaatgttaagactaaaccacgaagaacttgaatccctgaatagaccaataacaggttctgaaattcaggcaattattaatagcctaccaaccaaaaaaagtccagaatcagatggattcacagccaaattctaccagagccaatatcatactgaatgggcaaaaactggaagcattccctttgaaaaccggcacaaaacaggatgccctctctcaccactactattcaacatagtggtggatgttccggctagggcaatcaggcaggagaaagaaataaagggtattcaattaggaaaagaggaagccaaattgtccctgtttgcagatgacatgaatgtatatttaaaaatccccatcgtctcagtccaaaatctccttaagctgataagcaacttcagcaaagtctcaggatacaaaatcaatgtgcaaaaatcacaagcattcctatacactaataacagacaaacagagagccaaatcatgagtgaactcccattcacaattgcttcaaagagaataaaatacctaggaatccaacttacaagggatgtgaaggacctcttcaaggagaactacaaaccactgctcaacgaaataaaagaggacacaaacaaatggaagaacattccatgctcatggataggaagaatcaatatcatgaaaatggccatactgcccaaggtaatttatagattcaatgccatccccatcaagctaccaatgactttcttcacagaattggagaaaactgctttaaagttcatatggaaccaaaaaagagcctgcattgccaagacaatcctaagccaaaagaacaaagctggaggtatcacactacctgacttcaaactgtactacaaggctacagtagccaaaacagcatggtactggtaccaaaacagcatggtactggtaccaaaacagagatatagaccagtggaacagaatagagcccttggaaataataccatacacctacaaccatctgatcttcgaaaaacctga

SEQ ID NO: 127190 - DNA, 1944 bp, Homo sapiens
atgaaggcagaaataaaaatgttctttgaaaccaacgagaacaaagacacaacataccagaatctctgggacgcattcaaagcagtgtgtagagggaaatttatagcactaaatgcccacaagagaaagcaggaaagatccaaaattgacaacctaacatcacaattaaaagaactagaaaagcaagagcaaacacattcaaaagctagcagaaggcaagaaataactaaaatcagagcagaactgaaggaaatagagacacaaaaaacccttcaaaaaatcaatgaatccaggagctggttttttgaaaggatcaacaaaattgatagaccgctagcaagactaataaagaaaaaaagagagaagaatcaaatagacacaataaaaaatgataaatgggatatcaccaccgatcccacagaaatacaaactaccatcagagaatactacaaacacctctacgcaaataaactagaaaatctagaagaaatggataaattcctcgacacatacactctcccaagactaaaccaggaagaagttgaatctctgaatagaccaataacaggatctgaaattgtggcaataatcaatagcttaccaaccaaaaagagtccaggaccagatggattcacagccgaattctaccagaggtacaaggaggaactggtaccattccttctgaaactattccaatcaataggaaaagagggaatcctccctaactcattttatgaggccagcatcattctgataccaaagccaggcagagacacaaccaaaaaagcaaattttagaccaatatccttgatgaacattgatgcaaaaatcctcaataaaatactggcaaaacgaatccagcagcacatcaaaaagcttatccaccatgatcaacatataaacaaagccaaagacaaaaaccacatgattatctcaatagatgcagaaaaagcctttgacaaaattcaacaacccttcatgctaaaaactctcaataaattaggtattgatgggacgtatttcaaaataataagagctatctatgacaaacccacagccaatatcatactgaatgggcaaaaactggaagcattccctttgaaaactggcacaagacagggatgccctctctcaccactcctattcaacatagtgttggaagttctggccagggcaattaggcaggagaaggaaataaagggtattcaattaggaaaagaggaagtcaaattgtccctgtttgcagatgacatgattgtatatctagaaaaccccattgtctcagcccaaaatctccttaagctgataagcaacttcagcaaagtctcaggatacaaaatcaatgtacaaaaatcacaagcattcttatacaccaacaacagacaaacagagagccaaatcatgagtgaactcccattcacaattgcttcaaagagaataaaatacctaggaatccaacttacaagggatgtgaaggacctcttcaaggagaactacaaaccactgctcaaggaaataaaagaggatacaaacaaatggaagaacattccatgctcatgggtaggaagaatcaatatcgtgaaaatggccatactgcccaaggtaatttacagattcaatgccatccccatcaagctaccaatgactttcttcacagaattggaaaaaactagttgtggatctctcaccgaaaagccgcatgcaggattttgccgatttcggaaccaccatcaaacaggattttcgcctgctggggcaaaccagcgtggaccgcttgctgcaactctctcagggccaggcggtgaagggcaatcagctgttgcccgtctcactggtgaaaagaaaaaccaccctggcgcccaatacgcaaaccgcctctccccgcgcgttggccgattcattaatgcagctggcacgacaggtttcccgactggaaagcgggca

SEQ ID NO: 127191 - DNA, 2155 bp, Homo sapiens
atgaaggcagaaataaagatgttctttgaaaccaacaagaacaaagacacaacataccagaatctctgggacgcattcaaagcagtgtgtagagggaaatttatagcactaaatgcccacaagagaaagcaggaaagatccaaaattgacaccctaacatcacaattaaaagaactagaaaagcaagagcaaacacattcaaaagctagcagaaggcaagaaataactaaaatcagagcagaactgaaggaaatagagacacaaaaaacccttcaaaaaattaatgaatccaggagctggttttttgaaaggatcaacaaaatagatagaccactagcaagactactaaagaaaaaaagagagaagaatcaaatagacgcaataaaaaatgataaaggggatatcaccaccgatcccacagaaatacaaactaccatcagagaatactacaaacacctctacgcaaataaactagaaaatctagaagaaatggataaattcctcgacacatacactctcccaagactaaaccaggaagaagttgaatctctgaatagaccaataacaggagctgaaattgtggcaataatcaatagcttaccaaccaaaaagagtccaggaccagatggattcacagccgaattctaccagaggtacaaggagaagctgatagtgttggaagttctggccagggcaatcaggcaggagaaagaaataaagggtattcaattaggaaaagaggaactcaaattgtccctgtttgcagatgacatgattgtatatctagaaaaccccatcgtctcagcccaaaatctcctcaagctgataagcaacttcagcaaagtctcaggatacaaaatcaatgtgcaaaaatcacaagcattcttatacagtaataacagacaaacagagagccaaatcatgagtgaactcccattcacaattgcttcaaagagaataaaatacctaggaatccaacttacaagggatgtgaaggacctcttcaaggagaactacaaaccactgctcaatgaagttaaagaggatacaaacaaatggaagaacattccatgctcatggataggaagaatcaatattgtgaaaatggccatactgcccaaggtaatttacagattcaatgccatccccatcaagctaccaatgactttcttcacagaattggaaaaaaactacttaaaagttcatatggaaccaaaaaagagcccgcatcgccaagtgaatcctaagccaaaagaacaaagctggaggcatcacactacctgacttcaaactatactacaaggctacagtaaccaaaacagcatggtactggtaccaaaacagagatatagatcaatggaacagaacagagccctcagaaataacgccgcatacctacaactatctgatctttgacaaacctgagaaaaacaagcaatggggaaaggattccctatttaataaatggtgctgggaaaactggctagccatatgtagaaagctgaaactggatcccttccttacaccttatacaaaaatcaattcaagatggattaaagatttaaatgttagacctaaaaccataaaaaccctagaagaaaacctaggcattaccattcaggacataggcgtgggcaaggacttcatgtccaaaacaccaaaagcaatggcaaccaaagccaaaattgacaaatgggatctaattaaactaaagagcttctgcacagcaaaagaaactaccatcagagtgaacaggcaacctacaacatgggagaaaattttcgcaacctactcatctgacaaagggctaatatccagaatctacaatgaactcaaacaaatttacaagaaaaaagcaagaagccccgtccctaggggagaggggagagcgccacataaagagagcaccccatgggataaaagaatctcaacagcagcgctggagtcccagatcttccctctgacacagtctacccacatgagaaggaacgagaaaaacatttctggtaatgtgacaaaacgagattctttaacacccccaaaagatcacactagttcaccagcaatggatccaaaccaagacaaaatctctgaatcgtcagaaaaagaattcagaatgtcaactattaagctaatcaagaaggcaccagaaaaa

SEQ ID NO: 127192 - DNA, 3314 bp, Homo sapiens
atggtaaagggatcaattcaacaagaggagctaactatcctaaacatttatgcacccaatacaggagcacccagattcataaagcaagtcctgagtgacctacaaagagacttagactcccacacattaataatgggagactttaacaccccactgtcaacattagacagatcaacgagacagaaagtcaacaaggatacccaggaattgaactcagctctgcaccaagcagacctaatagacatctacagaactctccaccccaaatcaacagaatatacatttttttcagcaccacaccacacctattccaaaattgaccacatagttggaagtaaagctctcctcagcaaatgtaaaagaacagaaattataacaaactatctctcagaccacagtgcaatcaaactagaactcaggattaagaatctcactcaaagccgctcaactacatggaaactgaacaacctgctcctgaatgactactgggtacataacgaaatgaaggcagaaataaagatgttctttgaaaccaacgagaacaaagacaccacataccagaatctctgggacgcattcaaagcagtgtgtagagggaaatttatagcactaaatgcctacaagagaaagcaggaaagatccaaaattgacaccctaacatcacaattaaaagaactagaaaagcaagagatcaacaaaattgatagaccgctagcaagactaataaagaaaaaaagagagaagaatcaaatagacacaataaaaaatgataaaggggatatcaccaccgatcccacagaaatacaaactaccatcagagaatactacaaacacctctacacaaataaactagaaaatctagaagaaatggatacattcctcgacacatacactctcccaagactaaaccaggaagaagttgaatctctgaatagaccaataacaggatctgaaattgtggcaataatcaatagtttaccaaccaaaaagagtccaggaccagatggattcacagccgaattctaccagaggtacaaggaggaactggtaccattccttctgaaactattccaatcaatagaaaaagagggaatcctccctaactcattttatgaggccagcatcattctgataccaaagccgggcagagacacaaccgaaaaagagaattttagaccaatatccttgatgaacattgatgcaaaaatcctcaataaaatactggcaaaccgaatccagcagcacatcaaaaagcttatccaccatgatcaagtgggcttcatccctgggatgcaaggctggttcaatatacgcaaatcaataaatgtaatccagcatataaacagagccaaagacaaaaaccacatgattatctcaatagatgcagaaaaagcctttgacaaaattcaacaacccttcatgctaaaaactctcaataaattaggtattgatgggatgtatttcaaaataataagagctatctatgacaaacccacagccaatatcatactgaatgggcaaaaactggaagcattccctttgaaaactggcacaacacagggatgccctctctcaccgctcctattcaacatagtgttggaagttctggccagggcaatcaggcaggagaaggaaataaagggtattcaattaggaaaagaggaagtcaaattgtccctgtttgcagacgacatgattgtttatctagaaaaccccatcgtctcagcccaaaatctccttaagctgataagcaacttcagcaaagtctcaggatacaaaatcaatgtacaaaaatcacaagcattcttatacaccaacaacagacaaacagagagccaaatcatgagtgaactcccattcacaattgcttcaaagacaataaaatacctaggaatccaacttacaagggatgtgaaggacctcttcaaggagaactacaaaccactgctcaaggaaataaaagaggacacaaacaaatggaagaacattccatgctcatgggtaggaagaatcaatatcgtgaaaatggccatactgcccaaggtaatttacagattcaatgccatccccatcaagctaccaatgactttcttcacagaattggaaaaaactactttaaagttcatatggaaccaaaaaagagcccgcatcgccaagtcaatcctaagccaaaagaacaaagctggaggcatcacactacctgacttcaaactatactacaaggctacagtaaccaaaacagcatcggtactggtaccaaaacagagatatagatcaatggaacagaacagagccctcagaaataatgccgcatatctacactattctgatcctttggacaaacctgagaaaaacaagcatgggggaaaggcatccctaatttataaaatggctgctggggaaaactggctagcccatatgtaggaagctgaaactggatcccttccttacaccttatacaaaaatcaatccaagatggattaaagatttaaacgttagacctaaaaccataaaaaccctagaagaaaacctaggcattacctttcaggacataggcgtgggcaaggacttcatgtccaaaacaccaaaagcaatggcaacaaaagccaaaattgacaaatgggatctaattaaactaaagagcttctgcacagcaaaagaaactaccatgagagtgaacaggcaacctacaacatgggagaaaattttcgcaacctacgcatctgacaaagggctaatatccagaatctacaatgaactcaaacaaatttacaagaaaaaaacaaacaaccccatcaaaaagtgggcgaaggacatgaacagacacttctcaaaagaagacatttatgcagccaaaaaacacatgaagaaatgctcatcatcactggccatcagagacaatgcaaatcaaaaccactatgagatatcatctcacaccagttagaatggcaatcattaaaaagtcaggaaacaacagaatcagaaggcatttccagccaagatcagccatgttcttctgctgctgccctgggggcgagggctcagggctgcagtgggagctgctgctggcagcatggactgtgctcccctacccctgccctgcagccacagttgggagattcctcaagcaggcacagactgctgaccattccttcctgggccatgtttggagggtgcccagcagcaggagctggactgataaagaaatcctgagcttggtcgtcaacagacagaaccaggaagttgtgcagctcatagggggcctctgtgggacacacaccatctcgcccacacagcacccagccacgggttga

SEQ ID NO: 127193 - DNA, 2697 bp, Homo sapiens
atgccgatggtagaggagctttacggcaactatggcatcatggccgataccacggagcgagtgggccagcataaagatgcctatcaagtgatactggatggtgtgaaaggtggtactaaggaaaaacgattagcagctcaatttattctgaaattctttaagcattttacagaattggctgattctgctatcaatgcacacttacagacagtaagtggaagacagcaacttgtaaagttggtggctgaacaggccgacctagaacagaccttcaatccctcagatcctgagtgtgtgggcaggctcttacagtgcactcagcaggcagtacccttcttctctaaaactgtccattccacaaggtctgtgacatatttctgtgagcaggttctccctaaccttggtatcttgactaccgcagtggaaggtcttgacatacagttggaggtattgaaattgttggtggagatgagttcattttgtggtgacatggaaaaactagaaacaaatttagggaaactatttgataagttattggaatacatgcccctccctccagaagaagcagaaaatggagggaatgctggtgatgaagaacccaaactacagttcagttatgtggaatgtttgttgtacagttttcaccagttgggccaaaaacttccagatttcttaacagccaaactgaatgcagaaaaactcaaagatttcaaaatcaggctgcaatactttgcacgaggcctgcaagtttatatcagacaacttcacttagctctccaggtgaaacagcatataaacagagccaaagacaaaaaccacatgattatctcaatagatgcagaaaaagcctttgacaaaattcaacaacccttcatgctaaaaactctcaataaattaggtattgatgggacgtatttcaaaataataagagctatctatgacaaacccacagccaatatcatactgaatgggcaaaaactggaagcattccctttgaaaactggcacaagacagggatgccctctctcaccgctcctattcaacatagtgttggaagttctggccagggcaatcaggcaggagaaggaaataaagggtattcaattaggaaaagaggaagtcaaattgtccctgtttgcagatgacatgattgtttatctagaaaaccccatcgtctcagcccaaaatctccttaagctgataagcaacttcagcaaagtctcaggatacaaaatcaatgtacaaaaatcacaagcattcttatacaccaacaacagacaaacagagagccaaatcatgggtaaactcccattcacaattgcttcaaagagaataaaatacctaggaatccaacttacaagggatgtgaaggacctcttcaaggagaactacaaaccactgctcaacgaaatgaaagaggacacaaacaaatggaagaacattccatgctcatggataggaataatcaatatcgtgaaaatggtcatactgcccaagaattggaaaaaaactactttaaagttcatatggaaccacaaaagagcctgcattgccaagtcaatcctaagccaaaggaacaaagctggaggtatcacgctacctgacttcgaactatactacaaggctacagtaaccaaaacagcatggtactggtaccaaaacagagatatagatcaatggaacagaacagaaccctcagaaataacaccacacatctacaaccatatgatctttgataaacctgacaaaaacaagaaatggggaaacgattccctatttgacaaatggtgctgggaaaactggttagccatatgtagaaagctgaaactggatcccttccttacaccttatacaaaaattaattcaagatggattaaagacttaaatgttagacctaaaaccataaaaaccctagaagaaagcctaggcaataccattcaggacataggcataggcaaggacttcatgtctaaaacatcaaaagccatgacaacaaaagccaaaattgacaaatgggatctaattaaactaaagagcttctgcacagcaaaagaaactaccatcagagtgaacaggcaacctacagaatgggagaacatttttgcaatctactcatctgacaaaggactaatatccagaatctacaaagagctcaaacaaatttacaagaaaaaaacaaccccatcaaaagcccaaaatctccttaagctgataagcaacttcagcaaagtctcaggatacaaaatcaatgtacaaaaatcacaagcattcttatacaccaataacagacaaacagagagccaaatcatgagtgaactcccattcacaattgcttcaaagagaataaaatacctaggaatccaacttacaagggatgtgaaggacctcttcaaggagaactacaaaccactgctcaaggaaataaaagaggatacaaacaaatggaagaacattccatgctcatgggtaggaagaatcaatatcgtgaaaatggccatactgcccaagaagaagaagaagaagaagaagaagaaggagaaggagaagaagggaggagaaggagggaaaagagagggaggagggagagaggaggggggaggaggaggaggagaaggagaagaaggagaaggaggagaaggaggaggaaggaaggaggaagaagaaggaaggaagaaggaagaaagaagaagaaaataa

SEQ ID NO: 127194 - DNA, 2962 bp, Homo sapiens
atggatacattcctcgacacatacactctcccaagactaaaccaggaagaagttgaatctctgaatagaccaataacaggctctgaaattgtggcaataatcaatagtttaccaaccaaaaagagtccagcaccagatggattcacagccgaattctaccagaggtacaaggaggaactggtaccattccttctgaaactattccaatcaatagaaaaagagggaatcctccctaactcattttatgaggccagcatcattctgataccaaagccgggcagagacacaaccaaaaaagagaattttagaccaatatccttgatgaacattgatgcaaaaatcctcaataaaatactggcaaaccgaatccagcagcacatcaaaaagcttatccaccatgatcaagtcagcttcatccctgggatgcaaggctggttcaatatacgcaaatcaataaatgtaatccagcatataaacagagccaaagacaaaaaccacatgattatctcaatagatgcagaaaaagcctttgacaaaattcaacaacccttcatgctaaaaactctcaataaattagatattgatgggttggaagttctggccagggcaatcaggcaggagaaggaaataaagggcattcaatcaggaaaagaggaagtcaaattgtccctgtttgcagatgacatgattgcatatctagaaaaccccatcgtctcagcccaaaatctccttaagctgataagcaacttcaacaaagtctcaggatacaaaatcaatgtgcaaaaatcacaagcattcttatgcaccaataacagacaaacagaaagccaaatcatgagtgaactcccattcacaattgcttcaaagagaataaaatacctaggaatccaacttacaagggatgtgaaggacctcttcaaggagagctacaaaccactgctcaatgaaataaaagaggatacaaacaaatggaagaacattccatgctcatgggtaggaagaatcaatatcgtgaaaatggccatactgcccaaggtaatttatagattcaatgccatccccatcaagctaccaatgactttcttcacagaattggaaaaaactaccttaaagttcatatggaaccaaaaaaagagcccacattgccaagacaatcctaagccaaaagaacaaagctggaggcatcacactacctgacttcaaactatactacaaggctacagtaaccaaaacagcatggtactggtaccaaaacagagatatagatcaatggaacagaacagagccctcagaaataatgccgcatatctacaaccatctgatctttgacaaacctgagaaaaacaagcaatggggaaaggattccctatttaataaatggtgctgggaaaactggctagccatatgtagaaagctcaaactggatcccttccttacaccttatacaaaaatcaattcaagatggattaaagacttaaacgttcgacctaaaaccataaaaaccctagaagaaaacctaggcaatatcattcaggacataggcatgggcaaggacttcatgtctaaaacaccaaaagcaatggcaacaaaagccaaagttgacaaatgggatctaattaaactaaagagcttctgcacagcaaaagaaactaccatcagagtgaacaggcaacctacaacatgggagaaaattttcgcaacctactcatctgacaaagggctaatatccagaatctacaatgaactcaaacaaatttacaaaaaaaacaacaacaacaacaacaacatcaaaaagtgggcaaaggatatgtacagacacttctcaaaagaaggcatttatgcagccaatcgacatatgaaaacatgctcatcatcactggtcatcagagaaatgcaaatcaaaaccacaatgagataccatctcacaccagttagaatggagatcattaaaaagtcaggacacaacaggcaaacagggtctggagtggacctccagcaaactccaacagacctgcagctgacggtcttcactgttagaaggaaaatcaacaaacagaaaggacatccacaccaaaacaccatcgtgttggatgttctagccagggcaatcaggcaggagaaagaaataaagcgtattcaattaggaaaagagggagtcaaattgtccctgtttgcagatgacatgattgtatatttagaaaaccccatcatcccagcccaaagtctctttaagctgataagcaacttcagcaaagtctcaggatacaaaatcaatgtgcaaaaatcacaggcatttttatacagcaacaacagacaaacagagagccaaatcataagtgaactctcaatcacaatttcttcacagagaataaaatacttaggaatccaacttacaagggatgtgaaggacttcttcaaggagaattacaaaccactgctcaacgaaataaaagaggatacaaacaaatggaggaacattccatgctcatggataggaagaatcaatatcatgaaaatggtcatactgcccaaggtaatttatagattcaatgccatccccatcaagctaccaatgactttctccacagaattggaaaaaactactttaaagttcacatggaaccaaaaaaaagcctgcattgccaagacaatcctaagccacaagaacaaagctggaggcatcatgctacctgacttcaaactatactacaaggctacagtaaccaaaacagcatggtactggtaccaaaacagagatatagaccaatggaacagaacagagccctcagaaatcatatcacacatctactaccacctgatctttgacaaatctgacaaaaacaagaaatggggaaaggattccctatttttaaaaagctgctgggaaaactggctagtcatatgcagaaagctgaaactggatcccttccttacaccttatacaaaaattaattcaagatga

SEQ ID NO: 127195 - DNA, 8214 bp, Homo sapiens
ttaggtgtaggggcttcggtggagccggggagtttcggatattacaggtgccggtggtctgttgacgggggttggggcccatggaggaggggtccgcgaaggggacacgaagtaggagcgacgagaggcagcgtagaagtgggggtgtaactgaatagttgtggagtaaccatgtaccagaaccgtgcccaaacgagccagtttaccgtagctatggcagcgtgaggaagctccatcagcctgcctctgggaattgtcagctgcagttagtgggacagctaggctgggtcgagagaggcagccctctccagagccaccaaaatcatcagacagtgagaatgcagcagacacggtcctgcagtagatgtggtccttctctgaaggacatgctgctttggttactggagtcttgtagtatagtttgaagtcaggtagcatgatgcctccagctttgttcttttggcttaggatcgtcttggtaatgcgggctcttttttggttccatatgaactttaaagtagttttttccaattctgtgaagaaagtcattggtagcttgatggggttggcattgaatctataaattaccttgggcagtatggccattttcatgatattgattcttcctatccatgggcatggaatgttctcccatttgtttgtatcctcttttatttcgttgagcagtggtttgtagttctccttgaagaggtccttcacatcccttgtaagttggattcctaggtattttattctctttgaagcaatgaatgttgtagggcacagtactaggattgagtaccccatacatagtgaagcctttatagagagggttcctgaagtctggtttcctctgaaccaagaaaggccacacagaatgtgttttctcatagactcttagatcttcccgatccttctggcagttaccaaggaagtttccaaactggcaggagaaaacatggtcatgaatctccagcaggaagttttcattaaactcaaaggcacagggaaactgttccattaattgccagatacagtctaggaactgggtgaagataggggacacttctttagagtccccatcgaggtggccacaccttctgatataattacaacctggctcacaacgataccacctttccatgagtcctttgaatgtcctataaaatggatctaggaggatgctagccactgagcagacttgtgctgtgcggtcccatccatcagaacaatggactaagacactggccttttctaccttcactgcctttgtaatgaaaattccagcatccataatagctttaatgtgtcttaaccaccctgagctctccaggccgctaagaaattcactcattgttggagttttcaattcacaaacttccaagagtttctgcagactgctccgcattacatggatgttctcaatgcccatgaatctgaagcgaatgttggcatagttgtcttcattttcataccccttcccagctgctcggttggccatggcattcaactttggtcttgtgtctacaacatacataaactggctccctgggtttgtttggctaatggcctccaacaagagctcatcatctacacagcgagtgtaaaatccagagagaggctggctacagcggcaaatggcagcattgttctctttgtagaggtaggagagcacagggacacgttctttacttctgaactttgaacttccaaccaccgttcccaaggtaacagatttaggaaccactatttcaggagggtaggtgctgcatatctcatagtttctgttggcatctgttatggtccagtttctgttgggtattcccatacgcccaaagtctgatattgggtcaatcagtttccatccactttccctcatctcttttgaggatttgggattataagaaaaagcataaagatcttcaggtaatgctggctgagaaagcttgagcagtgaaatataaacctcatggcacacaaggtcagaatctaaaacaaagtgggccacccggaaattcttgcagcggagggtcaggggacaacccaggctagtgatgggtaacttctccacagtggcaatgtgatggagtgcaatccatgtttctttccgggctgcacctgaagcctccacatagatcaggtgggttgcagtaagataaagaatcccattagctggtttcttactcacataacgatccaccaatttcacgttttctaccttttctgaaatcagtgcgggaaaaactggttcatctaattgggactggttggacagtgggtgcaggccatggagggcaagctgaagcagggtggggcatcgcctaaaccaggaagtgcaaggggtgggagatttccatttcctagccaagggaagacgtgacggactgtacctggaaaatcgggacactccctcccaaatactgtgcttttccaacagtataagcaaatggcacaccaggagattatatcccacacctggccttcggagggtcctacgcccacggaatctcgctgattgctagcacagcggtctgagatcaaactgcaaggccgcagcaaggctgggggaggggcgcccgccattgcccaggcttgcttaggtaaacaaagcagccggggaagctcgaactgggtgcagcccaccacagctcaaggaggcctgcctgcctctgtaggctccacctctgggggcagggcacagacaaacaaaaagacagcagtaacctctgcagacttaaatgtccctgtctgacagctttgaagagagcagtggttctcccagcacgcagctggagatctgagaacgggcagactgcctcctcaagtgggtccctgacccctgacccccgagcagcctaactgggaggcaccccccagcaggggcacactgacacctcacacggcagggtattccaacagacctgcagctgagggtcctgtctgttagaaggaaaactaacaaacagaaaggacatccacaccgaaaacgcatctgtacatcaccatcatcaaagaccaaaagtagataaaaccacaaagatggggaaaaaacagaacagaaaaactggaaactctaaaacgcagagcacctctcctcctccaaaggaacgcagttcctcaccagcaacggaccaaagctggatggagaatgattttgacgagctgagagaagaaggcttcagacgctcaaattactctgagctacgggaggacattcaaaccaaaggcaaagaagttgaaaactttgaaaaaaatttagaagaatgtataactagaataaccaatacagagaagtgcttaaaggagctgatggagctgaaaaccaaggctcgagaactacgtgaagaatgcagaagcctcaggagccaatgcgatcaactggaagaaagggtatcagcaatggaagatgaaatgaatgaaatgaagcaagaagggaagtttagagaaaaaagaataaaaagaaacgagcaaagcctccaagaaatatgggactatgtgaaaagaccaaatctacgtctgattggtgtacctgaaagtgatgcggagaatggaaccaagttggaaaacactctgcaggatattatccaggagactttccccaatctagcaaggcaggccaacgttcagattcaggaaatacagagaacgccacaaagatactcctcgagaagagcaactccaagacacataattgtcagattcaccaaagttgaaatgaaggaaaaaatgttaagggcagccagagagaaaggtcgagttaccctcaaagggaagcccatcagactaacagcggatctctcggcagaaaccctacaagccagaagagagtgggggccaatattgaacattcttaaagaaaagaattttcaacccagaatttcatatccagccaaactaagcttcataagtgaaggagaaataaaatactttacagacaagcaaatgctgaccgattttgtcaccagcaggcctgccctaaaagagctcctgaaggaagcgctaaacatggaaaggaacaaccggtaccagccactgcaaaatcatgccaaaatgtaaagaccatcgagactaggaagaaactgcatcaactaacgagcaaaatcaccagctaacatcataatgacaggatcaaattcacacataacaatattaactttaaatgtaaatggactaaattctccaattaaaagacacagactggcaagttggataaagagtcaagacccatcagtgtgctgtattcaggaaacccatctcatgtgcagagacacacataggctcaaaataaaaggatggaggaagatctaccaagcaaatggaaaacaaaaaaaggcaggggttgcaatcctagtctctgataaaacagactttaaaccaacaaagatcaaaagagacaaagaaggccattacatgatggtaaagggatcaattcaacaagaggagctaactatcctaaatatgtatgcacccaatacaggagcacccagattcataaagcaagtcctgagtgacctacaaagagacttagactcccacacattaataatgggagactttaacaccccactgtcaacattagacagatcaacgagacagaaagtcaacaaggatacccaggaattgaactcagctctgcaccaagcagacctaatagacatctacagaactctccaccccaaatcaacagaatatacatttttttcagcaccacaccacagctattccaaaattgaccacatacttggaagtgaagctctcctcagcaaatgtaaaagaacagaaattataacaaactatctctcagaccacagtgcaatcaaactagaactcaggattaagaatctcactcaaagccgctcaactacatggaaactgaacaacctgctcctgaatgactactgggtacataacgaaatgaaggcagaaataaagatgttctttgaaaccaacgagaacaaagacacaacataccagaatctctaggacgcattcaaagcagtgtgtagagggaaatttatagcactaaatgcccacaagagaaagcaggaaagatccaaaattgacaccctaacatcacaattaaaagaactagaaaagcaagagcaaacacattcaaaagctagcagaaggcaagaaataactaaaatcagagcagaactgaaggaaatagagacacaaaaaacccttcaaaaaatcaatgaatccaggagctggttttttgaaaggatcaacaaaattgatagaccgctagcaagactaataaagaaaaaaagagagaagaatcaaatagacacaataaaaaatgataaaggggatatcaccaccgatcccacagaaatacaaactaccatcagagaatactacaaacacctctacgcaaataaactagaaaatctagaagaaatggatacattccttgacacatacactctcccaagactaaaccaggaagaagttgaatctctgaatagaccaataacaggagctgaaattgtggcaataatcaatagtttatcaaccaaaaagagtccaggaccagatggattcacagccgaattctaccagaggtacaaggaggaactggtaccattctttctgaaactattccaatcaatagaaaaagagggaatcctccctaactcattttaatgaggccagcatcattctgataccaaagccgggcagagacacaaccaaaaaagagaattttagaccaatatccttgatgaacattgatgcaaaactcctcaataaaatactggcaaaccgaatccagcagcacatcaaaaagcttatccaccatgatcaagtgggcttcatccctgggatgcaaggctggttcaacacacgaaaatcaataaacgtaatccaacatataaacggaaccaaagacaaaaaccacatgattatttcaatagatgcagaaaaggcctttgacaaaattcaaagggttcttcatgctaaaaactctcaataaattaggtattgatgggacatatctcaaaataataagagctatctatgacaaatccacagccaatatcatactgaatgggcaaaaactggaagcattccctttgaaaactggcacaagacagggatgccctctctcccccactcctattcaacatagtgttggaagttctggccagggcaattaggcaggagaaggaaataaagggtattcaattaggaaaagaggaagtcaaattgtccctgtttgcagatgacatgattgtatatctagaaaaccccattgtcctcagccccaaaatctcccttaaggctgataagcaacgtcagccaaagtctgaggatacaaaatcaatgtgcaaaaatcaccaagcattcctatacaccaataacacagacaaacaagagagccaaatcatgagtgaactcccattcacaactgcttcaaagagaataaaatacctaggaatccaacttacaagggatgtgaaggacctcttcaaggagaactacaaaccactgctcaaggaaaataaaagaggatacaaacaaatggaagaacattccatgctcatgggtaggaagaatcaatatcatgaaaatggccatactgcccaaggtaaatttatagatttataaattcaatgccatccatccccatcaagctaaccaatgactttcttcacagaattggaaaaaaactactttaaagttcatatggaaccaaaaaagagcccgcattgccaagtcaatcctaagacaaaagaacaaagctggaggcatcaacgctacctgacttcaaactatatactacaaggctacagtaaccaaaagagcacgatcagcatggtactggtaccaaaacagcatggtactggtaccaaaacagagataatagatcaatggaacagaacagagccctcagaaataacgccgcatatctacaactatctgatctttgacaaacctttgcttgagaaaaacaagcaatggggaaaaggattccctatttaataaatggtgctgggaaaactggctagccatatgtagaaagctgaaactggatcccttccttacaccttatacaaaaattaattcaagttggattaaagacttaaatgttagacctaaaaccataaaaactctagaagaaaacctaggcaataccattcaggacataggcatgggcaaggacttcatgtctaaaacactaaaagcaatggcaacaaaagccaaaattgacaaatgggatctaattaaactcaagaagcttctgcacagcaaaagcaactaccatcagagtgaacaggcaacccacaaaatgggagaaaattttcaccacctactcatctgacaaagggctaatatccagaatctacaaagaactcaagataatttacaagaaaaaaacaaaacaactgcatcaaaaagtgggcgaaggacatgaacagacacttctcaaaagaagacatttatgcagccaaaaaaacacatgaaaaaaatgctcaccatcactggccatgcagggagatgcaaatcaataccactatgagatatcatctcacaccagttagaatggcaatcattaaaaagtcaggaaacaacaggtgctggagaggatgtggagaaataggaacacttttacactgttggtgggactgtaaactagttcaaccattgtggaagtcagtgtggcgattcctcagggatctagaattagaaataccattttacccagccatcccattactgggtatatacccaaaggactataaatcatgctgctataaagacacatgcacacgtatgtttattgaggcactattcacaatagcaaagacttggaaccaacccaaatgtccaacaatgatagactggattaagaaaatgtggcacatatacaccatggaatactatgcagccataaaaaatgatgagttcatatcctttgtagggacatggatgaaattggaaaccatcattctcagtaaactatcgcaagaacaaaaaaccaaacaccgcatattctcactcataggtgggaattgaacaatgagatcacatggacacaggaaggggaatatcacactctggggactatggtggggaggggggaggggggagggatagcattgggagatatacctaatgctagatgacgagttagtggtgcagtgcaccagcatggcacatgtatacatatgtaactaacctgcacaatgtgcacatgtaccctaaaac

SEQ ID NO: 127196 - DNA, 389 bp, Homo sapiens
tggcatgtgagatacaggtaagcttgaaaccaagaagcagaagcagcagatcaggcacagacactcacacagacaagccactcttgcaggcaaaaagaggaatcaccaggctgcacatgagcagccctacaactgcacatggcactgggtgtagtcctcgcttcttctcccacacaaacctctggcaaatagatggttgaagaaaaacttaccttgcccaaagatgagaaataaaaaagcaaacagcgcagcatctacaggaagacactgcaagaattaaaaaataaaaacgagaaaaggaacaggaaaaacaagtggcaagtgaaaactcactagtaaaaatgttgtcatagaacagatgaaaattgccagcaaacttttcgctgaaa

SEQ ID NO: 127197 - DNA, 648 bp, Homo sapiens
atgtggaggctggcagccctcgctcctgtgaactggcggctggggctgcatctcgcccacgtcgctgtcatgtgcggggcccacgttcgcatgctcctcgctctgcccctgctgcagtgtcttcctgtagatgctgcgctgtttgcttttttatttctcatctttgggcaaggaccacccgtgcagaccacccccgcctgccagaccagtctcagggcatctgatggcttccctgcctgctccgcccacatctcaggccaaacccctggacgtcaggacactgcaccatgcagcccactgtattttcagtctttcctggagccctgcccccgccagccctgctcgcaccccaggttcctggtggccgatgcgcttaggtcagccgactggcttctgtgctctgcccctgaacaccaagctgccctgaacagagcctggtctctcagggtgagggtgggtcagggataccgcgtgtgctccctgctgtctgcgtccgtgtctggcaaattgaaaagtgctcataggcgctgtgaaggccttgatgtcctctggtgccaacgcaacagagaagccagcaaaatgctctgcatgggacaggttctggtttttgctacagagactgtaagagatgcaaagccaggacgctga

SEQ ID NO: 127198 - DNA, 363 bp, Homo sapiens
atgaaccacgctgtccaaaccgtcttcactcccgccaacaccagccaccccctcaactatgaaatgctcaaggaggagcatgaggtggctgtgctgagggtgccccacaaccctgttcccccgacatccaccgtgatccacatccacacattcacctactccgtgaagtctagggacaggaagatggttggcgacctgactggggcccaggcctacgcctccactgccaagtgcctgaacgtttgcaccctcatcctgggcatccgtgtgaccacaacactcatcatccttttcaccagtagttctatgataatattccaagcaatttctcaaatgataaagaatctccaaggccagcagtag

SEQ ID NO: 127199 - DNA, 376 bp, Homo sapiens
ggaggtctcactgagcaccgtcccagcatccggacaccacagcggcccttcgctccacgcagaaaaccacacttctcaaaccttcactcaacacttccttccccaaagccagaagatgcacaaggaggaacatgaggtggctgtgctgggggcaccccccagcaccatccttccaaggtccaccgtgatcaacatccacagcgagacctccgtgcccgaccatgtcgtctggtccctgttcaacaccctcttcttgaactggtgctgtctgggcttcatagcattcgcctactccgtgaagtctatggacaggaagatggttggcgacgtgaccggggcccaggcctatgcctccaccgccaagtgcctgaacatt

SEQ ID NO: 127200 - DNA, 363 bp, Homo sapiens; identical to SEQ ID NO: 127198

SEQ ID NO: 127201 - DNA, 376 bp, Homo sapiens; identical to SEQ ID NO: 127199

SEQ ID NO: 127202 - DNA, 470 bp, Homo sapiens; identical to SEQ ID NO: 127131

SEQ ID NO: 127203 - DNA, 448 bp, Homo sapiens; identical to SEQ ID NO: 127132

SEQ ID NO: 127204 - DNA, 678 bp, Homo sapiens; identical to SEQ ID NO: 127133

SEQ ID NO: 127205 - DNA, 373 bp, Homo sapiens
cggcacgaggccattgttccctctgccctgaacatgcgtggtcaaccccttcctgtctcatgtcacccttcagcgaggccttcccgctaagctggtccatctgatctacaatggcagcccaagagctatttcccacaccctccttttccacttctctgcttaacacgggtacactataaggtgtctttcttgctcagttgatggtttcacctgctgttgcctggtttgtaagccccataagaggaagaccagagatcttggtcattgctgtaccctcaccattcatagcagtccctgtacctctgtaggtacttaagggacaccttttaaaagaagggtgagaggaagggcaagggagacagggaggaaaagg

SEQ ID NO: 127206 - DNA, 1674 bp, Homo sapiens
atggctggaggatcatgggaacaatatccctggggggtgtccactttctgcgatatatgtagtcatatcaccccctacgcctttgaatattacgaaggaccatctcacacgggggtgtacacttcctgcgatattgggagtaatatcaacctctcggcctctgaatatgaggaagaaaatcacaggggctatggcgtgtgctcggtggggctggagcggctggcttacgtcttcggtgcttacagcctggggcctcagccgcctcactcctgggcctgctgggcctgtggctgccacgcccagtgcccctcgtggctgcagcaggggtattctgtgagcgcctccaggaatgagaatacagcattattcaaaatagcaaagacgtggaaccaacccaaatgcccatcaatgataggactggaaaaagagtatgtggtacatatacgccatggaatgctatgcagccatcaaaaggaacaagagaatatcctctgcagggacatggatgaagctgaaagccattatcctcagcaaactaatgcagaaacagaaaaccaaacaccacatgttctcacttacaagtggaagccgaacaatgagaacacacggacacagagaggggaacaacacacactggggcctactggagggcagcggtttggagtgatccactcggtgttcaccaacctgcttctgtgggccaatggcgtcctcaatgagtcaaagcaccaactcaatgagcacaaggaacggctcatcactctgggttttgggaacataacaacagttttagatgaccacacaccgcagtgtaactgcacgcccccaactctgtgcactgccatctcccacgggatctactacctctaccccttcaacatagagtatcagatcctggcctccacaatgctctacgtcctgtggaagaacatcgggcgcaaagttgacagccatcagcaccagaagatgcagttcaagtctgatggggtcatgaccaagagcgagtcggcactcatcatgttctacctgtatgccatcaccctgctgatgcttatgggggctgcggggctggctggaatccggatttacaggatagacgagaagtcactggatgagtccaaaaatccggcccgcaaactggactcggacctcttggtgggcactgcctcgggctcctggcttatctcctggggctcaatcttggccatcctctgtgctgagggccacccccgctacacctggtacaacctgccctactccatcctggcgatcgtggagaagtacatccagaacctcttcatctttgaatccattcaccgagagcctgaaaaactctctgaggacatccaaacccttcgggtggtcacagtctgcaatggcaacaccatgccccttgcttcttcctgccccaagagtggaggtgtggccagagatgtggctccccagggcaaggacatgccaccagcagccaatggaaatgtgtgcatgagagaaagccatgacaaggaggaggagaagcaggaggagagcagctggggagggagcccaagcccagtccgccttccccgtttcttacagggcaacgccaagagaaaagtcctgaggaatattgcagccttcttgttcctctgcaatatttcggtaatctgcaccaagttattcttattcttttaa

SEQ ID NO: 127207 - DNA, 1659 bp, Homo sapiens
atgagggagcacaaaggagggcatttcggcagcttggggtttggggtgatccacttggtgttcaccaacctgcttctgtgggccaacggcgtcctcaatgagtcaaagcaccaactcaatgagcacaaggaatggctcatcactctgggctttgggaacataacaacagttttagatgaccacacaccgcagtgtaactgcacgcccccaactctctgcaccaccatctcccacgggatctactataactactacctctaccccttcaacatagagtatcagatcctggcctccacagtgctctacgtcctatggaagaacatcgggcgcaaagttgacagccatcagcaccagaagatgcagttcaagcctgatggggtcacggtgggcacagtcctgggcctgaccgcgctggctgccaccattgccgtggtgaccaagagcgagtcagcactcatcacgttctacctgtatgtcatcaccctgatgatgcttatgggggctgcggggctggctggaatccggatttacaggacagatgagaagtcactggatgagtccaaaaatccgccccgcaaactggactcggacctcttggtgggcactgcctcaggctcctggcttatctcctggggctcaatcttggccatcctttgtgccgaggaccacccccactacacctggtacaacctgccctactccatcgtggtgatcatggagaagtacatccagaacctcttcatctttgaatccattcaccgagagcctaaaaaactctctgaggacatccaaacccttcggatggtcacagtctgcaatggcaacaccatgtcccttgcttcctcctgcctcaagagtggagttgtggccggagacgtggctccctggggcagggacatgccaccagcagccaatggaaatgtgtgcctgagagaaagttgtgacaaggaggagaagcaggaggagagcagctggggagggaacccaagcccagtccaccttcctcgtttcttacagggcaacgccaagagaaaagtcctgaggaatattgcagccttcttgttcctctgcaatactttggttcaaggggtacgcatgcagatttgttacatgggtaaattgcgtgtcgctgaggtttggtgcacaaatgatcccgtcacccaggtggtgccaaaggcatctggcagagagcaagagctgtcttctccagcatcgggagccagtccagaggccccagctgcaggtgctgatgtgcatgtccaggtggagtgggctccactccagagacggacatggaaatgtgcctctgtggcatccaaatggacgaacccagtagacagagaagtggaaaaggagggtgtgggaaatagctcttgggctgccattgtagatcagatggaccagcttagcgggaaggcctcgctgaagggtgacatgagacaggaaggggttggccacgcatgttcagggcagagggaacaacggctgctttggatacctcccgcttttggctgtcgacctgagtatgacaacggattggaggagattgtctttggctttgaaccctggataattgtggtcaacctggccatgcctttttctattttctatggaatgcacgcagctgcctccctctttgaggtctattgtaagatatag

SEQ ID NO: 127208 - DNA, 1297 bp, Homo sapiens
atgtggcaagtggagacagtgtgcacagctgtgaactgcaatgaactgaggtttggggtgatccacttggtgttcaccaacctgcttctgtgggccaacggcgtcctcaatgagtcaaagcaccaatgagcacaaggaatggctcatcactctgggctttgggaacataacaacagttttagatgaccacacaccgcaatgtaactgcacgcccccaactctctgcaccaccatctcccacgggatctactatatctactacctctaccccttcaacatagagtatcagatcctggcctccacagtgctctacgtcctatggaagaacatcgggcgcaaagttgacagccatcagcaccagaagatgcagttcaagcctgatggggtcacagtgggcacagtcctgggcctgaccgcgctggccgccaccattgccgtggtgaccaagagcaagtcagcactcatcacgttctacctgtatgtcatcaccctgatgaagcttatgggggctgcggggctggctggaatccggatttacaggacagatgagaagtcactggatgagtccaaaaatccgccccgcaaactggactcggacctcttggaccacccccactacacctggtacaacctgccctactccatcgtggtgatcgtggagaagtacatccagaacctcttcatctttgaatccattcaccgagagcctaaaaaactctctgaggacatccaaacccttcggatggtcacagtctgcaatggcaacaccatgccccttgcttcctcctgcctcaagagtggaggtgtggccggagacgtggctccctggggcagggacatgccaccagcagccaatggaaatgtgtgcctgagagaaagctgtgacaaggaggagaagcacgaggagagcagctggggagggaacccaagcccagtccaccttcctcgtttcttacagggcaacgccaagagaaaagtcctgaggaatattgcagccttcttgttcctctgcaatactttggttcaaggggtacgcatgcagatttgttacatgggtaaattgcgtgtcgctgaggtttggtgcacaaatgatcccgtcacccagagtgctgggattacagtgcctggccctgtaaggttcatcacagcacgacttacaataggaaagtcatggaatcaacctagttgcccatcagtggggtaccggataaagcaaaagtggttcttctacagcatcgaatactacacagccatgaaaaagaataaaatcatgtcctttgcagccacatggatgtag

SEQ ID NO: 127209 - DNA, 363 bp, Homo sapiens
tgtgtggagagcgaggaggggcctgcaaactctgcttaaaacaaacaagtgctaaattaaaaagaatgttaaatacagatcagctgcctggctcctgacagcagatttaattcttccctcctctcacctgatggagcttcgcctgcagggtttgcatcaattactcgacgacatgtggaaaatgattgatgagctgcctgcggcactgaagtacactttgtcaaccgctcatcatttatacatcttatctctgccagaacaaaagataggacaacctcacactgaagttggggatggcaaggggggagatgaggatgggggtgagggaggcaagtcaggcaaagttgttgggtgcccacaggg

SEQ ID NO: 127210 - DNA, 849 bp, Homo sapiens
ctagaacataagaacacgtaaacaggagtagctgctgctgctgctgctgctgctgctgctgctgctgctgctgctgctgctgttgttaaagtggttttgtcctgtcagccaaaggcatatggcagctgtcagctccggaaaaccacttttggacccaggaatctgttttgctgttattgaggggtacacatcatcagatgccccaatttcccaaaagctggccccaacagccgctgctgcctgggcagctccccccgaaattctctcagaaactggatccacgggccgtgattcgtctttgtcagggatggttacaaaccccccatcctcatctccccccttcccatccccaacttcagtgtgaggttgtcctatcttttgttctggcagagataagatgtataaatgatgagcggttgacaaagtgtacttcagtgccgcaggcagctcatcaatcattttccacatgtcgtcgagtaattgatgcaaacccttcatcagtcctcccactgtgaactctcccttctgaacaaactcactgtgtcccttatatctctctttcttcaccattagctccttctcccacctgaaagatgaagtttcattgatcctgccaggaatttggtaaacttcatagcatagagccttctgtctggggtatccgtggtcatttgctgccagctctaagttttcttttgtgatttctggcctcatttcccactgttctgcagtgtattttttcagtttaactagatcagtgtatgtctcaagttcttcttcctcctcctcctcccttcccacttgttctttttttccaatgaaagtatctggcaggatgcggtgactcat

SEQ ID NO: 127211 - DNA, 417 bp, Homo sapiens; identical to SEQ ID NO: 115992

SEQ ID NO: 127212 - DNA, 440 bp, Homo sapiens
ggtcgaccatctgcggtggagccgcaccaaaatgcagattttcgtgaaaacccttacggggaagaccatcaccctcgaggttgaaccctcggatacgatagaaaatgtaaaggccaagatccaggataaggaaggaattcctcctgatcagcagagactgatctttgctggcaagcagctggaagatggacgtactttgtctgactacaatattcaaaaggagtctactcttcatcttgtgttgagacttcgtggtggtgctaagaaaaggaagaagaagtcttacaccactcccaagaagaataagcacaagagaaagaaggttagtcgccttcgtcgagagtgcccttctgatgaatgtggtgctggggtgtttatggcaagtcactttgacagacattattgtggcagatgttgtctgacttactgtttcaacaaac

SEQ ID NO: 127213 - DNA, 874 bp, Homo sapiens
atattatagacttgccttcgtcagcttcagcaatatcattcatagttctgaatcttctaagaattcttagaacatttgtgaatgataattgtttcccgggaaatatgagtacacttggaagaagcatattccaccaaagtgattctaaatccctaccacgtttttaaagttttcttttaagcttgttaagaaatagtaagagaaggggcttccttttcgatccgccatctgcggtggagccgccaccgaaaatgcagattttcggtgaaaacccttaccggggaagacccatccaccctcgaggttggaaccctccggatacgatagaaaaatgtaaaggccaagactccaggataaggaaggaatttcctcctgatcagcagagacttgatcttttgctggcaagcagctcggaagatggacgtgactctctgtctggctacacatattcaaaaaggaagtctactccttcatccttgtgtttaagacttccgtggtggtgctaagaaaaaggaagaagaaagtctttacaccacttccccaaggaaggattaaggcacaaggaggaaaggaaggtttaaggcttggcttgtcctggaaatatttattaaggtgagtggatgagaattggccaaaatttagttcgcctttcgttcgaggagttgccctttcttgattgaatgttgggtgctgggggtgtttatggccaagtcacttttgacagacattattggtggcaaatggttgtcctgacttacctgtttccacaaaccagaatgacaagtaactgcgtatgagttaataaaaggacatgaacctaaaaaaagaagaagaaaaaaaaaagttttgccctatagggagtcgattacaattg

SEQ ID NO: 127214 - DNA, 415 bp, Homo sapiens
ctccagttaaataggggcttaaggaggtcaggtaattaatggagttttagctcaggtctgacttacagtgggtccagtgggtccccggactcatcctgtggtcattttcccagtgccagaatgcagaattggcagagacatacttagcagctggcagaacccccacactggctccctgactggtagggtgagggcttttatggttggaaaggccaaatggaagccatgagagctgcctctacctagaaaaacagtaaatcaaaaacaatatcgtattcccggagggattgcagagattagtgtccatcaaaaacttgagacgcggggtggtgattcccaccacatcccggttcaactctcccatttggcctgtgcagaagacagatggatcttggtgaacggcagcggattatcg

SEQ ID NO: 127215 - DNA, 405 bp, Homo sapiens
ttagcactgttgtggtattccacacagcattgcctctgaacaagatacttactttatggctaaagaagtgtggcagtgggctcatgctcatggaattcactggtcttaccatgttccccatcatcttgaagcagctggattgatagaacagtggaatggccttttgatgtcacaattacaacaccaactaggtgacaatactttgcagggctggggcaaagttctccagaaggttgtgtatgctctgaatcagcgttcaatatatggtactgtttctcccatagccaggattcatgggtccaggaatcaaggggtagaagtggaagtggcactacttaccgtaacgcccaatgatccactagcaaatattagcttcctgttcctgtgacattacattctgatagg

SEQ ID NO: 127216 - DNA, 598 bp, Homo sapiens
ccaaaacagagcatccaacgcaacatgtctgccatggaacgcttccgcaacatggacaagagagccacaactgaggaccgcaacacggccttggagacgctgcaccagaatagcatcactcaagtctctatttatgaggtggacaagcaagattgtcgcaaattttgcactactggcatcgatggagccatgacaatttgggatttcaagaccctcgagtcttccatccagggcctccggataatgtgaagctgagtgagcctccgccatccagcatgacaaacttgtggccgaccgcagctgtgccgtggcacgatggcgaggaagccagccccaaggaaacactgaaaacacatatcacgccaatgccgtgtggttttgtttgaatataaaattggtgaaagtgttggtttttttaaggcagtaatttttttgtttgtttttttgcgatttcattccattcttgaccaaagcttctctttaagtagtttattatggaaaattgtcacactaacttaaaagacagggtgagggagatatgtaaattgtccactaaaaaatcccataaaagaactgaatgtggaaaaaaaaaaaaaaa

SEQ ID NO: 127217 - DNA, 409 bp, Homo sapiens
  misc_feature (1)...(409): n = a,t,c or g
tggccttccgctctgacgcagggccgaggtgggcagtccaggccgagacgacnggccgtgaaggtctgcgctggggccgggacgaagcacttggtaacaggcacatcttcctcccgagtgactgcctcctaggaggacatttaggggagggcagaggcctgcagtttggcttcacggctggctatgtggacagcaagagtcgttttcgcggaaccgactggcagccaggcctgtcgggcccccgacgccgccccatttcccttccagcaaactcaactcggcaatccaagcacctagataccagcacaagtcggttaatccctgtctggactgagcctccgttggcttctgaactggaattctgcagctaacccttccacgactagaaccttaggcattggggagtttt

SEQ ID NO: 127218 - DNA, 598 bp, Homo sapiens
  misc_feature (1)...(598): n = a,t,c or g
atgtcgggccgcggcaagactggcggcaaggcccgcgccaaggccaagtcgcgctcgtcgcgcgccggcntccagttcncagtgggccgtgtacaccggctgctgcggaagggccactacgccgagcgcgttggcgccggcgcgccagtgtacctggcggcagtgctggagtacctcaccgctgagatcctggagctggcgggcaatgcggcccgcgacaacaagaagacgcgaatcatcccccgccacctgcagctggccatccgcaacgacgaggagctcaacaagctgctgggcggcgtgacgatcgcccagggaggcgtcctgcccaacatncaggccgtgctgctgcccaagaagaccagcgccaccgtggggccgaaggcgccctcgggcggcaagaaggccacccaggcctcccaggagtactaagagggcccgcgccgcggccggccgccaggcctccccatgccaccacaaaggcccttttaagggccaccaccgccctgaaggtgagtgaggccctcggcagctgcaaccggggtgtttggtaaccccccggggtggtggttagcccaggaattttaaaagcggcccc

SEQ ID NO: 127219 - DNA, 870 bp, Homo sapiens
atgtcgggccgcggcaagactggcggcaaggcccgcgccaaggccaagtcgcgctcgtcgcgcgccggcctccagttcccagtgggccgtgtacaccggctgctgcggaagggccactacgccgagcgcgttggcgccggcgcgccagtgtacctggcggcagtgctggagtacctcaccgctgagatcctggagctggcgggcaatgcggcccgcgacaacaagaagacgcgaatcatcccccgccacctgcagctggccatccgcaacgacgaggagctcaacaagctgctgggcggcgtgacgatcgcccagggaggcgtcctgcccaacatccaggccgtgctgctgcccaagaagaccagcgccaccgtggggccgaaggcgccctcgggcggcaagaaggccacccaggcctcccaggaggttcgggccttccggatgcggcttgggcgctcttcggggacctccgtggcgcggaagacccgagcctgccggggggaggccggcggcgccgcacctgcccgcctcggcgttcgtgactcagccgccccatcccgagtcgctaaggggctgcggggaggccgcagcaccttctggaagacttggccttccgctctgacgcagggccgaggtctgcgctggggccgggacgaaccacttggtaacaggcacatcttcctcccgagtgactgcctcctaggaggacatttaggggagggcagaggcctgcagtttggcttcacggctggctatgtggacagcaagagtcgttttcgcggaagccgactggcagccaggcctgtcgggccccccgacgccgccccatttcccttccagcaaactcaactcggcaatccaagcacctag

SEQ ID NO: 127220 - DNA, 1701 bp, Homo sapiens
acagcagttacactgcggcgggcgtctgttctagtgtttgagccgtcgtgcttcaccggtctacctcgctagcatgtcgggccgcggcaagactggcggcataggcccgcgcctaaggccatgtcgcgctcgtcgcgcgcgggccgtccgagttcccaggtgggccggtgtacaccggctgctgcggaagggccactacgccgagcgcgttcggccgcaggcagccatgctgctaccttggcggctagtgcatggagtacctcaccagctgagagtcatggagcatggcgggtcaatgcggcccgaaacaacagagaagacgcgaatcatcccccagccacctgcaagctggccaatccgcaacgacgaggagctcaacaagcttgcttgggcggcgttgacgatcgcccagggaagccgttcctgccaaacattcaagcccgttgttgtggcccaagatagactagcgccaccgttggggccgaaggcgccctcggggggcgaagaaagggccacccaggcctccgcaaggagtactaagagggcccgcgccgcggccggccgccccagcgtccccatgccaccacaaaggcccttttaagggccaccaccgccctcatggaaagagctgagccgcttcagactgcggggcaagcgggccgcggctcccttcccctcccctcccctcgcccgccttcgccgcccggcctcgagtccccgcccgcccccgctcccgtcccgcaccgcctgccgcgtcgggctcggggccttgccctgtccgccgtccgccctccggtagggttcgggccttccggatgcggcttgcggcgctcttcgggtgacctccgtggcgcggaagacccgagcctgccggggggaggccggcggcgccgcaccctgccccgcctcggcgttcgtgactcagccgccccatcccgagtcgctaagggcgactcggggaggccgcagcaccttctggaagatcttggccttccgctctgacgcagggccgagcgtgcgcagtcccaggccggagcagccgccgcccctgaaggtgagtgaggccctcggcagctgcagccggggtgtctggtacccccccggcgtggtgcttagcccaggactttcagacggccgctggccgggaggctttggtgggagagacgctgatcgccaaatttcggtctggcgccccttctgcggccgggaacccaggccttttcacatcagcctactccctccatctttcattcataggtctgcgctggggcccgggacgaaagccacttggtaaacaggcaacatcttccctcccgaatgaactgccctccctaaggaggacattttaggggaagggcagaggctctgcagtttggcttccacggctgggctatgtgggacagcaagagtcgttttcgcggaaagccgaactggcagcccaggccctgtcgggaccccccgacggccgccccatttcccttaccagacaaactcaactcggacaatccaagcacctaggataccagcacaagtcggttaatccctgtctgggactggagcctccgttgggctttctgaactggaatttctggcagctaaccctttccacggattagaaaccttagggcatttggggaatttttagatggactaatttttatttaaaggattgttttttttttaaaaaaaaaaaaaaaaaaa

SEQ ID NO: 127221 - DNA, 392 bp, Homo sapiens
caaaaccacaatgagatactatctcacaccagttagaatggcaatcattaaaaagtcagaaaacaacagatgctggagaggatgtggagaaacaagaatgcttttacactgttggtttgagtgtaaactagttcaactattgtggaagacagtgtggcgattcctcaaggatctagaatcagaaataccatttgacctagcaatcccattactgtgtatatacccaaaggattatacatcattctgctataaagacacatgcacatgtatgtttattgcagcactattcacaatagcaaagacttggaactgacccaaatgctcatcagtgatagactggataaagaaaatgtggcacatatacaccatggaatactatgcagccataaaaa

SEQ ID NO: 127222 - DNA, 715 bp, Homo sapiens
atggctcggcttatactggagaggtttctacaggaacacgaggaaactccaccctccaagtctattataaatagtatgctacgggacccttctcagattccagatggagttctagcaaatcaggtctatcagtgcattgtgaacgactgctgttacggaccactagtggactgcatcaagcatgccattggtcatgagcatgaggtcctgctgagagacttgcttctagagaaaaacctgtccttcctagatgaagatcagcttcgtgcaaagggttatgacaaaacaccagacttcattttacaagtaccagttgctgtagaagggcacataattcactggattgaaagcaaagcctcatttggtgatgaatgtagccaccacgcctacctgcatgaccagttctggagctactggaatagatttgggccaggcttagtcatctattggtatggatttatccaggagctggactgcaaccgggaaaggggcatcctgctcaaagcctgtttccccacgaacattgtcaccttatgccacagcatagcttgaccctgaagatcctggaagagaagctgggaggaaaaggtgaatccggaagcaattttactttcctgcactgtaagatcctggcaacatctgccctgaacttcagctgaactcttgctgcccgtagtcacaccactacctctttagacaaacatatcaagaggtt

SEQ ID NO: 127223 - DNA, 624 bp, Homo sapiens
atggctgacaaaagcaatgtaaaaatgtggtctggggatcatctctacttgcaaacaagtacagaaagggaacttgaaattgatgggtctcatctgttcctctgtgctgtagaatctagagatgaagatcagcttcgtgcaaagggttatgacaaaacaccagacttcattttacaagtaccagttgctgtagaagggcacataattcactggattgaaagcaaagcctcatttggtgatgaatgtagccaccacgcctacctgcatgaccagttctggagctactggaatagcactattcacaatagcaaagacgtggaatcaacccaaatgcccatcaatgatacagtgaataaagaaaatgtggtacatatacaccatggaatactatgcagccataaaaaggaacaagatcatgtccttcgcagggtcatggatggagctggaagccattatgctcagcaaactaacgcaggaacagaaaaccaaacactgcatgttgtcacttgttttcatcgagagcagaataagcattccaccccaccaagatacatcgaggggtgcaggaccccagcagtaggctcagggacatcaggagcaattgaggagtcacagaaggagtaa

SEQ ID NO: 127224 - DNA, 395 bp, Homo sapiens
caactcaggggtaaatgacccctttacaggatggctagaaaagtagttcagtaaatggaaaggaataatagcctcaattcttacttccctcgcagccgtaataggtgtacttattcttgttgggtgccgtgtcataccatgcatcctgggttggtgcagaggctcataaaaatatcacttactaaaacctcccttcactatcctccaccttatccagagaagctgcttcttttggaaaatcaagcaaaacaactaagccaggacatgttaaaaaaacttttgaaaagaaagctgtaaagaaatacaagggaaggggttgttatatatgagttctaaatttcttttgaaagaatatgtcagtatgttcaattctttgccttctacttttaaactta

SEQ ID NO: 127225 - DNA, 1185 bp, Homo sapiens
atggaccattgttcctggatcaagccttaccaaattaaagctaagaaaagcttagtctatctatcttttccttcctttcctaacacagtgcctatatccattactgttcctaccactagcaactctaaccccactttagagcgtttctatggtttaggagcagaagtcactggaaaggaccctataggcttctttaagatgcgctttgttctccctgctctacctcctacaactgcccctttcacaaacctacgaaataaaactatgcctcgcctcatgccaaatgacaaaagcaaggtctcagtagtagaaataggagacctaaggcaaaccatagctattgacaggagcagtagttatgctctagttcaattggctatcccttttactctggcatttcatcaaccagaggaaggaaaaataagacatcataaagtgagagaagctccttataggtcattcaactctcatgtctatttagatgcaattggagtcccacggggaataccagatcaatttaaagcccgaaatcaaatagctgcaggatttgagtcaatattttggtgggtcacaattaataaaaacatagattggataaactacatctattataaccaacagcaatttatgaactacactagagatgctgttaaaggaatagctgagcaattagggactaactgccagatggcttgggaaaataggatagccttagacatgatattagcagaaagaggaggagtttgcatcatgattaaaactgaatgttgtgccttcatcccaaacaacactgcccctaatggaagtataacaaaggcattgcaaggtctgactgctctgtccaatgagttagccagcagctcaggggtaaatgacccctttacaggatggctagaaaagtggttcggtaaatggaaaggaataacagcctcaattcttacttccctcacagctgtaatgggtgtacttattcttgtcgggtgctgtgtcataccatgcatctgtgggttggtgcagagacaccggggaccgccccttgtggtcatagagacgaagccgctcggcctagagcgcctcgccggcctcccggtcggccacgcactaaaactgggctcaggaatccaagctacaccccaaaatggggagaacgcggatcgaagggaggccttcccggccgcgtcctag

SEQ ID NO: 127226 - DNA, 543 bp, Homo sapiens; identical to SEQ ID NO: 122627

SEQ ID NO: 127227 - DNA, 381 bp, Homo sapiens
tcatttggatacaattcggaggtggctggtagctggctgctttgtgttttgcatgtgtctatattgttgctgctgctgctgctgctgttgttgttgtttttcatgccagttcaccgtgactttggtctggattctgtgctgatccaactcaaatccctctgactcagccaggctgccagctctagaattcctggtcatcagaatcattgtggttagaatacttgggtcttgatcatttgttatatgcaaggatattaaggtcaaagccatggcgacacgaagggcattggtgaggaaaccagcgaggagtctgcatgagcctgagatgttgctaagctctctgatatctgcggtgagagtgtctacgcgaagattacccat

SEQ ID NO: 127228 - DNA, 421 bp, Homo sapiens
cgacaatgggatgtaatgaccattgttctcgatgccagtaaagccatgcctgggcacatgccaagaggaggttggtgtctgtttacaggacctgcttgggttggcagttcccatggggaagggaagaggcgtggtgggagcttggcccagcttggcaaacaaagccagtgggaacacaagcctgtcctcctccatggccaggggtggaaaaaagagtgtgtaaagccaagccctatgcccctctttccatctgtcccccagatgtcctacgcttcgacaacacctatagctttgtccacgccaagaaggtcagcttcacagtggaggtcctgctccctgacgagggcatgcagaaatatgataaggagctcacccctgtctaggtggctccctcatttctcagagacctcctaaccctttg

SEQ ID NO: 127229 - DNA, 570 bp, Homo sapiens
aacatttaataaacagtagtcattattattatactaccattattataatatttactaaaaacaattattatgtaattattattagagtatggttataatagtatgaggtgagaaggttccctccagaggccaggggaggtgatggcatgaagggaaaccctccagagccatctgaaacctcccaacaggagattgcacaggagatggaggtaggagaagatgtgatgtgctctctgaagggttctctcttggttccacagttctttggcctccttgaagagaattacccagagaccctgaagttcatgctcatcgtgaaaggtatgtgacaaattgacttcacttacttgtgcctctgtttcctcatctgtacgctgagggtgataacactgtctttgtcccaggattgttgtgaggcaggttggtttcttggctgtatgcaaatcacttagaatgcctggcatagagtaagttctcaataaatggtaacttctagtgttggccttactgcaagagaaggcagctccagtcccagctctcccagggatcctcccttatttctcctgtcca

SEQ ID NO: 127230 - DNA, 1260 bp, Homo sapiens
atgagcggccgagttggagacctgagccccaaacaggcagagaccctggccaagttccgagaaaacgtccaggatgtgcttcctgccctgcccaaccctgatgattatttccttctacgctggctccgaggtgagggcagagctcggaattttgacttgcagaagtcggaggctttgctccgcaagggcactgggagcccagtgggatcttaccactcatttccctttcagtacatggagttccggaagaccatggatattgaccatatccttgattggcagcccccagaggtgatccagaagtacatgcctgggggcctgtgtggctatgaccgtgatggctgccccgtgtggtatgacatcattgggccacttgatcccaaggggttgctcttctcagtcaccaagcaggacctgctcaagaccaagatgagggactgtgagcgcatcctgcatgagtgtgacctgcagacagagaggctagggaagaagattgagaccatcgtgatgatatttgactgtgagggcctgggactgaaacacttctggaaacctctggtagaagtgtaccaggagttctttggcctccttgaagagaattacccagagaccctgaagttcatgctcatcgtgaaagctaccaaactgttccctgtgggctacaacctcatgaagccattcctgagtgaggacactcgcaggaaaattattgtgttgggaaataactggaaggaaggtttgctgaaactcatcagtcctgaggaactgcctgcccagtttgggggcaccctgactgacccagatgggaaccccaaatgtttaaccaagattaactatggcggggagatccccaagtccatgtacgtgcgggaccaggtgaagactcagtacgagcactcggtgcagatcaaccgcggctcatcacaccaagtggaatacgagatcctatttccaggctgcgttctcaggtggcagttctcatctgatggtgcggacatcggcttcggagttttcctgaagaccaagatgggggagcgacagcgggcaggggagatgacagatgttctacccagccagcgctataacgcccacatggtgcccgaggatgggaacctcacctgctcagaggccggcgtctatgtcctacgcttcgacaacacctatagctttgtccacgccaagaaggtcagcttcacagtggaggtcctgctccctgacgagggcatgcagaaatatgataaggagctcacccctgtctag

SEQ ID NO: 127231 - DNA, 381 bp, Homo sapiens
atgaagttcaatcccttcgtgaacttggaccgcagcaaaaaccgcaaacgtcacttccatgcccccttgcacgtgcaccggaagatcatgtcatccccgctctccaaggagctgcggcagaagtacaatgtccgctccacacccatccgcaaggacgacgaggtccaggtagttcaaggacactacaaaggtcagcaaattggcaaggtagtccaggtgtacagaaagaaagatgtcatctacactgagcaggtggttatcaccaggctaaatctcaacaaggatcggaaaaaaattattgaacacaaagccaagtctcgacaagtcagaaaagagaaaggcaaatataaggaggaacttattgagaaaatgcaggaataa

SEQ ID NO: 127232 - DNA, 1146 bp, Homo sapiens
atggtatacagcaatgtcctggttcttcacattcactcaccagtcactgactcactcacagcaatttccagtcctgcaagctccattcatggacccttagggatgaaccaaggcaccaagaagccgacgaagccccagaacacgctcatcacaatgagaggcacaagggtcaccatgaagttcaatcccttcgttacctcggaccgcagtaaaaaccgcaaacgtcacttcaatgccccctcacacgtgcgcaggaagatcatgtcatccccgctctccaaggagctgcggcagaagtacaatgtccgctccatgcccatccgcaaggacgacgaggtccagtggtggcggctggactccggcaccatgagcggcttcagcactgaggagcgcgccacgcccttctccctgaagtaccgagtcttcctcaaaaatgagaaaggacaatatatgtctccatttcaagatattccaatttatgcagataaggatgtgttccacgtggtagttgaagtaccactgtggtctaatgcaaaaatggaggttgctacaaaggaccctttaaaccccattaaacaagatgtgaaaaaaagaaaacttcgctatgttgcgaatttgttcccgtataaaggatatgtctggaactatggtgccatccctcagacttgggaagacccagggcacaatgataaacatactggctgttgtggtgacaatgacccaattgatgtgtgtgaaattggaagcaaggtatgtgcaagaggtgaaataattggtgtgaaagttctaggcatattggctatgattgacgaaggggaaaccgactggaaagtcattgccattaatatggatgatcctgatgcaggcaattatactgatatcagtgatgtcaaacggctgaaacccggctacttagaggctactgtggactggtttagaagcactcatgaccattggaaagcattagtgactaagaaaatgaatggaaaaggaatcagctgcatgaacaaaactgtgtctgagagcctgttcaagtgtgatcctgatgctgccagagccattgtggatgctttaccaccaccctgtgaatctgcctgcacagtaccaacagacgtggatacgtggttccatcaccagaagaactaa

SEQ ID NO: 127233 - DNA, 712 bp, Homo sapiens
tcggacagtgaactcaaccgccccagggtcaccatgaagttcaatcccttcgttacctcggaccgcagtaaaaaccgcaaacgtcacttcaatgccccctcacacgtgcgcaggaagatcatgtcatccccgctctccaaggagctgcggcagaagtacaatgtccgctccatgcccatccgcaagaccgacgaggtcccaggtagttcgaggacactacaaaggtcagcaaattggccaaggtagtcccaggtgtaccagaaagaaatatgtcatctacatcgagcggggtgcagcgtgagaaaggccaacggcaccaactgttccacgtggggcatttcacccaaggcaaggtggttattcaccaggctaaaactggacaaggatcggaaaaaaattcttgaacgcaaagccaagtctcgacaagttggaaaagagaaaggcaaatataaagaagaacttattgagaaaatgcaggaataaatagaacctgttgtgcaaccacggtttaaccggagattttgaggctagggtgtgtttctttcgaacttttcggaatgtctggaacatttcatttcctgttttgttacctgtgcctctgtaaatctacttttgcaattttaagtaataattttatgaataaaaatgggaaatgcttcctaattccacatagtatttgcattgttttataaataaattccacttactatca

SEQ ID NO: 127234 - DNA, 556 bp, Homo sapiens
agcttagaagcaaagttaagagactcatcagattctgagctgctgcgggatattttgcagaagactgtgaagcatcctgtgtgtgtgtgaagcacccgccgtcagtcaagaaagcccggtgctttctctcagaactcatcaaaaagccctcgggaggctcagtcacactctccgagagcacagccatcatctcccatggtaccacaggcctggtcacatgggatgccaccctctaccttgcagaatgggccatcgagaacccagcagccttcactaacaggactgtcctagagcttggcagtggtgccggcctcacaggctggccatctgcaagatgtaccgcccccgggcattcatcttcagtgactgtcacagccgggtcctcgagcagctccgagggaatgtccttctcaatggcctctcattagaggcagacatcactgccaacttagacagccccagggtgacagtggcccagctggactgggacgtagcgacggtccatcagctctctgccttccagccagatgttgtcattgcagcagacgtgctgtat

SEQ ID NO: 127235 - DNA, 231 bp, Homo sapiens
ctttttggtgagttctgagagaaagcaccgggcatacttgactgacagccggtgcttcacacacacaggatgcttcacagtctgccaggggaaggaacgcagtgcgcgcgccgccaggaagcggcgctcgaaactctgcagcaagagttcggtccccgcgttctcctcgggcaccaagacgggggcggggccgcagcgttgccgggagaccgggcggaagccgagcctgga

SEQ ID NO: 127236 - DNA, 1506 bp, Homo sapiens; identical to SEQ ID NO: 123679

SEQ ID NO: 127237 - DNA, 538 bp, Homo sapiens
tttttttttttgccaacacattctattgcgtgtttaatgttcttgtgaatgcacccttgagatttctctctctcccctccacacagagcttagaagcaaagttaagagactcatcagattctgagctgcggcgggatattttgcagaaggtaagaatcccagagtccctgggactcatgactctgcctcctgaatctctccggaagacctgagagaagaaccgcaggtgtgcttgtaccctttaaaaacacccctgttcaaagaacaaaaccattgagtcagcactgcaggtgggtgtgggcacctccgacggctccagctctttcattttctaagacttagacaaagacatcagaatatacaaaaatctgcatgagagggggggaatctagggaaagttttttaaaccatccacagcaaaaacagagatgacaggtgcaagacagcttctagcatttggtagatgctcagagactttcttttttgcattcatgaggcctgtcctgcccactcctgtctcttctaaacctaaatgggc

SEQ ID NO: 127238 - DNA, 737 bp, Homo sapiens
caattcctgggtcgagcagctccgagggaatgtccttctcaatggcctctcattagaggcagacatcactgccaacttagatagccccagggtgacagtggcccagctggactgggacgtagcgacggtccatcagctctctgccttccagccagatgttgtcattacagcagacgtgctgtattgcccagaagccatcgtgtcgctggtcgggatcctgcggaggctggctgcctgccgggagcaccagcaggctcctgaggtctacgtggcctttaccgtccacaacccagagacgtgccagctgttcaccaccgagctaggccagggtgggatcatatggggaagcggaagttcattcatgaccagaaactgtttccctatgggagagcacttggagatgggcaatgctgaatctcaccctgtaggactcacacacgactccaacgggattgtgagaatcaagtcactctcatgggaagaatttttatatgggaaagcggataaaactttcattggactggaatgtttggagaatgttaatttccaaatcaggaaccacaaactgccctctaataagacatcggctatctaagcgtgtgggtgccccctttctgccagcagttctggttcttaagaaaatcaccataaatcagacatgaaaattctggctccaaaaacagcattttctttgtgcaaataaaaacgtgtgtatcaagtaaaaaaaaaaaaaaaaa

SEQ ID NO: 127239 - DNA, 1473 bp, Homo sapiens
atggcgcctgaggagaacgcgggtaccaaactcttgctgcagagtttcgagcgccgcttcctagcggcgcgcacactgcgctccttcccctggcaggtgggcggcggggcgagcggagaggcctgcggggcttgcggaagtccaggggcagacgggatgggtctccctgctgaaacccccggcgctcctgccacggagggatcacatagcgctttgccaacacattctattgcgtgttttaatgttcctgtgaatgcgcccttgagatttctctctctcccgtccacacggagcttagaagcaaaattaagagactcatcagattctgagctgctgcgggatattttgcagaagcacgaggctgtccacacggagcttttggacgagctgtacgaggcgctggcagagaccctgatggccaaggagtccacccagggccactggagctatttgctgcccagatacccttcctgcacagacaaagtgaaaacccctcggaaggctcggtcacactctccgagcacagccatcatctcccacggtaccacaggcctggtcacatgggacgctgcccgctaccttgcagaatgggccatcaagaacctggcagccttcactaacaggactgtcctagagcttggcagtggcgccggccttacaggcctgtccatctgcaagatgtgccacccccggacatacatcttcagcgactgtcacagccgggtcctcgagcagctccgagggaatgtccttctcaatggcctctcattagaggcagacatcactgccaacttagatagccccagggtgacagtggcccagctggactgggacgtagcgacggtccatcagctctctgccttccagccagatgttgtcattacagcagacgtgctgtattgcccagaagccatcgtgtccctggtcggggtcctgcggaggctggctgcctgctgggagcaccagtgggctcctgaggtctacatggcctttaccgtccgcaacccagagacttgccagctgttcaccaccgagctagcccccagcacctgtgagggtgttctgtcattgtcccatctcaccgacaaaaacactaggacacacagaggccaagagacccccgagctcccgcagattgcagcccggccacctggctttagtgccttcacagtacacccaagccccccattgccaccagattttgccccagctccccctgagcacagcccctcctggcagccatgtgcaaagatgcacccgcagcagcctctgcctgcacacagagacatggacgacccagtgcctgtccacgtggggcagcccgttaactacagagccaacaaacaagccagcacgcgaagacatactgggttccacgacagagtcccgcacaacctcgcacaggaggctggccaggcgtggggctcaggcctgtcatctcagcactttaggaggctaaggcaggaggactaa

SEQ ID NO: 127240 - DNA, 1355 bp, Homo sapiens
gcagagagctgatcaaaacagcaaaagcaaagcagtgccccggcccagttctaaagccaaccttccttaatcacccagacccatcccagtccaggctcggcttccgcccggtctcccggcaacgctgcggccccgcccccgtcttggtgcccgaggagaacgcggggaccgaactcttgctgcagagtttcgagcgccgcttcctggcggcgcgcgcactgcgttccttcccctggcagagcttagaagcaaagttaagagactcatcagattctgagctgcggcgggatattttgcagaagactgtgaagcatcctgtgtgtgtgaagcacccgccgtcagtcaagtatgcccggtgctttctctcagaactcatcaaaaagcacgaggctgtccacacagagcctttggacgagctgtatgaagcgctggcggagaccctgatggccaaggagtccacccagggccaccggagctatttgctgccctcgggaggctcggtcacactctccgagagcacggccatcatctcctacggtaccacaggcctggtcacatgggacgccgccctctaccttgcagaatgggccatcgagaacccggcagtcttcactaacaggactgtcctagagcttggcagtggtgctggcctcacaggcctggccatctgcaagatgtgccgcccccgggcatacatcttcagcgactgtcacagccgggtcctcgagcagctccgagggaatgtccttctcaatggcctctcattagaggcagacatcactgccaacttagacagccccagggtgacagtggcccagctggactgggacgtagcgacggtccatcagctctctgccttccagccagatgttgtcattgcagcagacgtgctgtattgcccaaaagccatcgtgtcgctggtcgggatcctgcggaggctggctgcctgccgggagcaccagcaggctcctgaggtttacgtggcctttaccgtccacaacccagagacgtgccagctgttcaccaccgagctagcccccagcacctgtgagggtgtgctgtcattgtcccatctcaccgacaaagacattaggacacacagaggccaagcgaccctcgagctcctgcagactgcagcccggccaccaggctctcgtgcctccacaatacacccaagcctcccaatgccacgagcctctgccccagctccccctgagcacagcccctcctggcagccatgtgcacagatgcacccgcagcagcctctgcctgcacacagagacacagacaacccagtgcctgtccacgtggggcagcccgttaactacagagccaacaaacaagccagcacatga

SEQ ID NO: 127241 - DNA, 569 bp, Homo sapiens
gactcttggagttcctagtgtgttctgtttccaaggggaaaatgcacacgtagcacgcacagaaactcccaggagcccaagctttccattacccacagctctccattgctcagccctcctggatgcgctgggatttggcaaggtgagtggtctgtcataaggaatcagaaaagtacacttttttttctggaattggattttcctgttttcttttttttttcctgggagatggtgttcaaactggtaggaacacacaccaagcgtaactttccttgattctgacacatttatggtcatcattgcgctcaaactgtcttcaagcctctcctcttttccttccagatcatgcatgccccgcggtccagggacaggttcacagcgccgtccttcatccagagggatcgcttcagccgcctctttcctccatcaccagcgcagcaacgcacacaggggcagcagactgcagtttcagcagaacaatgcagagagcacaatagtacccatcaaaggcaaagataggaagcctgggaacctggtctgattccttccaacgtgcacttcagctggag

SEQ ID NO: 127242 - DNA, 8494 bp, Homo sapiens
agcggttcaagctctacgttcgtgacatcaaacctcctgttgggccatttccgagaactcccatcagtttctgtatagtgtaaaagtttcagaggcggacacgagagagctgcggctgggacaaggagcacccgcgtgcaggtgcgaccctgcaggatgctggcagcggcgtggccaggggcgcccgtgttctgagggcctgagggccagcccctccacccgcgccatggcctccgcgccctggctggacggctgacgggagcagggaccgccgccgcccaggtgccacacccaggtaccgcccgcccgctgcgagagccgggcaggtgggccgcggatgctcccagaggccggcccagcagagcgatggacttggacaggctaagatggaagtgacctgagcctcgcccggcggcttcctcgacgggacagcgcaagagttggagcacaggcttgtccggggagcagtatgccggaagctggttttcaggccacaaatgctttcacagagtgcaaattcacctgcaccagtggtaaatgcttgtatcttggttcgctggtctgtaaccaacagaacgactgtggggacaacagtgacgaagagaactgtctcctggtgaccgagcacccgcctccgggcatcttcaactcggagctggagttcgcccaaatcatcatcatcgtcgtggtggtcacggtgatggtggtggtcatcgtctgcctgctgaaccactacaaagtctccacgcggtccttcatcaaccgcccgaaccagagccggaggcgggaggacgggctgccgcaggaagggtgcctgtggccttcagacagcgccgcaccgcggctgggcgcctcggagatcatgcatgccccgcggtccagggacaggttcacagcgccgtccttcatccagagggatcgcttcagccgcttccagcccacctacccctatgtgcagcacgagattgatcttcctcccaccatctccctgtccgacggtgaagagccacctccttaccaggggccctgcaccctgcagctccgggaccctgaacagcagatggaactcaaccgagagtccgtgagggccccacccaaccgaaccatatttgacagtgatttaatagacattgctatgtatagcgggggtccatgcccacccagcagcaactcgggcatcagtgcaagcacctgcagcagtaacgggaggatggaggggccaccccccacatacagcgaggtgatgggccaccacccaggcgcctctttcctccatcaccagcgcagcaacgcacacaggggcagcagactgcagtttcagcagaacaatgcagagagcacaatagtacccatcaaaggcaaagataggaagcctgggaacctggtctgattccttccaacgtgcacttcagctggagaaagaaaccaagaagggaagcggccgctgggcccctcctgcgcacagtgttgttcagtttcacatggtacaaataagtaaaaccaaatgagcaaacacggtctttgtttctgattccttttaggggaattgcatgcaaactagactgaaatgatacaaacttccatctggtctgaccgcaaacagtgtttatttggggacaggggttgggatgggggtgtgggcaggggaaaacagagaacgggatgctttgaagataccatgaaataaaacccacagaggtatttgatgtatttaattgtgaaaggagactttgcagataaatgaggccagaatggcatgttttataattaactgaataaagaaggaagcattattatatattattgtggggaagaaccagccagttcgctttttctcctaaggtgtggacttttattttgttttaaaaatatgaatcaaaattcctgtgttgtgtgccaaggtataaagtggagaagttagatgagtgcaaggagctcctttgtgttgtgatgatgtgttttaaaagttgcactatcttaatgttgaaaatatttacaagggaactgttttacgtgaagttctgtatgttgtcttttcacctgtggattgtaatcaggcccaaggaatatcctggagtggtccccagaagcatccaagaaaagatatttggggacgtagcctaacattttaccaacttacgtaaatcaaaaaagtcattattgttgcaggagtttgcatcaaatagcagtgcatcgctgaagcttttggagacttttggatggaagataagatagggaagattaagttccagcatttctgacttgttattttgagttactctgctactcttaggctgcatagtttatgagaaaatgaacacatgcatttatggatccagtatcatgcagtgctgccctcatcctccagcagtgcaatttcttcagtaatttagatttttttcactatagcatgaaatatattcaaatacataccttattttatgcaataaattgtttaaaatgcaaggtggttattctgcatactgttgaaatatgtgactcctcagtatattcccattgcctctccccctttcctcgacagcttagttcagttctgcagggctgctcagttcacaggaggctcccagcagccaccccacatccagcctacacagaactttcgtgtgggagtggtgtgggtggtggttttcttatgctttggaagcccctagaaataatgacggaagaatgccatgttgctgatcgtggtaataagccattgtgggttattgtatgtcactagtattagcatagcattcttaaaggaatgcagtgttcaaaacctacccaaattccccgcaggattttaccaaacccttccccaggccagttttgtactgaaggcaagaactggacagtcagagaacagtggagggggcaagtgactgaagagcaccgggtaaaaagcacaacatgcagttaaaatgcaaactagaaaactaattttaaatattgttagttttaatatttcctgatatttacaaatattcattcttatatacaatgaaaaaaataactttcttctgcagatgtaagcactggcttttataagagcagcagccaacacgtttagcagacactgcgcgtggagaagggcttatctgcagtacactctgccatgtggagggtgggcctctgtggcctcttcacataacaagatgagctggaatgatgattccatgactcccacctatgcagccttaaagccaaatccgcgtgtgtgtgtttgtgtctgtctgtgggtctcgaaggtgatccgtcggtgcggtggctctgtgctgtaactggagagactgttccaaaccccaagagttgtctgatcctagtctgttcccttctgcttcttacctctgtagataggtcactggtttttgtttgtttgttttgaggattggaatttccattacattcatcctttgcacacagtaacatccacagaactagtccaactcttaaaaggagagaggaaaaacacaggcaccagttgtcagctcatgcttacaacctgtgtggaagtatatacagttgagagtcacagtggaggttctgagactggattcagtcttgttccagtgacagttggaaggcctctgctggagagacaccagctctcagggcagagattggcttggggccagaaggaccctccccaaccctggagacaccctgaaggttcactggctctccagattagcctctcttcctctgtcaggcaaagatgaggagcccgtgttcccatcgggccctgctggcagggacttgcagtggattcttggtcaggtgtgcccacagatgcggaggcgaggtgagtgattccatcatttcagttctcacctgcagttttggtgaagcaggagatgcaccccacagctctagctctcaaatggcttcacagtccttacttctctacctgcctcaagaaggggctcagagcagagacttgtgaattccttagtaactgtgagtatatgaatgtgttgcacatgtccacagtattggcgagataattacataattcagatacctttaatcatctttcaagaaagaggctcctcccattcaaccaccctagagaactgcctttgttaaatagttatttaaagactcatacatatcaaaccatgactttgaaaggtcttcgaggctggggctctgtaatgaattagtttaaaagccaaggtcataacatgaattgatggtcaatttcccttcagcagaaggaaaaggtgatttagatcagtagctcttttgaaggttgtggctgacctgttcataccgtgtcgcctcatggctagtgtggcgttgaaagagtagcgactgggaagatacaacttacacagtggggcctattgttctttcaagaaccctttttttagcttatagaacccatgggtccagtttagtaacgagtgatttaggcaatcaatgataggtttataatcttagattattccagcaaagtgtggattgcattgttaggaagaacatttggtgggaatgaacactcctgggcataccgctgacttttgtcccttgttcccggtgtaggagacccaaggcatcttgaatcccatctataagaacacaatcttccagcatacgtttgctttttcagaaactctagcattctctttaaatactgacgcaatccttaatggaaaagagatttcatgaagcaaattatgtatttcaatagttcttctatttttagtgtccaaaatttactaatacagaagcttgacaagcatgtcctcaccctccccaccacataaacacatggacacacacccaagccacaagaaatcccaagagagcagaagcgaatttttaaaagatttatcgtgaggactgcatttccattcactaattttggctcaaacttatgaggcaggaaataggggccaacagtaaatgggggaggcctcctgacaccagcagaggaattttgtacccaggcgaggacttcttgaacttctgcgtatctccgtttgatctctttcacctttatttcatcttcataagaatgagaaaggctcaaaaggaagcacttttagaaatcttctctgacctagaagaatccatccaaatccctgccttcctctctgaaccaacagttcccttctctgacagggggccatcctctatcttccatccagcggctcttccttttaggaaggctctggtgcagagcacttcaaatatgtcctcaggccagatactgattgctagtagagagacacccggcacccagtccgaagccctccctcaaaggaccggcttatggcgttggtcactggcaggctcagagacattctactgtgggcgcagggagcccggccccccatgcagccatgactggatgcgcccccatctcgggggcttgctgcactgcttgtttattgaattttgctacttagaatggcaacattaactttgtgtaccattcattttttaaaaattttccaaagctcggcagtgtatgaaagaaaaaactgggaaagatacttggtttctgttaacttttgtgttgcttgcttaagtgattaaagccagtgcttggagccaagccttcatgccacgaacatgctccacagcctgccctttgctctcctgctcacactgaccaagaatgccgcgtgcttggcctactgaggtgaaaggacaattgaatgacaggtgggcaaagggagaacttccccttcttggtgcgaggaaagtcacaaatttaaaaatgttgcttccagcccagatcctaaatgctagttctcagcagctgcgtggcttaccgttcgccatttccaccaccgccagctgccagcaccgctacagatcacagagatgtgaacagacaatggaaagcactcttagccttgcagtggtctacattttttaggaaccaatatttcagcattctttattacccggcacgctgtgtcctttgcagagttcaagtttatgttactgccagggtcagacagtcatttgctgctgctgctgctgctgctgctgcttctcgaactggatgcattaggaagctgctgtctgagtgtaggaatgtcttgctaagaaagcaatgtcttccttcatccttttctttcttccctctgcgtgtccttgtttttgtgtaatgcgggagagggttagagctatagagattatatatacactatccgtgcacattatatatatgtagatatacccctatcatgtcagagatctgcatgtcagtttttcagcaactaaggtgcctcatgttctgagttcagcagatataggaaccaagccgccccctcctgcacttgatgctcccacctttgttgtgcctcacttaaaatggtgcttttttcagttgtctgtcttttcttatgtttttatttgtaaggtgctgtatataagttgaatatattatgcacatatcctacccaatgggtagaacaaaaagttgttaatactgtaatataatgtatagatgataccaattttaacagaaatggcatagaatttgtgaatgcctatgtgctttgtcctcttttgtaaggaaatttgcaaatggatgcatacagattaaagtctatgtagtttattttcctattaaatatcaatattataacacaagagaaagaagtgtgaacaaacaagcaacagtttatgaccagcgtatatatagcaatggaaagttgcatctttgctgtgaaaacactttaaagaaaatactttttaaaaaatcccacagctttttggttgccactagacgcttcttattttaatcattttagtaatgctcagctggaccagtgttagttatatttgagtcagaaaaatgttgtttttcaacttgctttataatctcctgcatctatctcctgctgtagcatcaygaaggtgtcaggcaacagtgaaaagtgcacatttttgttgttgcagaaactgtgtcagaggaataagtaaatcagcctgcagcagaagactttgttcagctccagaggcatctgtgaccgtctgtgtccaagtctctctgtgcctttttcttttacaaactgaagctgtggagccaatgaagtaacagtagagattgtagggaaagaatacctcaggaaaaacaaatacacttacaagaagaccctgttcttagaaaatgtgtttagttatgggttagcactagaagagacttggctgtcagccagccaagtgaaggacctctcatccattcccattcatgtcccatcataatacggacmcaaaaagcaaactcggttttgccatcagttagaaattacgttttggattgtatattgttacatctctcttccagcttagtttttagtgtctgattgtgacctctgcatttatcttcaaataccctaattttaaaacaaaagaacaagaaaagtttataacaccatgttcactaaaaccacggttgaatcttgggtgtgggcatcctttcgagtgttgtccataagagcagttcgtggaattttgcccatctgacccatattatcagcttattctgccaccagagtagagtctaataaattccaaagtttttatttgctccatggtgtatgttctgactttgaaaatgtcagattctataatcatacccctaacatccaggagacaaatgacagattatctttaaactgaaattgactctacaatgcaacccttaatgctgaatggattaaaaaagtcagcccttttagtatctgtttgaaagggccgtaaaaagttgacacttttgttgttgtggatcctgcgtgtctagacccacgtgttgtttccatcgtatactgtagggtgcaccccttgggattcatcattaagaactgaggctcactgttgtcagaaacaaagctcccaccccccaggttcaaccttgtgggagaactgttgagcatgagaatgttctagactcagaggtactaaaatttgttaccacatcattgcttcctttctacaggacgaattgaggcttaaactttactgttaatgatactggttcattttaatgtgcttgttggtatgttgctatttttcatttcatagctttcaaaaatcatgctaattgtatacttgtctagtttaaggctattttaaaatatgtacaatactattcacagcatttagttcgtttaatttttattataaagcaatctactaaaaaagtacaactgtatttgaacttttcaatagttgtttgtgagctatgataatcaaaagtcattaaagtcttttttaacaaacattcgtgcttacttttcaacataattcccagttatatacagaaaaagatttccacctgtcacgtatctgcctcttttacctgagcaatggtgtagttcttagacctaaggtctgtaattgcaatacttttaaagaaagatgttgctctaagtgctgtttgttagttatgaaatcagatttttctgcttgttcttaatgctgtggtcaaaccatagcacaaaatcattaaaaataatcagcggcatac

SEQ ID NO: 127243 - DNA, 8440 bp, Homo sapiens
agcggttcaagctctacgttcgtgacatcaaacctcctgttgggccatttccgagaactcccatcagtttctgtatagtgtaaaagtttcagaggcggacacgagagagctgcggctgggacaaggagcacccgcgtgcaggtgcgaccctgcaggatgctggcagcggcgtggccaggggcgcccgtgttctgagggcctgagggccagcccctccacccgcgccatggcctccgcgccctggctggacggctgacgggagcagggaccgccgccgcccaggtgccacacccaggtaccgcccgcccgctgcgagagccgggcaggtgggccgcggatgctcccagaggccggcccagcagagcgatggacttggacaggctaagatggaagtgacctgagcctcgcccggcggcttcctcgacgggacagcgcaagagttggagcacaggcttgtccggggagcagtatgccggaagctggttttcaggccacaaatgctttcacagagtgcaaattcacctgcaccagtggtaaatgcttgtatcttggttcgctggtctgtaaccaacagaacgactgtggggacaacagtgacgaagagaactgtctcctggtgaccgagcacccgcctccgggcatcttcaactcggagctggagttcgcccaaatcatcatcatcgtcgtggtggtcacggtgatggtggtggtcatcgtctgcctgctgaaccactacaaagtctccacgcggtccttcatcaaccgcccgaaccagagccggaggcgggaggacgggctgccgcagatcatgcatgccccgcggtccagggacaggttcacagcgccgtccttcatccagagggatcgcttcagccgcttccagcccacctacccctatgtgcagcacgagattgatcttcctcccaccatctccctgtccgacggtgaagagccacctccttaccaggggccctgcaccctgcagctccgggaccctgaacagcagatggaactcaaccgagagtccgtgagggccccacccaaccgaaccatatttgacagtgatttaatagacattgctatgtatagcgggggtccatgcccacccagcagcaactcgggcatcagtgcaagcacctgcagcagtaacgggaggatggaggggccaccccccacatacagcgaggtgatgggccaccacccaggcgcctctttcctccatcaccagcgcagcaacgcacacaggggcagcagactgcagtttcagcagaacaatgcagagagcacaatagtacccatcaaaggcaaagataggaagcctgggaacctggtctgattccttccaacgtgcacttcagctggagaaagaaaccaagaagggaagcggccgctgggcccctcctgcgcacagtgttgttcagtttcacatggtacaaataagtaaaaccaaatgagcaaacacggtctttgtttctgattccttttaggggaattgcatgcaaactagactgaaatgatacaaacttccatctggtctgaccgcaaacagtgtttatttggggacaggggttgggatgggggtgtgggcaggggaaaacagagaacgggatgctttgaagataccatgaaataaaacccacagaggtatttgatgtatttaattgtgaaaggagactttgcagataaatgaggccagaatggcatgttttataattaactgaataaagaaggaagcattattatatattattgtggggaagaaccagccagttcgctttttctcctaaggtgtggacttttattttgttttaaaaatatgaatcaaaattcctgtgttgtgtgccaaggtataaagtggagaagttagatgagtgcaaggagctcctttgtgttgtgatgatgtgttttaaaagttgcactatcttaatgttgaaaatatttacaagggaactgttttacgtgaagttctgtatgttgtcttttcacctgtggattgtaatcaggcccaaggaatatcctggagtggtccccagaagcatccaagaaaagatatttggggacgtagcctaacattttaccaacttacgtaaatcaaaaaagtcattattgttgcaggagtttgcatcaaatagcagtgcatcgctgaagcttttggagacttttggatggaagataagatagggaagattaagttccagcatttctgacttgttattttgagttactctgctactcttaggctgcatagtttatgagaaaatgaacacatgcatttatggatccagtatcatgcagtgctgccctcatcctccagcagtgcaatttcttcagtaatttagatttttttcactatagcatgaaatatattcaaatacataccttattttatgcaataaattgtttaaaatgcaaggtggttattctgcatactgttgaaatatgtgactcctcagtatattcccattgcctctccccctttcctcgacagcttagttcagttctgcagggctgctcagttcacaggaggctcccagcagccaccccacatccagcctacacagaactttcgtgtgggagtggtgtgggtggtggttttcttatgctttggaagcccctagaaataatgacggaagaatgccatgttgctgatcgtggtaataagccattgtgggttattgtatgtcactagtattagcatagcattcttaaaggaatgcagtgttcaaaacctacccaaattccccgcaggattttaccaaacccttccccaggccagttttgtactgaaggcaagaactggacagtcagagaacagtggagggggcaagtgactgaagagcaccgggtaaaaagcacaacatgcagttaaaatgcaaactagaaaactaattttaaatattgttagttttaatatttcctgatatttacaaatattcattcttatatacaatgaaaaaaataactttcttctgcagatgtaagcactggcttttataagagcagcagccaacacgtttagcagacactgcgcgtggagaagggcttatctgcagtacactctgccatgtggagggtgggcctctgtggcctcttcacataacaagatgagctggaatgatgattccatgactcccacctatgcagccttaaagccaaatccgcgtgtgtgtgtttgtgtctgtctgtgggtctcgaaggtgatccgtcggtgcggtggctctgtgctgtaactggagagactgttccaaaccccaagagttgtctgatcctagtctgttcccttctgcttcttacctctgtagataggtcactggtttttgtttgtttgttttgaggattggaatttccattacattcatcctttgcacacagtaacatccacagaactagtccaactcttaaaaggagagaggaaaaacacaggcaccagttgtcagctcatgcttacaacctgtgtggaagtatatacagttgagagtcacagtggaggttctgagactggattcagtcttgttccagtgacagttggaaggcctctgctggagagacaccagctctcagggcagagattggcttggggccagaaggaccctccccaaccctggagacaccctgaaggttcactggctctccagattagcctctcttcctctgtcaggcaaagatgaggagcccgtgttcccatcgggccctgctggcagggacttgcagtggattcttggtcaggtgtgcccacagatgcggaggcgaggtgagtgattccatcatttcagttctcacctgcagttttggtgaagcaggagatgcaccccacagctctagctctcaaatggcttcacagtccttacttctctacctgcctcaagaaggggctcagagcagagacttgtgaattccttagtaactgtgagtatatgaatgtgttgcacatgtccacagtattggcgagataattacataattcagatacctttaatcatctttcaagaaagaggctcctcccattcaaccaccctagagaactgcctttgttaaatagttatttaaagactcatacatatcaaaccatgactttgaaaggtcttcgaggctggggctctgtaatgaattagtttaaaagccaaggtcataacatgaattgatggtcaatttcccttcagcagaaggaaaaggtgatttagatcagtagctcttttgaaggttgtggctgacctgttcataccgtgtcgcctcatggctagtgtggcgttgaaagagtagcgactgggaagatacaacttacacagtggggcctattgttctttcaagaaccctttttttagcttatagaacccatgggtccagtttagtaacgagtgatttaggcaatcaatgataggtttataatcttagattattccagcaaagtgtggattgcattgttaggaagaacatttggtgggaatgaacactcctgggcataccgctgacttttgtcccttgttcccggtgtaggagacccaaggcatcttgaatcccatctataagaacacaatcttccagcatacgtttgctttttcagaaactctagcattctctttaaatactgacgcaatccttaatggaaaagagatttcatgaagcaaattatgtatttcaatagttcttctatttttagtgtccaaaatttactaatacagaagcttgacaagcatgtcctcaccctccccaccacataaacacatggacacacacccaagccacaagaaatcccaagagagcagaagcgaatttttaaaagatttatcgtgaggactgcatttccattcactaattttggctcaaacttatgaggcaggaaataggggccaacagtaaatgggggaggcctcctgacaccagcagaggaattttgtacccaggcgaggacttcttgaacttctgcgtatctccgtttgatctctttcacctttatttcatcttcataagaatgagaaaggctcaaaaggaagcacttttagaaatcttctctgacctagaagaatccatccaaatccctgccttcctctctgaaccaacagttcccttctctgacagggggccatcctctatcttccatccagcggctcttccttttaggaaggctctggtgcagagcacttcaaatatgtcctcaggccagatactgattgctagtagagagacacccggcacccagtccgaagccctccctcaaaggaccggcttatggcgttggtcactggcaggctcagagacattctactgtgggcgcagggagcccggccccccatgcagccatgactggatgcgcccccatctcgggggcttgctgcactgcttgtttattgaattttgctacttagaatggcaacattaactttgtgtaccattcattttttaaaaattttccaaagctcggcagtgtatgaaagaaaaaactgggaaagatacttggtttctgttaacttttgtgttgcttgcttaagtgattaaagccagtgcttggagccaagccttcatgccacgaacatgctccacagcctgccctttgctctcctgctcacactgaccaagaatgccgcgtgcttggcctactgaggtgaaaggacaattgaatgacaggtgggcaaagggagaacttccccttcttggtgcgaggaaagtcacaaatttaaaaatgttgcttccagcccagatcctaaatgctagttctcagcagctgcgtggcttaccgttcgccatttccaccaccgccagctgccagcaccgctacagatcacagagatgtgaacagacaatggaaagcactcttagccttgcagtggtctacattttttaggaaccaatatttcagcattctttattacccggcacgctgtgtcctttgcagagttcaagtttatgttactgccagggtcagacagtcatttgctgctgctgctgctgctgctgctgcttctcgaactggatgcattaggaagctgctgtctgagtgtaggaatgtcttgctaagaaagcaatgtcttccttcatccttttctttcttccctctgcgtgtccttgtttttgtgtaatgcgggagagggttagagctatagagattatatatacactatccgtgcacattatatatatgtagatatacccctatcatgtcagagatctgcatgtcagtttttcagcaactaaggtgcctcatgttctgagttcagcagatataggaaccaagccgccccctcctgcacttgatgctcccacctttgttgtgcctcacttaaaatggtgcttttttcagttgtctgtcttttcttatgtttttatttgtaaggtgctgtatataagttgaatatattatgcacatatcctacccaatgggtagaacaaaaagttgttaatactgtaatataatgtatagatgataccaattttaacagaaatggcatagaatttgtgaatgcctatgtgctttgtcctcttttgtaaggaaatttgcaaatggatgcatacagattaaagtctatgtagtttattttcctattaaatatcaatattataacacaagagaaagaagtgtgaacaaacaagcaacagtttatgaccagcgtatatatagcaatggaaagttgcatctttgctgtgaaaacactttaaagaaaatactttttaaaaaatcccacagctttttggttgccactagacgcttcttattttaatcattttagtaatgctcagctggaccagtgttagttatatttgagtcagaaaaatgttgtttttcaacttgctttataatctcctgcatctatctcctgctgtagcatcaygaaggtgtcaggcaacagtgaaaagtgcacatttttgttgttgcagaaactgtgtcagaggaataagtaaatcagcctgcagcagaagactttgttcagctccagaggcatctgtgaccgtctgtgtccaagtctctctgtgcctttttcttttacaaactgaagctgtggagccaatgaagtaacagtagagattgtagggaaagaatacctcaggaaaaacaaatacacttacaagaagaccctgttcttagaaaatgtgtttagttatgggttagcactagaagagacttggctgtcagccagccaagtgaaggacctctcatccattcccattcatgtcccatcataatacggacmcaaaaagcaaactcggttttgccatcagttagaaattacgttttggattgtatattgttacatctctcttccagcttagtttttagtgtctgattgtgacctctgcatttatcttcaaataccctaattttaaaacaaaagaacaagaaaagtttataacaccatgttcactaaaaccacggttgaatcttgggtgtgggcatcctttcgagtgttgtccataagagcagttcgtggaattttgcccatctgacccatattatcagcttattctgccaccagagtagagtctaataaattccaaagtttttatttgctccatggtgtatgttctgactttgaaaatgtcagattctataatcatacccctaacatccaggagacaaatgacagattatctttaaactgaaattgactctacaatgcaacccttaatgctgaatggattaaaaaagtcagcccttttagtatctgtttgaaagggccgtaaaaagttgacacttttgttgttgtggatcctgcgtgtctagacccacgtgttgtttccatcgtatactgtagggtgcaccccttgggattcatcattaagaactgaggctcactgttgtcagaaacaaagctcccaccccccaggttcaaccttgtgggagaactgttgagcatgagaatgttctagactcagaggtactaaaatttgttaccacatcattgcttcctttctacaggacgaattgaggcttaaactttactgttaatgatactggttcattttaatgtgcttgttggtatgttgctatttttcatttcatagctttcaaaaatcatgctaattgtatacttgtctagtttaaggctattttaaaatatgtacaatactattcacagcatttagttcgtttaatttttattataaagcaatctactaaaaaagtacaactgtatttgaacttttcaatagttgtttgtgagctatgataatcaaaagtcattaaagtcttttttaacaaacattcgtgcttacttttcaacataattcccagttatatacagaaaaagatttccacctgtcacgtatctgcctcttttacctgagcaatggtgtagttcttagacctaaggtctgtaattgcaatacttttaaagaaagatgttgctctaagtgctgtttgttagttatgaaatcagatttttctgcttgttcttaatgctgtggtcaaaccatagcacaaaatcattaaaaataatcagcggcatac

SEQ ID NO: 127244 - DNA, 4317 bp, Homo sapiens; identical to SEQ ID NO: 117716

SEQ ID NO: 127245 - DNA, 510 bp, Homo sapiens; identical to SEQ ID NO: 126135

SEQ ID NO: 127246 - DNA, 333 bp, Homo sapiens
aatcgaagctgtaaaactaaaaatgttcttcaaatggagccccagatgcagtccatgaataagatctaccgtggacccctggaccggcctgctagcccatgctccaatgttaatgagggggggcaaatatatacgcaaggcgacaaggtgctgatgccgctggcgatcagggttcatcatgccgtttgtgatggcttccatgtcggcagaatgcttaatgaattacaacagtactgcgatgagtggcagggcggggcactggccaaaggaactcgattgttcgtgctgtcttatcaggcaaaaagtgagcgacagtatcaggtggttggttga

SEQ ID NO: 127247 - DNA, 477 bp, Homo sapiens
atggcgccagcccatgccatcaccctcacagagccccgggtatgcttgaccattgagggccaggaggttaactgtctcctggacactgcaatatggagagaaagggaattcctaacttccaagggaacacctatcaaacatcaggaagccattaagagattattattggctgtacagaaacctaaagaggtggcagtcttacactgctgggatcatcagaaaggaaaggaaagggaaatagaagggaaccaccaagcggatattgaaactaaaagagctgcaagaattgaagctgtaaaactacaaatcgttcttcaaatggagccccagatgcagtccatgactaagatctactgcggacccctggaccggcccactagcccatgctttgatgttgatgacattgaaggcacccctcacgaggaaatctcaactgcacgacccctactatgccccaattcagcaggaagcagttaa

SEQ ID NO: 127248 - DNA, 8041 bp, Homo sapiens
ctcagctccctgtggtgggggatggcagaggcttcccgctccccgcagctggtttgcacagcctcccgactgtgccgtggtgtctccttccctaaagtgggacagtcgtttctgtgtcctgctggcctctgaggaacagacgtgtgtgagaggccttcagggcctgatggctggggtggtgacagtgcctggagaatgggtggggactggaggggccaggtggctaaccactctcctcttccatggcagcggagctggagttcgcccaaatcatcatcatcgtcgtggtggtcacggtgatggtggtggtcatcgtctgcctgctgaaccactacaaagtctccacgcggtccttcatcaaccgcccgaaccagagccggaggcgggaggacgggctgccgcagatcatgcatgccccgcggtccagggacaggttcacagcgccgtccttcatccagagggatcgcttcagccgcttccagcccacctacccctatgtgcagcacgagattgatcttcctcccaccatctccctgtccgacgggtgaagagccacttctttaccaggtgccttgcaccttgcagctccgggaccctgaacagcagatggaactcaaccgagagtccgtgagggccccacccaaccgaaccatatttgacagtggatttaatagacattgctatgtatagcgggggtccatgcccacccagcagcaactcgggcatcagtgcaagcacctgcagcagtaacgggaggatggaggggccaccccccacatacagcgaggtgatgggccaccacccaggcgcctctttcctccatcaccagcgcagcaacgcacacaggggcagcagactgcagtttcagcagaacaatgcagagagcacaatagtacccatcaaaggcaaagataggaagcctgggaacctggtctgattccttccaacgtgcacttcagctggagaaagaaaccaagaagggaagcggccgctgggcccctcctgcgcacagtgttgttcagtttcacatggtacaaataagtaaaaccaaatgagcaaacacggtctttgtttctgattccttttaggggaattgcatgcaaactagactgaaatgatacaaacttccatctggtctgaccgcaaacagtgtttatttggggacaggggttgggatgggggtgtgggcaggggaaaacagagaacgggatgctttgaagataccatgaaataaaacccacagaggtatttgatgtatttaattgtgaaaggagactttgcagataaatgaggccagaatggcatgttttataattaactgaataaagaaggaagcattattatatattattgtggggaagaaccagccagttcgctttttctcctaaggtgtggacttttattttgttttaaaaatatgaatcaaaattcctgtgttgtgtgccaaggtataaagtggagaagttagatgagtgcaaggagctcctttgtgttgtgatgatgtgttttaaaagttgcactatcttaatgttgaaaatatttacaagggaactgttttacgtgaagttctgtatgttgtcttttcacctgtggattgtaatcaggcccaaggaatatcctggagtggtccccagaagcatccaagaaaagatatttggggacgtagcctaacattttaccaacttacgtaaatcaaaaaagtcattattgttgcaggagtttgcatcaaatagcagtgcatcgctgaagcttttggagacttttggatggaagataagatagggaagattaagttccagcatttctgacttgttattttgagttactctgctactcttaggctgcatagtttatgagaaaatgaacacatgcatttatggatccagtatcatgcagtgctgccctcatcctccagcagtgcaatttcttcagtaatttagatttttttcactatagcatgaaatatattcaaatacataccttattttatgcaataaattgtttaaaatgcaaggtggttattctgcatactgttgaaatatgtgactcctcagtatattcccattgcctctccccctttcctcgacagcttagttcagttctgcagggctgctcagttcacaggaggctcccagcagccaccccacatccagcctacacagaactttcgtgtgggagtggtgtgggtggtggttttcttatgctttggaagcccctagaaataatgacggaagaatgccatgttgctgatcgtggtaataagccattgtgggttattgtatgtcactagtattagcatagcattcttaaaggaatgcagtgttcaaaacctacccaaattccccgcaggattttaccaaacccttccccaggccagttttgtactgaaggcaagaactggacagtcagagaacagtggagggggcaagtgactgaagagcaccgggtaaaaagcacaacatgcagttaaaatgcaaactagaaaactaattttaaatattgttagttttaatatttcctgatatttacaaatattcattcttatatacaatgaaaaaaataactttcttctgcagatgtaagcactggcttttataagagcagcagccaacacgtttagcagacactgcgcgtggagaagggcttatctgcagtacactctgccatgtggagggtgggcctctgtggcctcttcacataacaagatgagctggaatgatgattccatgactcccacctatgcagccttaaagccaaatccgcgtgtgtgtgtttgtgtctgtctgtgggtctcgaaggtgatccgtcggtgcggtggctctgtgctgtaactggagagactgttccaaaccccaagagttgtctgatcctagtctgttcccttctgcttcttacctctgtagataggtcactggtttttgtttgtttgttttgaggattggaatttccattacattcatcctttgcacacagtaacatccacagaactagtccaactcttaaaaggagagaggaaaaacacaggcaccagttgtcagctcatgcttacaacctgtgtggaagtatatacagttgagagtcacagtggaggttctgagactggattcagtcttgttccagtgacagttggaaggcctctgctggagagacaccagctctcagggcagagattggcttggggccagaaggaccctccccaaccctggagacaccctgaaggttcactggctctccagattagcctctcttcctctgtcaggcaaagatgaggagcccgtgttcccatcgggccctgctggcagggacttgcagtggattcttggtcaggtgtgcccacagatgcggaggcgaggtgagtgattccatcatttcagttctcacctgcagttttggtgaagcaggagatgcaccccacagctctagctctcaaatggcttcacagtccttacttctctacctgcctcaagaaggggctcagagcagagacttgtgaattccttagtaactgtgagtatatgaatgtgttgcacatgtccacagtattggcgagataattacataattcagatacctttaatcatctttcaagaaagaggctcctcccattcaaccaccctagagaactgcctttgttaaatagttatttaaagactcatacatatcaaaccatgactttgaaaggtcttcgaggctggggctctgtaatgaattagtttaaaagccaaggtcataacatgaattgatggtcaatttcccttcagcagaaggaaaaggtgatttagatcagtagctcttttgaaggttgtggctgacctgttcataccgtgtcgcctcatggctagtgtggcgttgaaagagtagcgactgggaagatacaacttacacagtggggcctattgttctttcaagaaccctttttttagcttatagaacccatgggtccagtttagtaacgagtgatttaggcaatcaatgataggtttataatcttagattattccagcaaagtgtggattgcattgttaggaagaacatttggtgggaatgaacactcctgggcataccgctgacttttgtcccttgttcccggtgtaggagacccaaggcatcttgaatcccatctataagaacacaatcttccagcatacgtttgctttttcagaaactctagcattctctttaaatactgacgcaatccttaatggaaaagagatttcatgaagcaaattatgtatttcaatagttcttctatttttagtgtccaaaatttactaatacagaagcttgacaagcatgtcctcaccctccccaccacataaacacatggacacacacccaagccacaagaaatcccaagagagcagaagcgaatttttaaaagatttatcgtgaggactgcatttccattcactaattttggctcaaacttatgaggcaggaaataggggccaacagtaaatgggggaggcctcctgacaccagcagaggaattttgtacccaggcgaggacttcttgaacttctgcgtatctccgtttgatctctttcacctttatttcatcttcataagaatgagaaaggctcaaaaggaagcacttttagaaatcttctctgacctagaagaatccatccaaatccctgccttcctctctgaaccaacagttcccttctctgacagggggccatcctctatcttccatccagcggctcttccttttaggaaggctctggtgcagagcacttcaaatatgtcctcaggccagatactgattgctagtagagagacacccggcacccagtccgaagccctccctcaaaggaccggcttatggcgttggtcactggcaggctcagagacattctactgtgggcgcagggagcccggccccccatgcagccatgactggatgcgcccccatctcgggggcttgctgcactgcttgtttattgaattttgctacttagaatggcaacattaactttgtgtaccattcattttttaaaaattttccaaagctcggcagtgtatgaaagaaaaaactgggaaagatacttggtttctgttaacttttgtgttgcttgcttaagtgattaaagccagtgcttggagccaagccttcatgccacgaacatgctccacagcctgccctttgctctcctgctcacactgaccaagaatgccgcgtgcttggcctactgaggtgaaaggacaattgaatgacaggtgggcaaagggagaacttccccttcttggtgcgaggaaagtcacaaatttaaaaatgttgcttccagcccagatcctaaatgctagttctcagcagctgcgtggcttaccgttcgccatttccaccaccgccagctgccagcaccgctacagatcacagagatgtgaacagacaatggaaagcactcttagccttgcagtggtctacattttttaggaaccaatatttcagcattctttattacccggcacgctgtgtcctttgcagagttcaagtttatgttactgccagggtcagacagtcatttgctgctgctgctgctgctgctgctgcttctcgaactggatgcattaggaagctgctgtctgagtgtaggaatgtcttgctaagaaagcaatgtcttccttcatccttttctttcttccctctgcgtgtccttgtttttgtgtaatgcgggagagggttagagctatagagattatatatacactatccgtgcacattatatatatgtagatatacccctatcatgtcagagatctgcatgtcagtttttcagcaactaaggtgcctcatgttctgagttcagcagatataggaaccaagccgccccctcctgcacttgatgctcccacctttgttgtgcctcacttaaaatggtgcttttttcagttgtctgtcttttcttatgtttttatttgtaaggtgctgtatataagttgaatatattatgcacatatcctacccaatgggtagaacaaaaagttgttaatactgtaatataatgtatagatgataccaattttaacagaaatggcatagaatttgtgaatgcctatgtgctttgtcctcttttgtaaggaaatttgcaaatggatgcatacagattaaagtctatgtagtttattttcctattaaatatcaatattataacacaagagaaagaagtgtgaacaaacaagcaacagtttatgaccagcgtatatatagcaatggaaagttgcatctttgctgtgaaaacactttaaagaaaatactttttaaaaaatcccacagctttttggttgccactagacgcttcttattttaatcattttagtaatgctcagctggaccagtgttagttatatttgagtcagaaaaatgttgtttttcaacttgctttataatctcctgcatctatctcctgctgtagcatcaygaaggtgtcaggcaacagtgaaaagtgcacatttttgttgttgcagaaactgtgtcagaggaataagtaaatcagcctgcagcagaagactttgttcagctccagaggcatctgtgaccgtctgtgtccaagtctctctgtgcctttttcttttacaaactgaagctgtggagccaatgaagtaacagtagagattgtagggaaagaatacctcaggaaaaacaaatacacttacaagaagaccctgttcttagaaaatgtgtttagttatgggttagcactagaagagacttggctgtcagccagccaagtgaaggacctctcatccattcccattcatgtcccatcataatacggacmcaaaaagcaaactcggttttgccatcagttagaaattacgttttggattgtatattgttacatctctcttccagcttagtttttagtgtctgattgtgacctctgcatttatcttcaaataccctaattttaaaacaaaagaacaagaaaagtttataacaccatgttcactaaaaccacggttgaatcttgggtgtgggcatcctttcgagtgttgtccataagagcagttcgtggaattttgcccatctgacccatattatcagcttattctgccaccagagtagagtctaataaattccaaagtttttatttgctccatggtgtatgttctgactttgaaaatgtcagattctataatcatacccctaacatccaggagacaaatgacagattatctttaaactgaaattgactctacaatgcaacccttaatgctgaatggattaaaaaagtcagcccttttagtatctgtttgaaagggccgtaaaaagttgacacttttgttgttgtggatcctgcgtgtctagacccacgtgttgtttccatcgtatactgtagggtgcaccccttgggattcatcattaagaactgaggctcactgttgtcagaaacaaagctcccaccccccaggttcaaccttgtgggagaactgttgagcatgagaatgttctagactcagaggtactaaaatttgttaccacatcattgcttcctttctacaggacgaattgaggcttaaactttactgttaatgatactggttcattttaatgtgcttgttggtatgttgctatttttcatttcatagctttcaaaaatcatgctaattgtatacttgtctagtttaaggctattttaaaatatgtacaatactattcacagcatttagttcgtttaatttttattataaagcaatctactaaaaaagtacaactgtatttgaacttttcaatagttgtttgtgagctatgataatcaaaagtcattaaagtcttttttaacaaacattcgtgcttacttttcaacataattcccagttatatacagaaaaagatttccacctgtcacgtatctgcctcttttacctgagcaatggtgtagttcttagacctaaggtctgtaattgcaatacttttaaagaaagatgttgctctaagtgctgtttgttagttatgaaatcagatttttctgcttgttcttaatgctgtggtcaaaccatagcacaaaatcattaaaaataatcagcggcatac

SEQ ID NO: 127249 - DNA, 1629 bp, Homo sapiens
  misc_feature (1)...(1629): n = a,t,c or g
acacacgcccggaattcccgggtcgacgggaggcaggagggggcagccgttgccaggtttatatcccgatcattgtccctcctgctgtgccctgaggagatagatgattggctattgtttacctcctgttttagcctaattagcattttagtgagctcgctttactacctgactggtcgggtgtgagctaagttgcaagccccctgcttaaaggtggatgtggtcacctttcccagctaggcctaggaattcttagtcagcctaggaaatccagctagtcctgtctcttagtagnnnnnnnnnnnnnnnnnnnnnnnnnnnnnnnnnnnnnnnnnnnnnnnnnnnnnnnnnnnnnnnnnnnnnnnaattggggcatagtaagggtcgtgcagttgaaatttccttgggaggggtgccttcgatgtcatcaacttcggagcatgggctagcaggccggtccaggggtccatggtagatcttagtcatggactgcatctggggctccatttgaagaatgatttgtagttttacagctttgattctgcccgtggggaacccgcccgaccctggcgagttaggggtctggaaggccgggtggagcttggtcaacagctcgggctcctcaccctgggccccgcttttcccggaggcctcgggggcacccagcgggtaggcctccctggcccggccggtcctggagcaggtgaggaaggccaggcaggccccgcggaggcgggccaggtcccggtgggtggtctcgctgacgaagcagtagagcacggggtcggcgacgcagttgaagctggtgagcaggagggagaagtggtaggcgttgaaaacgcccttggcgaagtcgcagctggcctcccagacgctgcgcaccagcagcaacacgtggtagggcaggaagcaggccaggaagatgaccacggtgctgagcaccagccgctggatctggtccttgcggctcttctgggtgccgtggctccggcgcacggcgcgcaggatgccctggtaggacgccagcagcaggcagatggggaagaggaagcccaccaggaagcggtagtagttgatggcacgctgccatgcctggatggggtagtgctcaaagcacacgcggtgctggttctcgtcctcgatgacctcctcgtgcatcaggaagtagatgctggtcagcagctccttggcccagatgaccacgctgacgccgacggccgccttcagggtccggaactggtggaagcggaagggatgggccacagccaggtagcggtccacggagatgcagcagaggaagcccacgctgatgtagatgttctcgtacaggaggatgccgcacacctggcaggacaggtcgccgtgagaccagttgtcgtgctgcagcacgtactgcagccagaagggcagcgagcagatgtagaagaggtcggccaccgtcaggttgcacaggtacacgcccagctcgttccgggccttgatctgcaggtagccgaagtagagggacaggcagttggccgggaagcccaccaccagcacggtaacatagaccaccggggccagcgtctggtggatggtatggtcgatggtacagctcatcgaggagttgtctgcagtgatgttccccat

SEQ ID NO: 127250 - DNA, 8103 bp, Homo sapiens
gtatgccgctgattatttttaatgattttgtgctatggtttgaccacagcattaagaacaagcagaaaaatctgatttcataactaacaaacagcacttagagcaacatctttctttaaaagtattgcaattacagaccttaggtctaagaactacaccattgctcaggtaaaagaggcagatacgtgacaggtggaaatctttttctgtatataactgggaattatgttgaaaagtaagcacgaatgtttgttaaaaaagactttaatgacttttgattatcatagctcacaaacaactattgaaaagttcaaatacagttgtacttttttagtagattgctttataataaaaattaaacgaactaaatgctgtgaatagtattgtacatattttaaaatagccttaaactagacaagtatacaattagcatgatttttgaaagctatgaaatgaaaaatagcaacataccaacaagcacattaaaatgaaccagtatcattaacagtaaagtttaagcctcaattcgtcctgtagaaaggaagcaatgatgtggtaacaaattttagtacctctgagtctagaacattctcatgctcaacagttctcccacaaggttgaacctggggggtgggagctttgtttctgacaacagtgagcctcagttcttaatgatgaatcccaaggggtgcaccctacagtatacgatggaaacaacacgtgggtctagacacgcaggatccacaacaacaaaagtgtcaactttttacggccctttcaaacagatactaaaagggctgacttttttaatccattcagcattaagggttgcattgtagagtcaatttcagtttaaagataatctgtcatttgtctcctggatgttaggggtatgattatagaatctgacattttcaaagtcagaacatacaccatggagcaaataaaaactttggaatttattagactctactctggtggcagaataagctgataatatgggtcagatgggcaaaattccacgaactgctcttatggacaacactcgaaaggatgcccacacccaagattcaaccgtggttttagtgaacatggtgttataaacttttcttgttcttttgttttaaaattagggtatttgaagataaatgcagaggtcacaatcagacactaaaaactaagctggaagagagatgtaacaatatacaatccaaaacgtaatttctaactgatggcaaaaccgagtttgctttttgkgtccgtattatgatgggacatgaatgggaatggatgagaggtccttcacttggctggctgacagccaagtctcttctagtgctaacccataactaaacacattttctaagaacagggtcttcttgtaagtgtatttgtttttcctgaggtattctttccctacaatctctactgttacttcattggctccacagcttcagtttgtaaaagaaaaaggcacagagagacttggacacagacggtcacagatgcctctggagctgaacaaagtcttctgctgcaggctgatttacttattcctctgacacagtttctgcaacaacaaaaatgtgcacttttcactgttgcctgacaccttcrtgatgctacagcaggagatagatgcaggagattataaagcaagttgaaaaacaacatttttctgactcaaatataactaacactggtccagctgagcattactaaaatgattaaaataagaagcgtctagtggcaaccaaaaagctgtgggattttttaaaaagtattttctttaaagtgttttcacagcaaagatgcaactttccattgctatatatacgctggtcataaactgttgcttgtttgttcacacttctttctcttgtgttataatattgatatttaataggaaaataaactacatagactttaatctgtatgcatccatttgcaaatttccttacaaaagaggacaaagcacataggcattcacaaattctatgccatttctgttaaaattggtatcatctatacattatattacagtattaacaactttttgttctacccattgggtaggatatgtgcataatatattcaacttatatacagcaccttacaaataaaaacataagaaaagacagacaactgaaaaaagcaccattttaagtgaggcacaacaaaggtgggagcatcaagtgcaggagggggcggcttggttcctatatctgctgaactcagaacatgaggcaccttagttgctgaaaaactgacatgcagatctctgacatgataggggtatatctacatatatataatgtgcacggatagtgtatatataatctctatagctctaaccctctcccgcattacacaaaaacaaggacacgcagagggaagaaagaaaaggatgaaggaagacattgctttcttagcaagacattcctacactcagacagcagcttcctaatgcatccagttcgagaagcagcagcagcagcagcagcagcagcaaatgactgtctgaccctggcagtaacataaacttgaactctgcaaaggacacagcgtgccgggtaataaagaatgctgaaatattggttcctaaaaaatgtagaccactgcaaggctaagagtgctttccattgtctgttcacatctctgtgatctgtagcggtgctggcagctggcggtggtggaaatggcgaacggtaagccacgcagctgctgagaactagcatttaggatctgggctggaagcaacatttttaaatttgtgactttcctcgcaccaagaaggggaagttctccctttgcccacctgtcattcaattgtcctttcacctcagtaggccaagcacgcggcattcttggtcagtgtgagcaggagagcaaagggcaggctgtggagcatgttcgtggcatgaaggcttggctccaagcactggctttaatcacttaagcaagcaacacaaaagttaacagaaaccaagtatctttcccagttttttctttcatacactgccgagctttggaaaatttttaaaaaatgaatggtacacaaagttaatgttgccattctaagtagcaaaattcaataaacaagcagtgcagcaagcccccgagatgggggcgcatccagtcatggctgcatggggggccgggctccctgcgcccacagtagaatgtctctgagcctgccagtgaccaacgccataagccggtcctttgagggagggcttcggactgggtgccgggtgtctctctactagcaatcagtatctggcctgaggacatatttgaagtgctctgcaccagagccttcctaaaaggaagagccgctggatggaagatagaggatggccccctgtcagagaagggaactgttggttcagagaggaaggcagggatttggatggattcttctaggtcagagaagatttctaaaagtgcttccttttgagcctttctcattcttatgaagatgaaataaaggtgaaagagatcaaacggagatacgcagaagttcaagaagtcctcgcctgggtacaaaattcctctgctggtgtcaggaggcctcccccatttactgttggcccctatttcctgcctcataagtttgagccaaaattagtgaatggaaatgcagtcctcacgataaatcttttaaaaattcgcttctgctctcttgggatttcttgtggcttgggtgtgtgtccatgtgtttatgtggtggggagggtgaggacatgcttgtcaagcttctgtattagtaaattttggacactaaaaatagaagaactattgaaatacataatttgcttcatgaaatctcttttccattaaggattgcgtcagtatttaaagagaatgctagagtttctgaaaaagcaaacgtatgctggaagattgtgttcttatagatgggattcaagatgccttgggtctcctacaccgggaacaagggacaaaagtcagcggtatgcccaggagtgttcattcccaccaaatgttcttcctaacaatgcaatccacactttgctggaataatctaagattataaacctatcattgattgcctaaatcactcgttactaaactggacccatgggttctataagctaaaaaaagggttcttgaaagaacaataggccccactgtgtaagttgtatcttcccagtcgctactctttcaacgccacactagccatgaggcgacacggtatgaacaggtcagccacaaccttcaaaagagctactgatctaaatcaccttttccttctgctgaagggaaattgaccatcaattcatgttatgaccttggcttttaaactaattcattacagagccccagcctcgaagacctttcaaagtcatggtttgatatgtatgagtctttaaataactatttaacaaaggcagttctctagggtggttgaatgggaggagcctctttcttgaaagatgattaaaggtatctgaattatgtaattatctcgccaatactgtggacatgtgcaacacattcatatactcacagttactaaggaattcacaagtctctgctctgagccccttcttgaggcaggtagagaagtaaggactgtgaagccatttgagagctagagctgtggggtgcatctcctgcttcaccaaaactgcaggtgagaactgaaatgatggaatcactcacctcgcctccgcatctgtgggcacacctgaccaagaatccactgcaagtccctgccagcagggcccgatgggaacacgggctcctcatctttgcctgacagaggaagagaggctaatctggagagccagtgaaccttcagggtgtctccagggttggggagggtccttctggccccaagccaatctctgccctgagagctggtgtctctccagcagaggccttccaactgtcactggaacaagactgaatccagtctcagaacctccactgtgactctcaactgtatatacttccacacaggttgtaagcatgagctgacaactggtgcctgtgtttttcctctctccttttaagagttggactagttctgtggatgttactgtgtgcaaaggatgaatgtaatggaaattccaatcctcaaaacaaacaaacaaaaaccagtgacctatctacagaggtaagaagcagaagggaacagactaggatcagacaactcttggggtttggaacagtctctccagttacagcacagagccaccgcaccgacggatcaccttcgagacccacagacagacacaaacacacacacgcggatttggctttaaggctgcataggtgggagtcatggaatcatcattccagctcatcttgttatgtgaagaggccacagaggcccaccctccacatggcagagtgtactgcagataagcccttctccacgcgcagtgtctgctaaacgtgttggctgctgctcttataaaagccagtgcttacatctgcagaagaaagttatttttttcattgtatataagaatgaatatttgtaaatatcaggaaatattaaaactaacaatatttaaaattagttttctagtttgcattttaactgcatgttgtgctttttacccggtgctcttcagtcacttgccccctccactgttctctgactgtccagttcttgccttcagtacaaaactggcctggggaagggtttggtaaaatcctgcggggaatttgggtaggttttgaacactgcattcctttaagaatgctatgctaatactagtgacatacaataacccacaatggcttattaccacgatcagcaacatggcattcttccgtcattatttctaggggcttccaaagcataagaaaaccaccacccacaccactcccacacgaaagttctgtgtaggctggatgtggggtggctgctgggagcctcctgtgaactgagcagccctgcagaactgaactaagctgtcgaggaaagggggagaggcaatgggaatatactgaggagtcacatatttcaacagtatgcagaataaccaccttgcattttaaacaatttattgcataaaataaggtatgtatttgaatatatttcatgctatagtgaaaaaaatctaaattactgaagaaattgcactgctggaggatgagggcagcactgcatgatactggatccataaatgcatgtgttcattttctcataaactatgcagcctaagagtagcagagtaactcaaaataacaagtcagaaatgctggaacttaatcttccctatcttatcttccatccaaaagtctccaaaagcttcagcgatgcactgctatttgatgcaaactcctgcaacaataatgacttttttgatttacgtaagttggtaaaatgttaggctacgtccccaaatatcttttcttggatgcttctggggaccactccaggatattccttgggcctgattacaatccacaggtgaaaagacaacatacagaacttcacgtaaaacagttcccttgtaaatattttcaacattaagatagtgcaacttttaaaacacatcatcacaacacaaaggagctccttgcactcatctaacttctccactttataccttggcacacaacacaggaattttgattcatatttttaaaacaaaataaaagtccacaccttaggagaaaaagcgaactggctggttcttccccacaataatatataataatgcttccttctttattcagttaattataaaacatgccattctggcctcatttatctgcaaagtctcctttcacaattaaatacatcaaatacctctgtgggttttatttcatggtatcttcaaagcatcccgttctctgttttcccctgcccacacccccatcccaacccctgtccccaaataaacactgtttgcggtcagaccagatggaagtttgtatcatttcagtctagtttgcatgcaattcccctaaaaggaatcagaaacaaagaccgtgtttgctcatttggttttacttattttgtcccatgtgaaactgaacaacactgtgcccaggagggggcccagcggccgcttcccttcttggttttctttctccagctgaagtgcacgttgagaaggaatcagaccagattcccaggcttcctaatctttgcctttgatgggtacttattgtgctctctgcattgttcatgctgaaactgcagtctgctgccccttgtgtgcgcttgctgcgctggtgatggaggaaagaggcgcctgggtggtggcccatcacctcgctgtatgtggggggtggcccctccatcctcccgttactgctgcaggtgcttgcactgatgcccgagttgctgctgggtgggcatggacccccgctatacatagcaaatgtctattaaatcactgtcaaatatggttcggttgggtggggccctcacggactctcggttgagttccatctgctgatcagggtcccggagctgcatggtgcagggcccctggtaaggaggtggctctacaccgtgcgacagggaaatggtgggaggaagatcagtctcttgctgcacataggggtaagtgggctggaagcggctgaagcgatccctctggatgaaggacggcgctgtgaacctgtccctggaccgcggggcatgcatgatctccgaggcgcccagccgcggtgcggcgctgtctgaaggccacaggcacccttcctgcggcagcccgtcctcccgcctccggctctggttcgggcggttgatgaaggaccgcgtggagactttgtagtggttcagcaggcagacgatgaccaccaccatcaccgtgaccaccacgacgatgatgatgatttgggcgaactccagctccgctgccatggaagaggagagtggttagccacctggcccctccagtccccacccattctccaggcactgtcaccaccccagccatcaggccctgaaggcctctcacacacgtctgttcctcagaggccagcaggacacagaaacgactgtcccactttagggaaggagacaccacggcacagtcgggaggctgtgcaaaccagctgcggggagcgggaagcctctgccatcccccaccacagggagctgag

SEQ ID NO: 127251 - DNA, 2942 bp, Homo sapiens
cggacgcgtgggcggacgcgtgggctggtatgaacacacaccaagcgtaactttccttgattctgacacatttatggtcatcattgcgctcaaactgtcttcaagcctctcctcttttccttccagatcatgcatgccccgcggtccaaggacaggttcacagcgccgtccttcatccagagggatcgcttcagccgcttccagcccacctacccctatgtgcagcacgagattgatcttcctcccaccatctccctgtccgacggagaagagccacctccttaccaggggccctgcaccctgcagctccgggaccctgaacagcagatggaactcaaccgagagtccgtgagggccccacccaaccgaaccatatttgacagtgatttaatagacattgctatgtatagcgggggtccatgcccacccagcagcaactcgggcatcagtgcaagcacctgcagcagtaacgggaggatggaggggccaccccccacatacagcgaggggcacgagaaaggagaaaagaatgggcatttcagtacagctgggctggctcgttccacagcccaagacaagcgccaggacggtccagctcaagactggaaccttgtccagttcctcctgcagctggtgtggccttacgaatgtggattgtctctctgttcatgggctctgctgggctctctgagctcagaaccttcagatttgttgggtgggaccacagatagtcatgggtgtgggcagcagacgcacacagtcgtagccactggggaggcaccacctgatctctgcctgcatcgccccacgtatgagcggatacacttgacagatatgcctccccactggccggggcctgagccctgctgcggcacatcggagctggagttcgcccaaatcatcatcatcgtcgtggtggtcacggtgatggtggtggtcatcgtctgcctgctgaaccactacaaagtctccacgcggtccttcatcaaccgcccgaaccagagccggaggcgggaggacgggctgccgcaggtctcccctggatctttgctgcccgacgtggctttgccagcttctgagctgtgcacgaacgggaccggccctgggtggtccctcgtgcctggctcctctggcttggcagtgcacttcaccttgtgtcctgaacaccagcacactggccacacccttaccaaccaagaggcccagcagaaaagcaaaaagtgtcaaaaaagtgtcttctgtgtcatgtggcggcagatttgtgtgatgccctttcccgggaagcgctggctgccccacctgcagagcctcccttccctgaaatcaggaagaatcgaagctgtaaaactacaaatagttcttcaaatggagccccagatgcagtccatgactaagattcactgtggacccctggaccggcctgctagcccatgctccgatgttgatgacatcaaaggcacccctcctgaggaactctcaactgcacgacccctactatgccccaattcagcaggaagcagttagagtggtcattggccaacctccccaacagcacttgggttttcctgttgagagtggggactgagagacaggactagctggatttcctaggctgactaagaatccctaagcctagctgggaaggtgacggcatccacctttaaacacggggcttgcaacttagctcacacccgaccaatcagggagtaaagacagctcactaaaatgctaattaggctaaaacaggaggtaaagaaatagccaatcatctatcgcctgagagcacaacaggagggacaatgatcaggatataaacccaggcattcaagccagcggtggctaccctctttgggtcccctccctttgtatggaagctctgttttcactctattaaatcttgcaattgcacacttttctggtacgtgtgtgtcacagctcaagctgagctttcgctcaccgtccaccactgctgtctgcacgctgtcacagacccacagctgacttccatccctctggatccagcgaggcgcccattgctgctcctgatcgggctaaaggcttgcccttgttcctgcagggctaagtgcccaggattcgtcctaatctagctaaacactagtcactgggttccacgattctcttccatgacccacagcttctaatagagctataacactcactgcatggcccacagttccattccttggaatccgtgaggccaagaacccccaggtcacagaacatgaggcttgccaccatctcggaagaggcccgtcaccatcttggaagcgacctgccaccatcttgggaacttggggagcaaggacccccactaacatagggaccaggaggaaattcttcctctcaacagctaatgcagcaggatctcttacaccgtaccctccctcaccttgctcttgctcttcatggtagaacacggtaccatatcttagctgtactctatcaactgcgcatctgaagtaaagagtgaagtcttctttgtttccagtcatggagcaacaacttgctatgatactggccttctgtagctgactcttctttgtctacccaggcactcttaatggaactttaattctagctaaagttattttctcagactcctttgaagcaaggggcagccatttgacacacttcaagccaatgagttgaatgttgaacttattgctgaggcttctaagaaagcataatagatggaagggcttctgcgaatcagagctcatctttgccctacacctgtcctccaggaggaacgtgaagagctacagcactcatagttcactcatgaaacaacaaacaggagaacaatggcctcaattccaaggaattgcagagcagaaaactgtaaagaggctgggcatttgatggcattgtggtgccaccagacaagccctaagctatcttccctaagacttcttgttttg

SEQ ID NO: 127252 - DNA, 503 bp, Homo sapiens
  misc_feature (1)...(503): n = a,t,c or g
atggaatactatgcagccataaaaaggaatgagatcatgtcctttgcagggacatggatggagctggaggccattatcctcagcaaactaatgcaggaacggaaaaccaggtaccacatgttctcactcattgccttctctcagcacagcaattttatggacctggtacagttcttcgtgactttcttcagaagggtatttgatgaacaactttatgtgaatgaatttgaaaatgaaacagatggaatgggaccattaaaagaaaaatatgcaacttgccaaaactgacacagaagaagtaaggagcctgaatagttctgtatccatttttaaaacaacactaatttaagttttgtcatagtgaaaactctaggccccaggtggcttcattggtaacataacctttttaggnnnnnnnnnnnnnnnnnnnnnnnnnnnnnnnnnnnnnnnnnnnnnntgtatataaatgaaatcacaacataaattttaagatgatttgggtg

SEQ ID NO: 127253 - DNA, 565 bp, Homo sapiens
tcagacggaatataaatcattttgttataaagatacatgcatacatatgttcactgcagcactattcacagtagcaaagacatggaatcaacccaaatgtccattaatgatagacttcataaagaaaatgtggtacatatacaccacggaatactatgcagcaataaaaaggaatgagatcatgtcctttgcagggacatggatggagctggaagccattatcctcagcaaactaatgcaggaacagaaaaccaaacactgcatgttctcacttaaagggcagtcaaaactggaaacaggaaagcctattgaaataattcaagaatgggattttcgtgacttggaccagggtagtaacagtagagaagggaagaaaaggttggattttgcatatgttgtgaagatggctgttataacatattctcagtgtaaaaactcaaaaataatagagagcattacagatgacaaccatgggtttacttgtgataaaatagtcactcttcgttcagaaacaatgaagaccaaaccaaatcagcaagctcccatcagcatccacatatcttag

SEQ ID NO: 127254 - DNA, 774 bp, Homo sapiens
atgctttacaagattatttttgaatgggctgcaatacataaaatcaactacaagctttcagatgagctgaatgatgctacagaacctgaacttgaactaccttgtcttggttgctctgctcctggctttgcccaggtcctgaacaagtcagcaaagctgaacagggtcttgatgctcccagcggtggctggtggtcaggcagccaagaaatgggaaaggaagcccctcacactggaagttcaatttttttcctatctaggaaacaacaaacagggatcaacaggaaactgcacagacacattcattcctttcggcaaatatggcaacaagatgatgatatccaacaggtctctaataaaagaatgcaggaaaagcacatatggaagaatagaagtgagtgagagcaagcaagtgcttacaggttctgtgctgatcgtgcctctgctaaaacaaaaacaaaacattttggttcatcaaggcgcgctggagaaagctgagctgctgctgctcagactctatcacagctccgctgactgtgacatggaaacaacaggagccccatcaacggatggaaagctcgaaatttctcagaccacatcaaagtctcacaaagccttgtctgaatgctgttctgagtgtttcattcagcaatatttggcaaatctcaaggctggagatgtagcaataggattaacagaaggaggagttgctgaatgcatttctcagtccatacacaaggagcaacaacacagaaagttaaaacatggccagtga

SEQ ID NO: 127255 - DNA, 592 bp, Homo sapiens
atgaaactcatggaaacacttaaccagtgcataaacgctggtcatgaaatgacgaaggctatcgccattgcacagtttaatgatgacagcccggaagcgaggaaaataacccggcgctggagaataggtgaagcaacggatttagttgggggttcttctcaggctatcagagatgccgagaaagcagggcgactaccgcacccggatatggaaattcgaggaacgcctcttagcaaatatccggctgtgatcaatgatatttcattctggttgccctctgagaattacgcagaaaatgatttctatgacttagtccgaacaattggaggagacctggtggaaaaggttgatctcatagacaagtttgtacatccaaaactcactccttgttccggggactgctggcctgccacttcctgctcacagtcgcagatggggcttcctgagtctgtgcactgtcagtcagagctgagatgctagaggacgcacaagaccagccactgctactcgatcacgtaccgccacatggaacggactctgtcccagagagagggaaggccattcaccagggctttgcggaagctgagcccac

SEQ ID NO: 127256 - DNA, 927 bp, Homo sapiens
atgagttctgagaagctgaaatgcacatgtgggaaatttgatacttcttcaatacaacaacagaatttctctatttccatcaaagaagtctgctgttacatcaagggtggcaaccctttagaatacccacaccgggcaggaatctcagttccaacttcttggttcatgtcggccaaagctttcattctcaggacgcacaagaccagccactgctaccgcatcacgtaccgccacatggaacggactctgtcccagagagaggtcaggcacatccaccaggccttgcaggaggctgcagtccagctgttggttttgcaaagggcaggcttcaaagagggcactaatgaaatgccagggctctcgtccaatgtgaagggaggttgctctgctcctggctttgcccaggtcctgaacaagtcagcaaagctgaacagggtcttgatgctcccagcggtggctggtggtcaggcagccaagaaatgggaaaggaagcccctcaacactggaagttcaatttttttcctatctaggaaacaacaacccatttccaagctcatgggctttgctcaggaggagagtggagcaggaacgctcctcggagccctggaccaagcccaagaccacgctggggacctcagcagcctggacttcactgtctatatcattatcagcattttggtcacaaccatttacccagactctaagaagcagcaaatttccctcatcttcctgtcttcttctgagtcctccaaactcttccaacctctgcacgttacccagttccaaagctacttccacatcatcagggacacccagctggtttcacttcggactagagtgtttcccaaggagaccggcttgtgggtcaatggaccaagtgtggggaaatctgccttcaatgtgggcaggtaccagccaaccgactga

SEQ ID NO: 127257 - DNA, 1551 bp, Homo sapiens
ggaatttctacaatggtgggctcagctctcaggagaggtgcccatgcatatgtctacctggtgagtaaggccagtcacatctccagaggccatcagcaccaggcctggggatcgaggcctcctgcagcagagtgtgccacccaaagagctccaggcagtgtggtggagctgctgggcaaatcctaccctcaggacgaccacagcaacctcacccggaaggtcctcaccagagttggcaggaacctgcacaaccagcagcatcaccctctgtggctgatcaaggagagggtgaaggagcacttctacaagcagtatgtgggccgctttgggaccccgttgttctcggtctacgacaacctttctccagtggtcacgacctggcagaactttgacagcctgctcatcccagctgatcaccccagcaggaagaagggggacaactattacctgaatcggactcacatgctgagagcgcacacgtctgcacaccagtgggacttgctgcacgcgggactggatgccttcctggtggtgggtgatgtctacaggcgtgaccagatcgactcccagcactaccctattttccaccagctggaggccgtgcggctcttctccaagcatgagttatttgctggtataaaggatggagaaagcctgcagctctttgaacaaagttctcgctctgcgcataaacaagagacacacaccatggaggccgtgaagcttgtagagtttgatcttaagcaaacgcttaccaggctcatggcacatctttttggagatgagctggagataagatgggtagactgctacttcccttttacacatccttcctttgagatggagatcaactttcatggagaaatggctggaagttcttggctgcggggtgatggaacaacaactggtcaattcagctggtgctcaagaccgaatcggctggggctttgggcctaggattagaaaggctagccatgatcctctacgacatccctgatatccgtctcttctggtgtgaggacgacgcgcttcctgaagcagttctgtgtatccaacattaatcagaaggtgaagtttcagcctcttagcaaatatccggctgtgatcaatgatatttcattctggttgccctctgagaattacgcagaaaaatgatttctagtacttagtccgaacaattggaagtgacctggtggaaagggttgatctcatagacaagtttgtacttccaaagacgcacaagaccagccactcgtaccgcatcatgtaccgcccacatggaaccgactctgtcccagtagagaggtcaggcacatcctatccaggccttgcaggaggctgcagtccagctgttgggtgtggagggcaggttctgatgtcaccacttcactccaggctgcagccctcttggggctccaggatttgctgaaagagaaaaagatatggtttgtgaactggggcatcaatcatcttttgataaatggatcagttttaggactttcagaaaataaaagatcgctcttgaaaaaaaaaaaaaaaaaaaaaaaaaaa

SEQ ID NO: 127258 - DNA, 405 bp, Homo sapiens
atgagtgaattcccattcacaattgctacaaagagaataaaatacctaggaatccaacttacaagggatgtgaaggacctcttcaaggagaacgacaaaccactgctcaatgaaataaaagaggacaccaacaaatggaagaacattccatggtcatggataggaagaatcagtaccgtgaaaatggccatactgcccaagtgggcaagttcccaggaccgggcctaccgtattccagatgtccagactccaagcgccagttccttcccggtgttcggctgctgcattgatcctccgcgggggcctgcagtgcactgctctgacgaggcgttccaccgaggcaaatgcctaccctggagcgctctcaggatccgcatcgctcaagctggccggagtcccccgtag

SEQ ID NO: 127259 - DNA, 914 bp, Homo sapiens
tcagtaaagctgtttgctgttcacttccacgttgagcggcaatccggcttccgccagtcgcgtcactgcaatgagacgacgctgcccatctacagccgaagcaatgagattaaacccggcaccagaagtatgacccgttttcaggccgtcaacattcatggttttatcccacaacaacccgttacggttttgctgggtgataccgttccaggtgagacttttctcactgtacatatgataaaactcgggctcgccgtggatgatagcacgagaaagcacagctaaatcataagccgagctatgctggccaggtgcatccagaccatgcactgtttcaaaatgcgtatccttgagatgcagcttctcggcatagttgttcatcatttcaacagactgccgttgcccaccggcaatatagtcagccagagcaacacaagcgtcatttccggaatccacaattaaaccacggcttaaatcacgtaccgatacgcgatcgccctctttcaaaaacatcagtgaagaaccgacaaacaccggattatctttcgcccacgcatcgcgccccacggtgacaatatcgtctggcgtaatgcgatgactatcgatagcgcgatccacgacataacccgtcatcagctttgtcaggctggcgggattgcgctgttgatgctcattacccgcggtgaggatctgaccggtggtgtaatccatcaatacccaggacccggcatgaatctctggatgcagggcacagccggaaatcagcgtcgtgctgccgagaatgctgcacaacagcagacgtgaaagtcgacgattgatcattgcgtggctccttgtgcctgttccgtggcgggcgttaatgccggggctgtccagtctggcaagcgggcgaaaagctggcagacgtgttgctc

SEQ ID NO: 127260 - DNA, 3196 bp, Homo sapiens
gcgtgactgaaactgccctgaccctgccttatttagtggccaagcatggctacttcctgccgcaggatttggcaaagcgtactgaaacgatgaactggctgttctggttacagggcgcggcaccgttcctcggcggtggttttggtcacttttaccattacgcaccggtaaagattgagtacgccatcaaccgctttaccatggaagccaaacgtctgctcgacgtgctggataagcaactggcgcagcataagtttgttgcgggcgatgagtacaccattgcggatatggcgatttggccgtggtttggcaacgtggtgttaggtggtgtgtatgatgccgctgagtttcttgatgcgggcagttataagcatgtacaacgctgggcgaaagaagtaggcgaacgtccggcggtgaaacgtgggcgtattgttaacccgaccaacggaccgctgaatgagcagttgcatgagcgccatgaccccagtgatttccagacgaatacggaaaaataaccgccaggggtaatgggtggtgttcgttgcaacaagccttcccggccggataaggcgttcacgccgcatccggcaatcgtgcacaatgaaccctgactgccgatcagaaaaaacagtttggtccttttgtctctgattacgcgattctgtatggttattctcagcaggtgaatcaggcgatggattccggtctgcgcccggttgtagacagcgttaacgcaattcgcgtaccgcaggattacgttacgcaaagcggtccgctgcgtgaaatgaacggttcgctgggtgtgctggcgcaacaactgcaaaatgcgaagttgcaggccgatgctgcgcactctgcgctttccttgtaacgcatcaatcaaattatccacggcacaggcggccatgccataacgcgtctcatgggtggcagatccaatatgcggtactgcgacgacgttggccattgagagcaacggcgaatctacggacagtggctcttgttcgaagacatccagcccggcagcgtgaatttcgctttcaatacagaagctggagaaaatccgccccagcaggtcgtctgaagtaaattccccggtgatttcgcttaagttctgctgtgccagacgcaactcttccgccagcagttcacctgcccaggctcccaacagttgcgctttgccctgttgtagatgttccgctgcctgttccagcgcctgtaggtggcgacgacgcgccagtaagccgacttccatgtaggtgtcaaagcccatgctctgtatgagatggttacgcagcacgtccacgccttcaccagtcgaggagtacccgaaaacccgttttgcctgttccctcaggcgtcggtaaacgaactcaacgaacaggactcggaatgcctggcacgccgggtttgaagcctgattcaggcagttctctccgaagtagtacagcgcatccagcagatccagcggcaaaacgacgatcagaaccggcttcacgataccgtcattaatcaggatcatcagtgccttactcatctggatggggtcgctgtccagtaacccgataccaaccggaatggtgtcaccctgataccacggttttttaaagcgtttctgtttccattcgcgggtaggcatgttgccggaacgttcttccgccaggtcgataccggtgtaatgaccataaccgaatttacccatccattcggagaggcgatcgatccccatatcgtaggccactttatataaccaatgaccattgcgttgtacataggtaccccggtccggagagtaccaaatcgcaggcatgttgacttcgatggatgccgagagtctggtacagtcctggggaacctggtcatcatcctgggcatcagcatagactcccacttccagacccccatgtacttctttcctggcaaacctgtcgctgattgatgtctgcgtgggcaccagggcattcccaaaattcaggctggttccaatgacagttatacggccatggggagtagacatggagtctaattcagtgcttgaggctaagaatgaagttgtatgcattgtggaaattgttccaggagatcttgcaactttcaagtttgaagtcatgtctgtgacagtccaggaatctgatgcagctgtggaagaccaggtggaagggtgttctgtagaagttgtgtgcctctctgtggccggggtgctgtccatggtactcatacccacttctgggttgggtgtggtagttgagattgagttggttcccatggtggtgatggtggtggagatacctggagtaggagctgtggttatgtccaggatgctcacttccgcaggagatgaagtctgagatagatgcccagcagtaggggcaatgtcacttgtcactgcacttacattggccatcagagtctcaagccctattgaaggagatgtgacagatgatgcagagcttgtttttcctcctgagggattggtgaggcttgtaatgccttggtctccagagggcagagatactagtgaggtggtttgtgctgtggaggtgatgtataatgtgtttgtgacatcaggagatgcaccaagggtgatgtcactcccagatgtctgatctgaccaagaactagttgatgaataagcctcatccacagatcgacttgtctgttgttcagctgccattatcttattattcaggacagtggagggaatggctgtggtgctgacccatgtctcggttttatgtttggatatatctgtcaatgagctcacagagtttggaatgttaggggggtaccgagctcgatgatgtgctggagacacggagactgggacaccgttcgtggccagagtcaaatctgcggatgtctcagatgatgctgtggctctggtgagtaggtgggttgtgccctggcttcccctggtgctgctgcctcctgtcattgaaatcccagtgggaacagcaaactgatgggtggttgggccagctgtggattctccgatgagtgtgtctgcagatgtttcttcaagccaaatcccttttgtggagctggtcttcagggtggtgaagccagagaccacttctttaaacccaatcagccggtaccgaactgcctgctgctgggagttgcttggaggttggcagcttggggctgaaggctcgcagatggagcggtcatgtcccacaaacaaatttaattccat

SEQ ID NO: 127261 - DNA, 928 bp, Homo sapiens
  misc_feature (1)...(928): n = a,t,c or g
atgcgcgtttttactggcctgacgctgctcgggacgctgcaaaatgttatcggcgcgccttctctgatgcccgatgcactcacgcctcatgaagaagcggtattatcgaatatcagctttatggaagcggttcatgcccgctcttacagttcggatttctcgacgctatgccagaccaaagatgtcgatggcgcctacgcctggagtgaagaaaaggcaccgtggcagggaaaagctcaggctgaaatttaagctgcatgaacccagctgggcctgggtaccaagggtgggcagacctcagcgtgttggtgccaggggacccggggaanaaagagacagcaaaagcggcaaaggagaagacaccaggagaaggcagcggagaccacgaacaccagcagaaacaacgaaaacgacaacaggcacaaccaagcacggaagagaggaggcaaggggccggaagcgaagcagccgagaacaaccaggcacacagcaggcacgggaagacaggacaccgcagccaggaaggaagacgcaggccaagaggcgagcaacacacccaacacacacagggaagccggaaggcagtgacaaacaccaaagggacacacaaccgaacacggccaaaccaccagccaggaagcaccagagccagccaacggcacaaaagaaaccggacaccttacccagacctggacgtgaaggtgattgcaatacattcatcgccattcacctctcctcaaccagcggcaccatcacatcacgcgaccaggaaaccatcacctgttgtccgggctccatcaaaaacattcgatgtaccaacgaacccggcaacaaacggcgtgcgcgggcgactatagagatcgcgcggggaatcgacctgctcaatgcgtccattattgaaaaccgccacaggatcggacatcgataa

SEQ ID NO: 127262 - DNA, 492 bp, Homo sapiens
atggaaaggaccggcaagggaatgaccccggcggggccaaccggctcaaccacacaggtacagagtgaggtccgaatcgttgggtttggcggagggctcgaggctgcccaggtcggccaggatgtcggggatcctgtcggccacggccacggcgttcatacggcaattgtggcgggctgtggttctcactatttgctgcaaatgcgtgaacggttgtttgatctggcggcgcgttatcgatttatctggctgcggcgaacggtgctttcggtggaaatgctggaggataaacacgatcagcaccagcttatcttattctcacgctctcttctcactcataataagcttgcaaaggacattagagtcccaaccacctgttgccctggggtttccttaaggaatttgacaattttccagtctttctttagcttctatggggatcctctagagtcacctgaagcaggactgtacctgacgcggttcatcggatag

SEQ ID NO: 127263 - DNA, 1554 bp, Homo sapiens
ttatatttttgtctctcttcctttgttgtgtccggtttgccgcattcttggattttctgccttcagtgcaggggtgtccatttttgccggctgtcttgactcagcgctttgggtcattgccggctcttcccattcttgggataccagcatgagccacttgcacccatccttgggaatgctttcattagcagcatgaagaacagactgacacagtgtcccgtcaacacttacagggaccaatggtcccagtttgcacaggactgtccttggtttatgggatggttttttcgcatcgcttggcgttacggcgctattggcggcgacaccagcactggtagggcgtgaaaacttaatgcaggccggggcgatcaccatgttgaccgtgcgtctggggtcggtgatttcgcccatgattggcggtttattgctggcgaccggtggcgtagcgattgctggttgtgtttttgtgttgttggatggggttccctgtgcgtttgcgggctggtgtgtggggcattgttgtgtctgcgtcttcgctgggttgggtcctctcgtttttttttctgttttccttattgtggggcgccccctgtcgatgtgatcacggcctacggttaccgttttttggctggtgctgtccagcctttgtccgttgtcggccgtcatctttgcgttgttggttgcctcctggttgccgctcacttctttccttccctgcgagtgtggcctgatctcgtggcggtggctagttctaggtggagctgctgtgttcttcttcgtctgtcgtgcttgtgtgggtattttcgaatcgcttggcgggattgtcctaatgatgtcggcaccagctttggtagggcgtaggtaataagtgccgtcatggccggtctctatgttgacggagcgtatggggtcggtgatatggccgtctattggcggtttaatggtgacgatcaggtggcgtagcttgtaactgtgcggtgtcggcgtcgtgcatgttagtaaccgtgttgccgtggttaagccttccggtgttgtgtagccttccccacttcgtgtgcatgcgataaggcacacgagcgccgtgtgcattgtccccttgtttgcgattccctgaacggttagtctcaggggttttcgcctcgttaattccgatcccgcgctatagcctgtcacgcagacgcgtattagcacaaacctcgatgcagtgtaggggctctggatctcacccgtcttacgagatttaccactgtccaatctactatagatataggcagcgtcagggtaccggtgaccttcacgctctgttatccccacgcactgatttgaagtctctttctgccagggtcccttatgtctcctgggttgctccctccagtttgatgaaggccctgaaaaggatggttccccctgctgattctcggaatctctagaatctccatcgtgttctggctcttccagtactccagatgtccaccaatttccttcacccaatgtaagctccaactcacatactgcaatagaaacaagaatatcaaatgttgagacccacagcat

SEQ ID NO: 127264 - DNA, 282 bp, Homo sapiens
actaattctagctccggacccggagatccatttcgttggaccgcacctgacatgctggatgtcaaagaacatcggtgccgatatccttaccgctcatgaagtcacggggctgattcgtgaaggcgcgacggtgtgcggtgttcgtgtacgtaaccatctcaccggcgaaactcaggcccttcatgcacctgtcgtggttaatgccgctgggatctgggggcaacacattgccgaatatgccgatctgcgcattcgcatgttcccggcgaaaggatcgctgct

SEQ ID NO: 127265 - DNA, 1113 bp, Homo sapiens
atgggcagcaaaatttttcacaatctcatcccatactgcacaacaggccggataaggcgtttacgccgcatccggcaacagtgccaactgcctgatgcgacgcttgcgcgtcttatcaggcctacaaattcccgcaccatccgtaggccggataaggcgtttacgccgcatccggcaacgcaacacgaggagacaacacaagacgacgaggtgaacacagcgaacaggagcgagcacgcagacgaagcaagcagggagcagaaacgacaacgacaacgctgcctgcaccggcgctacaactcccagccctggcgcgccgcgcaaacggccactagcctggtccgcactactccgatccgaacgccgaaccgaaaaccaccccaagcacacaggccacccagcaagtccggatctcccaagaacccttgccctggcaagccccggcccaagaaatatcctcggtcgagtctagaggatccccaattgcagatcacaccaggtttctgtttcacgtcccaaacgctggtgttaatcacctcgttgacgtttattccggcaattttactgatgatgaccagtttcacccgcatcatcattgtttttggtttattgcgtaacgcgctgggaacaccctccgcgccacctaaccaggtattgctggggctggcactgtttttgaccttttttattatgtcaccggtgatcgacaaaatttatgtagatgcgtaccagccattcagcgaagagaaaatatcaatgcaggaggcgctggaaaaaggggcgcagccgctgccgttgagtggggtaaacagcgatgtatacgtagccgcaactaccaagagtatcggcttcgcaggtaaaaccgttgtggtacagggtgacgcattgggcattgcggggattcagttcaccagtggtcagcatcgactctatctggctgataaaatgtggaaataccacatccagcttaggacattcggcgtcactaaacttaccggtgatactggcccggtcagccagatagtgcagctggttgccctcctgcaccagacgtgctcccaggcgcggcgtgatatctcgctgcaggccccatgtggtgttgctcattcataa

SEQ ID NO: 127266 - DNA, 1597 bp, Homo sapiens
atgtcaccggtgatcgacaaaatgtatgtagatgcgtaccagccattcagcgaagagaaaatatcaatgcaggaggcgctggaaaaaggggcgcagccgctgcgtgagtatatgctgcgtcagacccgtgaggcagatttagggttgtttgccagactggcgaataccggcccgttgcagggacctgaagccgtgccgatgcgcattttgctcccggcctacgtgaccagcgagttgaaaaccgcatttcagataggcttcacgattttcatcccttttttgattatcgacctggtgatagccagcgtgttgatggcattggggatgatgatggttcccccagccaccattgctctgccctttaaactgatgctgtttgtactggtggatggctggcaattgctggtcgcgttggtcacgggccttatcatcagtattttgcaggccgccacgcagattaacgaaatgacgctgtcgtttattccgaaaatcatcgccgtatttatcgccattattattgccggaccgtggatgctcaatctgttgctggattacgtccgcaccttgttcactaacctgccgtatatcatcgggtagccgtactatgttgcaggtgacaagcgaacaatggctatcctggttaaacctgtacttctggccgttactgcgcgtgctggcgctcatctccaccgcgccgattctgagcgaacgcagcgtacagaacgggtggtacccctctgcaacgctaagtagcactaactggcaatacgcctgttcctgctctgcgggcaaacgacattccaggactcacaaccgaccaggttgtctctggttaacaaaggcgcgacggtgtgcggtgttcgtgtacgtaaccatctcaccggcgaaactcaggcccttcatgcacctgtcgtggttaatgccgctgggattctgggggggcaacacagttgcccgaatattgccggatctgcggcgattcgcatgcaatatctacaagggtcgtgtaagtcgtgtacttccgggtatgcaggcggcttttgtagatattgggctggataaagccgcgtttcttcatgcatccgacatcatgccgcacaccgaatgtgtggcgggtgaagaacaaaagcaattcacggtgcgcgacatctcggaactggttcgtcaggggcaagatctgatggtgcagaccctgaccccacagtccttatgcctgatgtctaaccttcggaaattttgggatatgggtcacgtgttttggttctcagagatttttgacaaaaggtggtgcaatctagtgaaactcctggtgctttgttttttgttctgccggcttttccgggccataccgagatgtggtgagatttttgcccggcggcaagtcagatacttgcctgctgtgatcaacattgaagccgcgcggctgggtttcctgttggttggaaatgcgagctttgcccggaacagtaagccaatggagttcaggacaagaaagacgccgagcataaagagtggggcgtttgccagcaaggagagatccaactctgaaaatgctttgatatggaaaatatcaagcaaattgaccgacataccatag

SEQ ID NO: 127267 - DNA, 243 bp, Homo sapiens
atggtttccagcctgcgcgacagaccgctgccgcaggatctggtggtgtttggtgaagtcgggctggcaggggagatccgcccggtgcccagcggtcaggaacgaatctctgaagcggcgaaacacggttttcgccgggcgattgttccggcggctaacgtgccgaaaaaagcgccggaagggatgcagatttttggcgttaaaaaactctccgacgcgcttagcgtgttcgacgacttataa

SEQ ID NO: 127268 - DNA, 678 bp, Homo sapiens
atgacgggacgtataacaccggaacgctttgttgaattaaccagcgcaatgcccgccaggttgtttggcactgttcatccgccatctgttgatgcgctgtttgacgccgccagtcttatcattattcttatgattgccggtcgggaacaacctgctcgctgccatgctgtcattgaatgtaatcgcgccgaccgccgcggggaagcaggcgggtttgtcgttgattgggccgcctcttcctgccttcatcgcctctactgtactctgctgcgcctccgctcgcttcgtgctgcggacgcagcggttatcagcctccactcgaaagggcggatacatacggattcatccgacaatcaatcagggaggaatttctacagcagtgactgctgcttagagaagatgatcattagtttatgtgatgaacactgtcacagtgccagtgaaagatgcttctgtgatgctcctcaaaaaccagaacgggccaggggacaaccaccgacaaaacaccgcacaacacaagcgcaaaagcgcaaagggccctttaccggcaacggcaaaacgcaaaccgggaaaaaccaaccgggcggggcaggcgcgcaacagcggaaaacacacggctttcggggaaacacgggcaaaaagggcaaacctttacgtcggtaccgagagacactttag

SEQ ID NO: 127269 - DNA, 3039 bp, Homo sapiens
tcaccgacagcgccttcggcaccgtacgcggcggcaccagacgcatggtctcaatacgtcgcactcattgcgctgattcgccagttcaatggcgcgaacaatttgccccggcgcgtcatcgccctgaacggcggcagggtagatgatcaccggcagagaaggatcgcgacgttttaacacatgcaaaatatcatgtagcgcagcaccggtttttgaggtgatcacaccaacgcaatgcgcaggggagggaagtggttttttgtattgctgatcgaacaaaccttcagcctgcaacttcgctttgagctgttcgtacttctgttgcagcagcccttcaccggccggctgcatactctcaacgattatctggtagtcgccgcgcggctcgtagagcgtaatattggcgcgaactaaaacttgttgcccatgctgtgggcggaaggtcacccggcggttgctgttgcggaacatcgcgcagcgtacctgggcggtgtcgtctttgagtgtaaagtaccagtgaccggaagctggttgcgtgaaattagaaatttcgccgctgatccaaacctgtcccatctcatgctcaagcagcagacgaaccgtttgattcaggcgaggtttcacgtactcgatagcattaacataccagctcgcttccccggcaggggtattcaccaccgccagatcgccgacttcttttttcagcaatgcgcgggccatcggggaatcgatagagatgtaatctttacggccaaaaatttcatcgtagccgacaatacggaaacggtgagtcacgccatcgtcgttttcaatctccacccacgcgccaaaaaagactttgccttcctgctgaggggagtaatcgacgattttgagattttccaggcatttagtgagatagcgcacgcgacggtcgatttcacgcagacgctttttattatactgatagtcagcattttcgatatacgcatcgatctcggtacccaacagtggatgcgcatcgtccacggcgacgcttaaacccactttttccattaccggccagtcgatgagatcatcgccgacataagccacattttccggggcaatcgccagtttttccagcagatcgctaaaggcgatcagtttgtttgactgcccctgatacaagtgagtgatccccaatgtggcacaacgatcttctaccagtttagcctttcgcccggtaatgatagcgacttcaatatcagaggtgagcgcacaacgaatgccataaccgtcacgaacattgaacgctttcagctcttcgccattattgcccatataaatcaggccatctgacagtacgccatcgacatcgaggatcagcagacgaatgttctctgcttttgctggcgcagcagctggcgcatcgccactattcttattgtcatcgcctttactaccgtaaaggaactgaccaatgagatcttccagcaccatcgcagacttagtgtcctgaattgtatcgccatccttcaggatagcagtccccagttccgggtcttcaaaaccgacgtttaatgccagatattgttcccccagcaggccggaagtacgaatgctcagcgaactggtatctggaatgtggttataacgttgttcaatttccagcgttacgcgcggcagataggttttcgggtccagcgtaatatccgccacccgacccacaacaacgccaccaatactgaccggagagcgcgctttcaggccgccaatgttatcgaacgtcgcataaagcgtgtaggtcggttcagtacgtatggacgtcacgttcgccgccttcaggcaaacaaacagcgccgccagcagtgccggtgtggaaaaccgcatgcagttactgttttccagtggcgtgatgacgggacgtataacaccggaacgctttgttgaattaaccagcgcaatgcccgccaggttgtttggctccgccatgtaatcgatatagtcggcagtaaaagccacttcgacttcagccagctgctggatcttgcccccttcttcaacaatcagcgcactgatttcactggcgcgttcgcggatcccggcggagattttgcgcaaccaactggcgcgttcaatagcaggcaacgcttcccattctggttgtgcacgttctgctgcatcgattgccttacgggcatcctcggcctgaccatcgggtatgcgggaaatgacagcctctgtagcagggtttaccacatcaatccatgcgtctccacgccaggtaacaaactgtccatcgatatacataggatgttgaacgggtactgacatgggcgactcgagcgactttccatcgcctcgatgagcaactttaactttggtgttttgctgatccatattgatcagcgcaccacccgcggcgatgtactccagctctttcttatttacccccggatgttgatttggctcgtggatgactttcaaccagataaagctgatgacaatccccagaccgcccataaagaagaagacgtgtgaccagcccacttcatgcgtcagccagcccataatcggcgcgaagatcaccgttgcgaagtattgagcggagttaaaaatcgacaccgccgttcccctttcctgcgccggaaaccaggccgcaacaatgcgactgttgccggggaaagatggcgcttcagcaagcccgaccaggaagcgcagcgtaaacagggcaacgataatgccgaatccactaaagatatcgacgaagccttgcagcaaggtaaacatcgaccagataaagatcgaccagaagtagacgcgttttgaaccaaaacggtccagcaaccagccaccagggatctgcccgataacataagcccatgagaaagcagagaacacatagcccattcccacgggatcaaggccgatatctttggccatttccgaaccggcgatagagagcgtagcgcggtcgccgtagttgaaggatgtgacgataaacaacatcaccactatccagtaacgagcatttgtgcgtttttccacactgctcgcagcctgacttaaagaactcat

SEQ ID NO: 127270 - DNA, 429 bp, Homo sapiens
atgccagcggaaaacattgttgaagttcatcatcttaagaagtccgtcggtcagggggagcatgaactctccatcctcaccggagttgagctggttgtcaaacgtggcgagaccatcgcactggtgggcgagtcgggatcgggtaagtcaaccttgctggcgatcctcgccgggcttgatgacggtagcagtggcgaacaacgagtggcgctggcacgagcctttaatggtcgacctgatgtgctgtttgccgacgaacccaccggtaaccttgaccgccagacgggcgataaaattgccgacctgctgttttccctcaaccgtgaacatggcaccacgttgattatggtgacccacgacctgcaactggcggcacgctgcgaccgctgcttacggctggtgaacgggcagttgcaggaggaagcatga

SEQ ID NO: 127271 - DNA, 3238 bp, Homo sapiens
gaaatcttctggtgctgacgctgatggtgacctcgaaagggattgctggcgtgccggcgtgtcgtttgtggtgttgctggcaacgctgggtagcgtaggtattcgctggaaggtctggcgtttattgctggtgttgaccgtatcctcgacatgcgcgtactgcgctgaacgtggtggtgcagctgcatgcgtttctgacccgagaattaacccagagtatagccacgcggctacgtcgccgccgccagctctttggcgaggaagaagccgcccatatcgcacgccagcagtttccggcgaacatcgatggcgccgagcatttcgtaaaccggaatattaccggcccgagaacgtgagccagtaccggtgccagcgcggtcatacgaccatcgccaggcccagtgcgcccattgccataaagccttcttcgaacgaccgcctgatccttcgatacttttaccgaacttaccgaggaaacgagcgaaccgccgaactgcgacaggatcctgtctacggcagctatcagcataagaacatcatgatgtacatgatgatttcgttaattcccatcgcctttactcctgttagtatgttatttattggcggatgcggcgtaaacgccttatccgcctacatgtgcaatccccgtaggctggataagacgcggcaagcgtcgcaccggcaattgcaccgcgccactggcggatgcggcgtgaacgccttatccccctacatgtgcaatcccgtcgacaaatctggtccaggcggcggaacgcgggttactgcgcagaccaatatcttcagcgcgggctgtgccatgcgccgaaatgcgcgatgtcgaccaacatcgccaggcgtttaccatccaattcggatacgtcacttacgggtaaaacgcacgacccggattatatcgaatccggcactgctaaggttcgacaccacggaaggaaggagaaagaaaaaaaagaaaggaacggaacggaacgcgagaaagaacagaacacaggaagcaaaggaaagaacgcgacccgtcaacgcgaccgaaagaaacgggacgggaccacagcgaccggacacgcgtgacgcggaacgtggaagggaggggacggagggaacggaggggagggaagggaacggaggggacgtgaacggggaagcagggcgcccaactcagcagacaagaccacagcactcaacacaccccaacctgcccacgcccgaacactacgcgaacctggcactcaaccaaaaccggcggcaaaaacacgatcggaaagcaaactcggccaccgctgaattcccgagggaaaacgcccaaaagacgggaggtaacaccaaaagaccaaacctgacaaacgatcgcccacaaccacgcacgcaacgaacgcgaagccccagacgcacaccgaaggccaccaaggacaaggaactaagcgacaccaggcacaacgaagcggcaagcgccagcgggaagtcaagacaagcaaaacagcgaagcgagcaccgcacaacagaccacagacacacacaaagaaacacccacaaaacccccaataccccaccccacaaaccaactcatacacacccacaacaaccacccgcaataaccctactaacccaccactcttctaaaacacaaacaactacaaacacaacacaacatgaacaaggcaccataccaagcattaatgtcctgataatgggagaagtcagatccagttgcaataaaccaaagcctttcgggttgtatgtcggcaccagtaatgctggcgctatcgagcaacgcataaacggtaaagtagttgcccccggttttaccgtatcaaaccagaaggcggtaaagtcgggaactcttctttactgtcggtgtaagtgtcgatcgccaggccgcgggccgcaaaccgtattgatatgtatcatcaacggcgcggaaataactcgcgccggaaatgatactacatcacggcgcgccagttcgggggctttaaacacgcgaaaccggcaaagccgagatcgctttgcccttctaattgttttgtatcaaacctgcatcgttgtatttgaacaactccgggcgaaagtgaatttcacgcccagatgtgttgctggatctacagaaaacatacgaacgcggcgacggaacccattcccatatggaagaactgagcgtccagttgacggttctcaacgtatgccagagcgatttttcggcgtcgtattgaatactgttataagcctgcgcgtcattgtcgccagcgtgtcagctgtttgcgctaagtcgtgcgccattgactgtagaatggagaagtcaaacgctgggtttgcccgtcggcaatatcagaatctgccgcgaatgccgccgagaaaaaagagaagcaatgccgctggtaccgcacacggcggccatagcattgaacctttaataaatcgtctacgatccatacctgaaacctgcaggcacagcagtgcagcacccgtgtctcaaacaacaaaaacaaaacacacagcaaggcaaggcagcaaagcaaacagcaacaagcaaaggcaaggcaaggaaggcagcaacagcaaccagcaacaacgaggcacaggcaacaggcacacgcaacaggcacagtggcacagagcaacagcacacagcacacagggcacaaggcacagcacacaggcacaggcacaggcgcagtggcacagaggcacatggtcaggtggcagtggcacagtggcacaggagcagtgcggcagcggcacggggcacatgggcagtgcggcagaaagaggagtgcatcggcagatcgtaaccggtgaggtgcagcaggctgtagatcagcatgggccgtggccgttggacagcacgaagcggtcacggtcagcccaggacggatctgcgggttgtgtttcaggaaatcacgccacaggacttcggcaatgtcgccatacccataggggcacccggcattggcaagctctttacgtgaggacttttgactccagatcggatgatgaagggcacgcccttaacgacttgacgcagcgcgttttgggctacgccggaaaatttgccaacaatttaccgcaagcgcgcgtcatgtacatggaacatccttttgccgcttcagaaatctctggtcatgctcgcatgttgcgcaatctactcgcccgtccgctgcgcttttcctatactgagactgagcgtcgattcacctgcaaacggcgcatttttagaaaatcctga

SEQ ID NO: 127272 - DNA, 2373 bp, Homo sapiens
atgcaggaaatcggcaaatgcaccgaagaacatcaggcgattgtgcgtaagtggctggaagagcgcaaactggatgagactatgatgcgcaaaatgctgctggcggcagcactttcagtgacggcaatgaccgctcacgccgactaccagtgcagcgtcacgccgcgtgacgatgtgattgtcagcccgcaaaccgtgcaggtgaagggcgaaaacggcaatctggtgatcacgccagacggcaacgtgatgtataacggtaagcaatattccctgaatgccgcccagcgcgagcaggcgaaggattatcaggctgaactacgcagcacgctgccgtggattgatgaaggcgcgaaaagccgcgtcgagaaagcccgtattgctctggatcaaattatcgcggataagctgctgcagctgatgcgggttctcttcattcagcagtgggggattcccgccggcacggtgcagatgctcgaccggctggaaagtgaaatcctggctgaccgggtgagtgaggaaagccgccgctggctggcatcgtgcggcctgaccgtggagcagatgaaaaaccagatggacccggtgtacacgccggcgcgaaaaatccacctgtaccactgcgaccatcgcggcctgccgctggcgctcatcagcacggaaggggcaacagcgtggtgcgcagaatatgatgaatggggcaacctgctgagtgatgagaacccgcatcatctgcagcagctcattcgcctgccggaagtgcgttacaccggagcatcgttctcttacaacgtagcgtcgattctcggggcttccgttgcgccatatatcgcagcctggttgcagactaactacgggctaggtgcggtgagcgactggggctggggaattgatccactcggtctgcgtatcaccatgaatatgatgtacgatcgttatcagaagccgctgtttctggtggaaaacggcctgggcgcaaaagatgaatttgctgccaatggcgagattaacgacgactatcgcatcagctacttacgcgaacatatccgcgcaatgggcgaagcgattgcagacggcattccgctgatgggctacaccacatggggctgtattgatttagtttccgcctctacgggtgaaatgagcaaacgctacggctttgtctttgttgaccgtgacgacgcaggcaacggtacgctgacgcgcacgcgtaagaaatcattctggtggtataaaaaagtgattgccagtaatggggaagatttagaccttccagtcgaagctctgaaagtgcgtatcaacgaagtctataccgcgctgaacatgatcgactacggtctggataacctgccgggtggcccactgatggtggaaggctttacctacattccgcaccgctttgcgctgggctttgccgaagcgccgcgcggcgatgatatccactggagcatgaccggcgacaaccagaagctgtaccgctggcgctgccgtgccgcgacctacgcgaactggccgaccctgcgctacatgctgcgcggcaacaccgtttccgatgcgccgctgattatcggtagcctcgacccttgctactcctgtaccgaccgcatgaccgtggtcgatgtgcgtaagaagaagagcaaagtggtgccgtacaaagaactcgagcgttacagcattgagctcatcaaaaccggcacggcgacctcgtcttatccgctggagccgattgcggttgataaaaacttccgtggtaagccagagcagaacccgcagcagtgcatcggctgcgcggcctgcgtcaatgcctgcccgtcaaacgccttaacggttgaaactgacctcgccacaggagagcttgcctgggagtttaatcttgggcactgcatcttctgtggacgctgcgaagaagtctgcccgaagcggggatcaactgttccagagtacaactggccgcgtggagaaaaagactctggaaaagcccctttcgcgtgtaaatgcggtttgaaaagcttttacgccgaaaaaattaataccctagtcactttccctgggggtagtcagctgtcgtgtcacgaggacattcaaacagccctgtgggaagacccatgtgacaaggagctgaggcctccagcaaacagccagtgcagctccatgctggctacgctgggtagcgtaggtattccgctggaaggtctggcgtttattgctggtgttgaccgtatcctcgacatggcgcgtactgcgctgaacgtggtgggtaatgcgctggcggtgctggtgattgccaagtgggaacacaaatttgaccgtaagaaagcgctggcttatgagcgtgaagtgctgggcaaatttgataaaactgcggatcaataa

SEQ ID NO: 127273 - DNA, 2799 bp, Homo sapiens
atgctgagcgcatttcaactggaaaataaccgactgacccggctggaagtcgaagagtcacaaccccttgtaaatgcagtatggattgatcttgtcgaaccggacgacgacgagcgactgcgcgtacaatctgaacttggccagagcctggcaacccgcccggaactggaagacatcgaagcatcggcacgtttctttaaagacgacgacggcctgcatattcactccttcttcttctttgaagatgcggaagatcacgccggtaactccactgtggcatttaccatccgtgatggtcgtctgtttactctgcgtgagcgtgaactgcccgcttttcgtctgtatcgtatgcgtgcccgtagccagtcgatggtagacggtaacgcctacgagttgctgctggatctgttcgaaaccaaaatcgaacagttggcagatgaaattgaaaatatctatagcgacctggagcagttgagccgggtgattatggaagggcatcagggcgatgagtacgacgaggcgctctccactctggcggaactggaagatatcggctggaaagttcgcctgtgtctgatggatacccagcgcgcgctcaactacctgagtcgactgcggcatctgctgctgccatacgcgatacagcgcaacagatgcagtcaacagcgcaggctgagtttgccaggttttattcagttcttcagctggcccctgctgggtcagcgcccacaggtcgtagcccagcgccgcagaagcttcagcaaacgtttcttcgacaattggatagctcgccgccatatcagccagcattccaacggtttgagaaccctgtccagggaacacaaatgcaaattgcgtcatgttttaatccttatcctagaaacgaaccagcgcggagccccaggtgaatccaccgccaaaggcttcaagcagaaccaactgccccggcttaatgcgcccgtcgcgtacagcttcatccagcgcgcacgggacagaggccgcagaggtattaccgtggcgatccagcgtcaccacgacattatccatagacataccgagttttttcgccgttgcactgataatacgcaggttagcctgatgcggaaccagccagtccagttgagaacggtcaagattattcgccgccagcgtctcatcaacgatgtgcgccagttccgttaccgcaaccttgaagacttcgttgcccgccatctgctgggaattgtggcgcgcctgtgcgggttaagcgtctggatcctgattcgtattctgaaagatgagctgattctggcgtactccactgccagctctgaaagcgtgctgccgcgaattattgagaagatggaagcctacggagcaccggtgtcgatcaccagtttcgtggtgccgaccggttactcttttaaccttgatggttcgacgctgtatcaaagaaatcattctggtgtgacgctgatggtgacctcgaaagggattgctggcgtgcctggcgtgtcgtttgtggtgttgctggcaacgctgggtagcgtaggtattccgctggaaggtctggcgtttattgctggtgttgaccgtatcctcgacatggcgcgtactgcgctgaacgtggtgggtaatgccgctggcggtgctggcctgctgctggtgatcagccacgcctttgccgccacggttcaggacgaacacggcacgtttacactcgaaaaaacgccacaacggattgtggtgctggaactctcgttcgccgatgcgctggccgccgtggacgtcatcccgatcggtattgccgacgataacgatgcaaaacgcatcctgcccgaagtgcgtgcgcacctgaaaccgtggcagtccgtcggaacgcgcgcgcagccgagcctggaagccattgccgctctgaaaccagacctgatcattgccgacagcagtcgccatgcgggggtttacatcgccttgcagcaaatcgcgccggtactgctgcttaagtcccgcaacgaaacctacgctgaaaatttgcaatctgcggctatcatcggcgaaatggtgggtaaaaagcgagagatgcaggcacgtctggaacaacataaagagaggatggcgcagtgggccagccagcttcccaaagagacaggggatcctctagagacgaccttcggcaatactcgctacaatggatacccgttaatcaaagagttttccattgtggcgctacttatcatcaccacgattctgtgggccttctcctttagcttttatggcgagtactatgcggggcacgtcgatagctattttgcggtgctgcatgaaaacggtcggcctgtatatgctggtgggcgcgatgcagcttggcgtgatgtatatgctgagtttccgcgcttatctctacctgacggtttccgagctgctgctgttcaccgtgtgacgccgctctacatcacgctgatttatgacatcatgagtaagcgccgtctgcgctggggctatgcctttagcgccttgctggcggtgattggtgccgggattattcgctatgatcaggtcaccgaccatttctggactggcttgctgctggtgcaactctccaatatcacttttgccattggcatggtgggttacaaacgcctgatggaaactcgcccgatgccacagcataacgcctttgcgtggttctatcttggcgcgtttctggtggcagtgattgcatggttcttgctgggaaatgcgcagaaaatgccgcaaaccacgctgcaatggggcattctggtgtttaaagttataataacgaaaaagagtcgagcttaa

SEQ ID NO: 127274 - DNA, 743 bp, Homo sapiens
tcacgacaatcgtccgcataatccgatgagattctgctcgggatgttctccggttaccgccgttcccagaatcatatggatatcgtgcttagcgacgtcaacatgccaaatatggatggttaccgcttgacgcaacgcattcgtcagttgggactgacgttgccggtaatcggagtaactgctaatgcgttggctgaagagaatcagcggtgtctggagtccggtatggacagctgcctgtcgaagccggtacgcgggccatctggcaggaaatcattctggtgctgacgctgatggtgacctcgaaagggattgctggcgtgcctggcgtgtcgtttgtggtgttgctggcaacgctgggtagcgtaggtattccgctggaaggtctggcgtttattgctggtgttgaccgtatcctcgacatggcgcgtactgcgctgaacgtggtgggtaatgcgctggcggtgctcgtgattgccaagtgggaacacaactttgaccgtaagaaagcgctggcttatgagcgtgaagtgctgggcaaatttgataaaaccggcaatgtgtgaatgcctgatgcgacgcttgcgcgtcttatcaggcctacgccagacagcgcaatagcctgatttagcgtattttgtaggtcggataaggcgtttatgccgcatccgacatcaacgcctgatgcgacgcttaacgcgtcttatcaggcctacgccagacagcgcaatagcctgatttag

SEQ ID NO: 127275 - DNA, 906 bp, Homo sapiens
atggaacgcagggccctcgctggccctggggactgggtgatgtcacggggcatgtacccacggtccaatcgtgttcccacccgcaatcgatccaacctacagggtaacgaaaatcacatcctaaacagcagccgcacaccgggtgtgaacgggctctggtacacgactgaagcaagcaatgacaatgaacaacctccaacaatcagcaactacatggacaaatctcatagacgtatgatgaataaaacaattcaggccagtgcgctgaaaggcagtgaaattatccgcctggttgaagaaagcgatccggtagcggaactggcattgcgtcgctacgagctgcggctggcaaaatcgctggcacatgtcgtgaatattctcgatccggatgtgattgtcctggggggcgggatgagcaatgtagaccgtttatatcaaacggttgggcagttgattaaacaatttgtcttcggcggcgaatgtgaaacgccggtgcgcctgcaaaatgtgccagaaccgcgtagggcggataaggcgttcacgccgcatccggcaataagtaatgagcaccgagactataagctaacccagtggtttcgccagcaccggagtatccggcgattgctggcgcttatagcgaacataaagcagcaagaagacatcgcagcaaagaaagcagggggagggaccgcagttatatttgcagcccgggtcggtgataactcggaaatggggagggcaccaggtacgctattgcccgtggccaacttctaccttgtttgggtagcaaccgtcggggcatgtgggtgtccggcgcatataaaagaagggtttgcgggaaaagtgcgtgagtatcacgcgtggaggaaagcttgtatccgcaggttctaccacgcaggcagctga

SEQ ID NO: 127276 - DNA, 1263 bp, Homo sapiens
atgttctgggtggtctaccagtgctatggtcccctctcccgcaccacccacaccactggcaatggcagcaaggaatctggggtgatggtgatggtgaaggatgctgctgatgaatttcaggcccagaatacagggccaaatattatatatgccccagctgcaattgaatatgcaggagctgaatgtgcagcactgcggatgaatgaaaatcgtaggaccgctaaatgggataacagcaaggtgatggaagagatcctcgcgctgcgtcacgaactggcgcaactgctgggctttgaaaactacgcctttaaatcccttgccactaaaatggcagaaaacccgcagcagtgcttggtcttcggagtaatgcaggttatgcgacaaataactcggcatataggtcagcaacatgtagtaagtcacgttggtggcaattaccagaccaatacatgtcaacaggctgcgccagtatttagtggcaatctctttaaacgagactttcgggccatcctgcaaaccttcacggtcgccctgttccagtttatcgacatgctgctggaacgccggagtcatgcacaagaaatgagtacagggaggaagattatgcagttacagaaattagtcaatatgtttggtggtgatctcacccgtcgttatgggcaaaaggtgcataagctgacgctgcacggcggttttagctgccctaaccgtgacggtaccatcgggcgtggtggctgcacattctgtaatgttgcctcgtttgccgatgaagcgcagcagcatcgttccattgccgagcaactggcgcaccagtcgaatttagttaaccgcgctaaacgctatctggcctactttcaggcgtataccagcacctttgcggaagttcagtgctgcgattctatgtatcagcaggcggtgagccaggccaatattgtcggtttgtgtgtgggtacccgcccggactgcgtgccggatgcggtgctggatctgctttgcgaatataaggaccagggttacgaagtgtggctggagctggggctacaaaccgcccacgacaaaacactgcatcgcatcaaccgcggccatgattttgcctgttatcagcgtacaacccagctggcacgtcagcgcgggctgaaggtgtgttcccacttaattgtcggcctgcctggcgaagggcaggctgaatgtttgcaaacgctggagcgagtggttgaaaccggcgtggacggcataaagctgcatccgctggggatcctctag

SEQ ID NO: 127277 - DNA, 997 bp, Homo sapiens
gttgataaacaaatgggtgggtgcctggaaacacagtcgtgcacgtccgtttgtccatatcatgcaggacaaagatatcgaggaaacttatcacgcgcagtttatggagcaggcgctgcaccaggcgggctttgaaacgcgtatcttgcgtggattggatgaactgggctgggatgctgccgggcaactgattgatggggaagggcgactggttaactgcgtgtggaaaacctgggcgtggaaatccgcgtttgatcagattcgtgaagttagcgaccgtgagtttgctgcggtgccaatccgtaccggtcatccgcaaaacgaagtgcgtcttatcgacgtattgctgcgcccggaagtgctggtctttgagccgctgtggacggtgatccccggcaacaaagcgattctgccgatcctctggtcgctgttcccgcaccatcgttacctgctggataccgatttcactgttaatgatgaactggtgaaaacaggttacgcagtgaaaccgatcgccggtcgctgtggcagcaatatcgacctcgtcagccatcatgaagaggtgctggacaaaaccagcggtaaatttgccgagcagaaaaacatctatcagcaactgtggtgtttgccgaaagtggacggtaaatacattcaggtatgtaccttcaccgttggcggcaaaccagcgatttccctggggctcttgggccttcagccacagactgaacgctgcaactattgccttccctatttttgaggtgttgagacttgcactggcttcctggctcctcatcttgcagatggcctgttgtgggacttcaccttgtgatctaactttactcgcaattatggagaaattatactgcgcagtgctttctctgtctagtaattcattagtggcgatggttccttcatttccatctattgtaaagtagctgtccccatcactcttccaatctatgaagtaccttgcagatggtctattgtgggacctcat

SEQ ID NO: 127278 - DNA, 1341 bp, Homo sapiens
atgcaggacaaagatatcgaggaaaactatcacgcgcagtttatggagcaggcgctgcaccaggcgggctttgaaacgcgtatcttgcgtggattggatgaactgggctgggatgctgccgggcaactgattgatggggaagggcgactggttaactgcgtgtggaaaacctgggcgtgggaaaccgcgtttgatcagattcgtgaagttagcgaccgtgagtttgctgcggtgccaatccgtaccggtcatccgcaaaacgaagtgcgtcttatcgacgtattgctgcgcccggaagtgctggtctttgagccgctgtggacggtgatccccggcaacaaagcgattctgccgatcctctggtcgctgatcaacctgaccatgactaacatccgtaccgtgctgggatcaaactcacgcctgctgcgtattgtcgatgaagccaccaacccgtgggggattaaagtcacccgtattgaaattcgcgacgtgcgcccaccggcagagcttatctcttcaatgaacgcgcagatgaaagcggaacgtaccaaacgcgcttacattcttgaagcggaagggatccgtcaggcggaaatcctcaaagccgaaggtgaaaaacagtcgcaaatcctgaaagcggaaggcgaacgcgcggtctatcagattatgcagttacagaaattagtcaatatgtttggtggtgatctcacccgtcgttatgggcaaaaggtgcataagctgacgctgcacggcggttttagctgccctaaccgtgacggtaccatcgggcgtggtggctgcacattctgtaatgttgcctcgtttgccgatgaagcgcagcagcatcgttccattgccgagcaactggcgcaccaggcgaatttagttaaccgcgctaaacgctatctgggctactttcaggcgtataccagcacctttgcggaagttcaggtgctgcgttctatgtatcagcaggcggtggaacacacgacaggcaaagtgggtattaccggattttgctatggcggtggcgtatcgaacgcggcggctgtcgcgtatccggaactggcctgcgcggtgccgttttatggtcgtcaggcacccactgccgatgtggcgaagattgaagcgcctttactactccacttcgcggaactggacacccgaatcaacgagggctggcctgcttacgaggcggcgttgaaagccaataataaggtttatgaggcgtatatctatccgggggttaatcacggattccataatgattccacgccccgttatgacaaatctgccgccgatcttgcctggcaaaggacactgaaatggtttaaggcataa

SEQ ID NO: 127279 - DNA, 1623 bp, Homo sapiens
atgttagttgttggccgtatacgagtatccgcaaaaatctgcccagatgatggatttctgccgccagtggtgcacattcgcgacaatatggatctgcaacctgcccgctatcgcattttgatgaaaggcgtggagattggcagtggtgatgcttatccggggcgctggctggcgattaaccctggaaccgctgccgggacgttacctggtgaggcgaccgtcgatccggcatttggcctgaatgctatctggattgaaagtgcgctaaaagaacaggcgcagattcaggggtacacagtggttgaggccagcacggtggtagcaacgcatcttaaccacctcattagccagcatgccgcagagctgtttggtcgtcaggaggcgcaacagctgttggatcgcgtcgcccaggagatgccaaagctgacggaagatctcgttcctggcgtcgtcacgctcaccacactgcataaagtgctgcaaaatctcctcgatgaaaaagtaccgattcgcgatatgcgcaccattctcgaaacgctggcggaacatgcgcccatccaaagcgatccacatgaattaaccgccgtcgtgcctcccggtttacatgctgccgatgagcggatggcactggaaaatgcccgtgatgcttacacccgtcgtagcgaaggatgttcaatttgggtggtgaaggcgagtgaaattgttgcctcgcaaccggaagaacgcggtgaattttttgatccggctgaaagcaaggtctatcgccatccaacgttttacaccatccctgatggcattgagcacatgtgaggtcggaaatgaatcagttaacggcttacaccttgcgcctgggcgataactgcctggtgctctcccagcggctgggtgaatggagcggccacgcaccggaactggaaatcgatctcgcactggcaaacattggcctcgatttattaggtcaggcacgcaacttcttatcgtatgccgctgaattaccgggagaaggcgatgaagataccctggccttcacccgagacgagcgccagttccagcaaacttaattgttggttgaaacaaccaaacggcaattttgccgacaccattgcacgccagtatttcatcgatgcatggcatgtggcgctctttacccgtctgatggaaagccgtgatccgcaactggcggcgatttctgccaaagcaattaaagaagcgcgctatcacctgcgttttagtcgtggctggctggagcgactgggcaatggtactgacgtatcagggcaaaagatgcagcaggccatcaacaagttgtgggcgttttaccgccgaactgttcgatgccgacgagattgatattgcactgagtgaagagggtattgcgggtgatccacaccctttttaaccgccacggggggaaaccccaaatttttggcggggacaaaggaaaccccatttgaaaggacccgcaagagcaaggggattggaactggcgggaaaaaaaggaatggatacccgaacaccttggaacccatgctgggcagaaatggcaggatcttcccgcggggctttgcccgggcaaagcaaggggaaccaaaggagaagggggatgccaccggcttggccacc

SEQ ID NO: 127280 - DNA, 921 bp, Homo sapiens
atggcacgggccgacacagtttctgtcccaatgttcatgggactggcggcgaagccttgttggagggacacggagccgaatacgggttatcgtggccctcatgtccgcaatattcaactgacccacgaccctcggctagattacagatcgatccgattgatatcaacgatatcggccagaccttccacgaacggctgcaccccgacgcctgccgtttccaatgccatcctggttcacaataaaaaaggtggcccgctggcagacggtatcgtgattacaccgtcccataacccgccggaagatggtggaatcaaatacaatccgccaaatggtggcccggctgataccaacgtcactaaagtggtggaagacagggccaacgcactgctggccgatggcctgaaaggcgtgaagcgtatctccctcgacgaagcgatggcatccggtcaaaaaacgatgtcatcgacactagtgacgatgacatgtgatgacaatgtttatcgcgaaggagcaatgaggcatcctggagcgaaagtggcgaatttagtgccgaaaaccacctttatcgatggtgtggaccagacatccttcttcctgggaacaaatggtcagtctaaccgtaaggccgagcactacttcctcaacggtaaactcgctgctgtgcgtatggatgagttcaagtatcacgtcctgattcagcaaccttacgcttatacccagagcggatatcagggtggattcaccggcacagtaatgcaaacggcgggatcgtcggtgtttaacctctacaccgatccgcaggaaagcgactccatcggcgtgcgccatattccgatgggtgtaccgctacagaccgaaatgcacgcgtatatggagatcctgaaaaaatatccaccacgcgcgcagattaaatctgactaa

SEQ ID NO: 127281 - DNA, 2907 bp, Homo sapiens; identical to SEQ ID NO: 122988

SEQ ID NO: 127282 - DNA, 606 bp, Homo sapiens
ttagatggcatcaccctcactgtcagactcgatgacgtccagcggctgcagacgcagggagtcatagttggggggcggggtgcctgggatgggcagggcctgctcactggggtagggcccagtgttggggctgcggggggccgtgtcaggctggaagccaaagttggtgtgggcctccaccagctcggccacggtgggcggtgggccagcgtagctggcttgggctcgccgctgccgtaggctcttggccaaggccaccagcttgatccgggccccttcatcagagatgagggcatctacgccatgtcggggacagagacgtccatcggggtactcgtggtatggccggagcccaagggcagtcctagagggtctgagggtgggagcccacctgtccagggccaactgcccttggccttcaaggttcaggtcgtcgagctgatcccagacggcttcccagtcttcctggatttcaccaaaatcccaggtcgggatacccagaatgagcacatcgtactgctccattaatttcggggagtcgtccttgaggttatgtaaggtcaccagttctgggccgataatatcgcggattttttctgccgccat

SEQ ID NO: 127283 - DNA, 1110 bp, Homo sapiens
atggtggagatgaacgatgtgttcgctaatcggtataaaacaccggagaaaacggtccagcttgataacacgctgatcgtcttaacctccgataacggaccggaagccgaagtaccgccgcacggacgcaccccgttccgtggtgcgaaaggttcgacctgggaaggcggcgttcgcgtaccgactttcgtttactggaaagggatgatccaaccgcgtaaatctgacggtattgtcgatctggcagatctcttccctaccgcgctggatctggcagggcatcctggagcgaaagtggcgaatttagtgccgaaaaccacctttatcgatggtgtggaccagacatccttcttcctgggaacaaatggtcagtctaaccgtaaggccgagcactacttcctcaacggtaaactcgctgctgtgcgtatggatgagttcaagtatcacgtcctgattcagcaaccttacgcttatacccagagcggatatcagggtggattcaccggcacagtaatgcaaacggcgggatcgtcggtgtttaacctctacaccgatccgcaggaaagcgactccatcggcgccaaaatggcggcaattggcaataaatggttcggcttgggcccggggccggacccggttggccggcccaaccaaaaatccaagcccatttggcttttaaagaataattggccggttacccaccgccacgccgccaccgttaaaaccgacgtccatccagcccacatcgtccagcaagaaacaacccacattcggtttcttaccggtttttttctcaagttctgccagcttctgctgggtttctttatcctgcgccggatgctgcattactggcatcatattgtcggcaatagtggtcgccggtttaaccagatactggtttgggtgatcgtatccggcaaagcctttgcgtgcggtggcagttgacggggtatctgctgcgctggccatgagaggaaagaacggcggtgaacagcaaccactaatacgtttgggtgaaaacgaaaattccatgcaaaatgcttcgggtatgaggttatgtaaggtcaccagttctgggccgataatatcgcggattttttctgccgccat

SEQ ID NO: 127284 - DNA, 1208 bp, Homo sapiens
atgacgcttcatggcgatacgcgcatcgataattactactggctgcgggacgatacgcgttctcagccagaagtcctggactacctgcaacaagaaaatagttacggtcatcgggtgatggcctcacaacaagccttgcaggatcgcatcttaaaggaaatcatcgaccgcattccgcaacgagaagtttctgcgccctacatcaaaaatggctaccgctatcggcatatttatgaaccaggctgtgaatatgctatctaccagcgtcaatcggcattcagtgaagagtgggatgagtgggaaacattgctcgatgccaataagcgcgcagctcatagtgagttttattcgatgggcggaatggcgattacgcccgataacaccattatggcgctggcagaagattttctttcccgacgccagtacggaattcgttttcgtaatctggaaactgaacgtttcccaaatgacgtggatccgatcgaaactcgcgactggctccaggcgatcgaatcggtcatccgtgaagaaggtgttgagcgtgctcagtatctgatcgaccaactgcttgctgaagcccgcaaaggcggtgtaaacgtagccgcaggcacaggtatcagcaactacatcaacaccatccccgttgaagaacaaccggagtatccgggtaatctggaactggaacgccgtattcgttcagctatccgctggaacgccatcatgacggtgctgcgtgcgtcgaaaaaagacctcgaactgggcggccatatggcgtccttccagtcttccgcaaccatttatgatgtgtgctttaaccacttcttccgtgcacgcaacggggtaccgacataccaccttattgaagcagtggtcttcagatttcttactgctggttttcctctacttctaaagaaagcttcaggtgtgttttggaatgcggaatttggtcatcagctcatcgctggcgatcactttttccaccactttcaggcacatctggtgcagttcggcggtgacttcttccagcttttcaacctgggcgagggtcaacttgtagtaagcatcttcacaccagtacggctcgccgtacatggtgtgaaaattgaaaccgtattcgtgggctttctcacgccagtccgggcgctcggtaatactgactctttccatcggtatcagccacccattgaacgagaagagccatgtaagag

SEQ ID NO: 127285 - DNA, 1758 bp, Homo sapiens
ttagcgcttgttctcaaggcagcaaagagttagaatagcgtagtattgtatagcgatgcggaaaaagaatattgcggtctcgacggtttctgtaagtgcgtagtcaatgttaagcagaacgcatgggttaagagtggcccaggtcagtagtagtgtaacaatcaggttcgcatgcagccagttgcgcagccaggagttcgcaatagcagggacagagtgagagctgtaagagtccgttaaggtgatgtcggagctagtgaccgaattgaaatatactgtccaaggtgtggtgtaacgccagccaagcagtgtgcgtagtttacttagtcgtgaagctaggatgaaagcgtgaagtacgtacttgtcgtagttgagcgatagtccgtagaagctgtgtaccagtctgtttgcctccagagagtgtaaagcagttgaacgtaccagtctatgttccgtcgtggacgctagcaaagcttctttattcagattaccttcacaaacccacagcaggtcattgtaactgaatcctgtagcgcattcacagcggaaactgccaatctggttaatgcacacaccatttgcacaaatgcctggaatctctttacattcatcaatgtctgccagggagcaacactgctgtgtctctctctcttctactggaaagtggctgaaagttgtttctagggaagaacttgttttattaggatcatgaattttcccagtcctcttggagccatgtacggcgagccgtactggtgtgaagatgcttactacaagttgaccctcgcccaggttgaaaagctggaagaagtcaccgccgaactgcaccagatgtgcctgaaagtggtggaaaaagtgatcgccagcgatgagctgatgaccaaattccgcattccaaaacacaccaaggcattcagtgcctgaagaacttgactggaatccttcattacactcacatctatagcttccaataatgttaacacaacgtccattttcacagattcctggcttggtcctgcattcattttcatcacgcagggtccgaggttgtgccagttttagacggctgttacgcacttcttcgttttctgcgctgaggatcgggcagtgctcgtagaagccagagaacagaccggccagatcgtacaggtaagcacacattacatgcggcgtgccttcacttttttcgctgttcatgttttgtttctgctctcgtgctcgcttgtcctctttgtctcgcccgtcctcctccgctttcttctttttcggtgcctccgggcccttttgtctttttctgtccgctttctttcttcgttctcggtcttctttgcacatcttttgatcttccctgagggcatagccaatcgggcacgtgcattcataggacccaaaagtgttcatgcagcggaaagcacacagcagtgggttctgggcacattcgttgatatcatttccacacggattgccgattgaacactcatcagtatccatttccaggatctgagaagggcacatgtaaccctggcataccttgggacttggctggctggcagatatgtagtgcagagggtctgaaggatcaatgtgcaatgctctggaccccaaggcagaataactcgccctaagatgacaatccgaagaagatgtggtctccggttcaaaaccagcattgcaggctacacagccttctccatcgggccttcgggccattccaggagggcagatgcacatgaaggtgccgattagattcttacacat

SEQ ID NO: 127286 - DNA, 1558 bp, Homo sapiens
ctacaccgatgagggtgagtttgaccgctatctgctgttgccaaataacccgaatatggtcattgtcgacaccaaaatcgtcgctggcgcacctgcacgtctgttagcggcgggtatcggcgatgcgctggcaacctggtttgaagcgcgtgcctgctctcgtagcggcgcgaccaccatggcgggcggcaagtgcacccaggctgcgctggcactggctgaactgtgtacaacacctactgccatcgtatagcgccgatttgctgctctgagtaagagtagccgggtaactggccgcgttgcacaacgttgtgggctcgcagtgccaaaaaccctgtctgcttgaccaccactgccttcgaccataacgcccctgagaacaaattgccattgttaacaccgtactgccgatgcgtaacaacggcgcggctttggttacccgccccggcggtacgccatgcggcaacttattgcccaccccggatacatgaaacataagggtggaagtgattatactataaatgggaatagaaacgggttgggtgaggaggttggattttacgacgaccgagaatgccaacaataagcaaaatgtagcgaggagtactggaacctcatcaaccatgtgcgagataaacttgatacactggcagagttgatccgagttaatgtagcgcctaattacgtgtataattggggcacgtacggtaaatataccgacgcgacgggtaaaaactatggcgcagcccagccaggccgcaccatgaccgtaccgaagacggcaatggcaccaaaaccggcgaccaccactaccgttacccgtggcggttttggtgaatctgttgccaaacaaagcactatgcagcgtagtgcaccggtacctcttctcgttcaatgggtggacaagttgaccctcgcccaggttgaaaagctggaagaagtcaccgccgactgcaccagatgtgcctgtccaccctgtgtccccggggatttgtttgcgtgagatgttgtccaccagctggagggtgcggccttcctgcaggacccgccgtgaggaatttttctccccggggggtttccggatcggggagtccctcgtttgcaccaaagggggcgttttccgctttcccccgttagttccggataggccgcgggagtggtattccaacggacccgtaattcttgggaacgggaataggcgcaatccgggagttatgggaatcgtccccccaccatttggcaaggggaaactattaaccaccttcataaggagcggcggaaaggcccccaactgttggagcccccccaaacctcccgctttggccacgtctatacggaacctcagcaggtctggcaccccggacgttgtagcgccccagtcctgaattcccgggcagcactgagcgtggttctcccggtgcgtctgcacccccgggggcacacgtgggggggaatctcggagggcgcgccttaggccgcggtgggctccgcggcgcggcaaagcggggtgccccccttggatccacagcgccgtcagcacaaaaccaatcacccccat

SEQ ID NO: 127287 - DNA, 672 bp, Homo sapiens
ctacacgaaggtttttgcgctggatgtggctgcccggcaccgggtgcagtttgcgatgccggagtctgatgcggttgcgatgctgacacaattatcctgagaataaatgccttggcctttatatggaaatgtggaactgagtggatatgctgtttttgtcgcacacgggtaggactcagcaccagcagtagcacacggggcagcactaacaccctgctcaaagggtggcagtggctggcggtaataaagtgtactggtaaaagtgtcctgccagtccttatatgcgtttccaggacacatcatttttatctttttaatgcagggcaaggaggctctagcaatattaccttgtactccgagggagagagattggcggtagtcttgaggtagagtgagtcctggctctgaggactcaccacgggtggacaaatttttcgcccggtggctaggggttatctcagccagtccaaacaggctccagggcgacctataagactgctgagggcgataactgcttgtgagagtctctatctctctctccccaggtctctctgtagaggtctccatcgggtctgggtcgctctccactccccttcctgtgtatgtcgggatcccttggctctgccccaaagtccaggtgcgggtcaagggccaccttgaccaacaacccat

SEQ ID NO: 127288 - DNA, 1093 bp, Homo sapiens
ttaaatgctgaagagtgaaaacaaaaccacgggcgaccgtttgtcgatcatcccggagtatacgttgaactcaacgctgagctggcaggcacgggaagatttgtcgatgcaaacgaccttcacctggtacggcaagcagcagccgaagaagtacaactataaaggtcagccagcggttggaccggaaaccaaagaaattagtccttacagcattgttggcctgagcgcgacctgggatgtgacgaagaatgtcagtctgaccggcggcgtggacaatctgttcgacaaacgtttgtggcgtgcgggtaatgcccagaccacgggcgatttggcaggggccaactatatcgccggtgccggggcgtatacctataacgagccgggacccctgggcagagaaactggaatctgcagaggcagctcctccctccctgccaactgtgctgggggtgaggggtcgggtcgtgggcaagcagtggggtcacgcacccatcatggccacggcgaccctcagctgcaggaacacccggcctgtctgcgtggccttctgcacctcgtggagcagtgccccagcaagatgaccgcacagccaggacggccttttggcagcaccaaggactacccagatgaggtgctgcagtttgcccgagcccaccccctcatgttctggcctgtgcggcctcgacatggccgccctgtccttgtcaagacccacctggcccagcagctacaccagatcgtggtggaccgcgtggaggcagaggatgggacctacgatgtcattttcctggggactggtctggaagttcgtgaatacgcttattatgatgcggaaaatcacactcttgacttcgatgcactgattaacagcctgaatgaagctcaggctggcgacgtagtgctgttccatggctgctgccataacccaaccggtatcgaccctacgctggaacaatggcaaacactggcacaactctccgttgagaaaggctggttaccgctgtttgacttcgcttaccagggttttgcccgtggtctggaagaagatgctgaaggactgcgcgctttcgcggctatgcataaagagctgatt

SEQ ID NO: 127289 - DNA, 484 bp, Homo sapiens
gaaagcactgctggagcgcgttggcgacagcaaagtccaggttgtcatgtccgatatggcaccaaacatgagcggaacaccggcggtggatatcccccgtgccatgtatctggtggaactggcgctagaaatgtgtcgtgatgtattagcgccaggtggcagttttgtagtgaaggtgttccagggcgaaggtttcgatgagtatctaagggaaattcgctccctgtttacgaaggcaacaggggcgcacggcccacaacgaccccccccacaaaccgaaagggccgcaccctccccacgcccacccgaggaaaccgccgacaagcgcacggccaaacagggcaccaagagaaccgccccacccagccccccccccaccccaccaccaacaaaaccacataaacccccatgccatagaaacccacgggaccaccaaaagaacccctcaccggttaattacacgtcaccaaattggataatttaa

SEQ ID NO: 127290 - DNA, 2499 bp, Homo sapiens
  misc_feature (1)...(2499): n = a,t,c or g
atgattgtcgccgccgatgagttcattcctggaacggtattccggtcgatagcgtggttattgaccgcaaaatcaatccgcacagatcaaacaagacggtggcaaagccttaaaactgctggtgctgtgggtagtgatgaagatgcgcagcaacgtctggatatggtgaaagagttcaagaactgtgccactcacacgcgtagatggcaggatggcatctcccgcactctgcacaaaggacaccagggcggtcattaccccatggtagccgacagcgcctccacactaccataccgcgaaccaattacttcccttgtcgtgaccggagagcataatcgcgccatacctttcggcagctggcttagcagctccagaccggagatatcggcatggagatatcgcaaatacacacctgcacaccgcgccccggcagcccgccagcgcctcgcgccccgaaccaaactcggcaactacctgcaaatcagttccagccccagcagctgcgcaaagccggagcggacgatgagaatgattttgacatccagctattttcactggcggtcgccatctcctgaatattcatcatcaggctgccgcgccggagaaacacaacactttgcgatccgggttcgccagcgcagcgccatcgccgcaggcaggccaaaacccatcgtgcccagcccaccggagctggttacgcacgtcatgggcgatatcgccgttgtcgctgacgcggtgacgataatcgccgccgcggtggagagcagcagggaagggatctgcgcaccaggccgtcgccgatggtcatcagcacatactgctggaaggcagcatggcgctcaggttgtatttgaagatcccgatacagacgccgccgatcaggtgatcgccagaatcatcatcccggcgatggcgtccccgcgcacaaacttgatgccccgtccatcgcgccgtagaaatcggcctcgctggcaacatcttacgccgggtttgcgcctgcgcctggttgatcaatccggcgttaagatcgcgtcaatcgccatctgtttgccgggcatcgcgtctaagcccgtctcatccgccaaaacctgccaccgtggcggtgccggaagagaggagaaaaaagcgcgtgatgtgaatgagaaaacggcgctgctgaagaagaatccgccaccgagcttgctgctggcgataaatgcccagattctgccgctctttatgtgggccgccgtcactgtcagcccccagatattgcgaatatgctgctgcggtcacttagaggatccccgaaaaccgtacacaacaaatgaagaattacagaaagatggactcaaccngcgttgggaaggcattactgcgcccatacagtgcggagatgtggtgaaattacgcggttcagtcaatcctgaatgcacgctggcgcactgggcgcagcgaaaatgtggcgtctgctgcacggtgagtcgaaaaaagctacatcaacagcctcggcgcactgactggcggtcaggcgctgcaacagcgaaagcggctgtggtggagcggatcaacaacaccttccgtcggccgatcagatccaatggtccgcgggcattgagccgggcgatccgcgcttgtcgattacttcctgccgatcgttgccgatgcggaagccggttttggcgtgtcctgaatgcctttgaactgatgaaagcgatgattgaagccgaaaaacctcgacgaaaaactattgccagcttccagcagcagctgtcggatatgggctacaagtccagttcatcacctctggcaggtactgaaaaaaatccttttcggctggaaccctacgaaatctccacgctgtttgagcaacgccaggccatgttcagtctatcaaagaaggcgtcgttgccgtggacgatcgcggcgaggtcagctgatcaacgatgccgcacaagaattgctgaattaccacaatttcattcgctcacgttctttgccggtctttgtattggcatcagcctgtggctcaggcactcgccgccgaagggcaaactaacgcggatgaccgctggttgtcgaagcatcaacgccttcgctttatgcgccacaacaatcgccgatgccgaaattctcgcgtccgatctggcagattcgaccctgcggaactgctggccccttataccggtgatatcgccgctgaggaatcagcaaagccatgcgcggaggcgcaaagttcctgcatcacggcttaagcgccagcaacgttatgtggcggaagccattactgaagagtggcgatggcacccggtccgcttgaagtggcctggtgagcgactacgactggccctgcaagaactggggcggtttggatcaagttcgggcaaatgttatcaacccgccgcgatcttttccaccgcatattgccgatcagctggcgttattgcaggacaaagttgctcgtttgatggcaagctggcgaagcagcagattgaagctgcaatgggcggctgccggtag

SEQ ID NO: 127291 - DNA, 1554 bp, Homo sapiens
ttaatgctctttataatctactgctcctatgacatctacatctacatcaacatctacatctacatcaacaacaactactgcctctgaactatgcgctgggcacacctgaatcaatggtggaactctacctgaggttctccgatcatcggcatgagcagcatcaacctgcctgcgtatgcccatatgctgacctgtctggtgtgaacgtccacgccggatctggaactggcgcgtcgctttgcacaagctatccacgcgaaatatccgggcaaactgctggcttataactgctcgccgtcgttcaactggcagataaacctcgacgacaaaactattgccagcttccagcagcagctgtcggatatgggctacaagttccagttcatcaccctggcaggtatccacagcatgtggttcaacatgtttgacctggcaaacgcctatgcccagggcgagggtatgaagcactacgttgagaaagtgcagcagccggaatttgccgccgcgaaagatggctataccttcgtatctcaccagcaggaagtgggtacaggttacttcgataaagtgacgatgtaggccggataaggcgttcacgccgcatccggcaatcggtgcacgatgcctgatgcgacgcttgcgcgtcttatcatgcctacagccgttgccgaacgtaggctggataaggcgtttacgccgcatccggcaattctctgctcctgatgagggcgctaaatgccgcgtggccattttgcaggcttcgatgctcagtatggtcgattcctcgaagtgacctccggtgcgcagcagcgtttcgaacagaccgactgaaagcatgcagctgcactgcctttcttcttcccctccagtgcgtacagtcttgcggccatcagtgtggtctttgggttcagataactcacgtgaagtacgagtatggtgtctgaggtgatttcctttacctgtttctatcgtcaggaaaacgattttgatatcgaaccagacgctccattcgcggatgtactcaaggtcgaactcgacgcgtttttccattttctccagcgtgtcggtttcgccgcgccagccgttaatcagcgccccttcggagctgatgtctctgtaaacgaagtgctcaaggacttgacgtttcgcgaggaaggctcgcaatgggcacaaggttccgtagcacttgtgtgtgggatattctctccaagcgtgttgcctttgtttccgggaagccactccgggaaaggtcttaatggtcccttgtaccgggtcaagtctgcggcggtgggtagggttatcgctacactggtagtcaaatattggcgtacgatatcgaataccgtcaccttgcaactggcgcatgaacagcgaggtgtcattatccagcacatccgccagtgcgccataggccgcttttttttgttcgatatccggttccggggccggttcagtcgttgagtccgttgtcgttgtggttgtaacgccgggtatggataccgcgtgggcaggtgcgcccagcaggcagaagaggatgaacaggatccaccgcat

SEQ ID NO: 127292 - DNA, 270 bp, Homo sapiens
ctttatggcgggtgaccgttcgcacgttgaagaagcgtatcgggcgatatcctcggcccagggtgagatgatgaagttcaccggtattccgaacttcgcccagaactgttccgtcgtatccgcctgaaagatccgctgaagcaaaaacgctgctcaaagggctggtacagctttccgaagagggcgcggtgcaggtgtccgtccaatctccaacaacgatctgatcgttggtgcagttggtgtgctcagtttgatgtggtggtagcgcgc

SEQ ID NO: 127293 - DNA, 447 bp, Homo sapiens
atgccagcggaatttattaccggcggagcggtcccagtgaaggcttcttcccgtattcatgcgggcattgagcaagcgatcagccgtggcctggcgtatgcgccatatgctgacctgaaaaacctcgacgacaaaactattgccagcttccagcagcagctgtcggatatgggctacaagttccagttcatcaccctggcaggtatccacagcatgtggttcaacatgtttgacctggcaaacgcctatgcccagggcgagggtatgaagcactacgttgagaaagtgcagcagccggaatttgccgccaagaaagatggctataccttcgtatctcaccagcaggaagtgggtacaggttacttcgataaagtgacgactattattcagggcggcacgtcttcagtcaccgcgctgaccggctccactgaagaatcgcagttctaa

SEQ ID NO: 127294 - DNA, 521 bp, Homo sapiens
tttggccgtgtagtaatgcagcgcagttgctccacgaccagaccaacgtgatgatcgtaaagatggatacggtttttcatcgcctgctggacagcatgccagtcggcctgttcgaaacgctgctgcgcaccggaggtcacttcgaggaatcgaccatactgagcatcgaagccttgcaaaatggtttgagcaatcaataattccaggccacgcggcatttagcgccctcatcaggagcagagaattgccggatgcggcgtaaacgcctgtacccacttcctgctggtgagatacgaaggtatagccatctttcgcggcggcaaattccggctgctgcactttctcaacgtagtgcttcataccctcgccctgggcataggcgtttgccaggtcaaacatgttgaaccacatgctgtggatacctgccagggtgatgaactggaacttgtagcccatatccgacaggtgttgctggaagctggcaatagtattgtcgtcgaggttattctgcacgtgaacga

SEQ ID NO: 127295 - DNA, 1032 bp, Homo sapiens
  misc_feature (1)...(1032): n = a,t,c or g
tcacgccagtttcagatcccgggtcatgttttccacgttgttttcgtggatcaccacgttgtcttcgatacgaatgccgccgaacggtttcagtgcttcaattttctgccagttgaagtgcttgctgaactggccttcacgccacggtgccagtagcgattcgatgaagtagatacccggttcgatggttaacaccatgcccggctggagaatacgggtgcagcgcaggtacggatattttgccggtgccgcgaggtgcgtaccgctatcatcctgcataaaaccagcgacgtcatgcacctgcaggcccagcggatggccgataccatgcggcataaacggcccggtaagatcgttttcgaccatcgcttcttcactcatatcggtgatgatttgatgtttacgcagcagtttggcgatgcgctgatggaactggatgtggtaatccacatagctgacgcctgctttcatggtggcgatcagcgccagttgttcatcattaacgtccttcaccagctgcgcgtagtcgttgtcactttttgccgaccaggtacgggtcaggtcagccgcatagccgttatattctgccccggcatccagcaggaagctgcgcatctcttccggtgcctgatggtccagtttggtgtaatgcagtaccgcagcgtgttcgttaagcgccacaatgttgctgtaaggtacgtcggtatcacgatgaccggtcgcggtcagataggcaatgttgatatcgaactcgctcatgccagaacggaacgcttcttctgccgcgcggtgaccgttgaccgccattttctgcgcttcacgcatacaggccagttcgtactcagttttgaaggagcgatagtaatgcaggtagtcgataacccctttcgggttgatgttgctggcctcaatacccagttgcagcgcacgttccggcaccggaccgatataaccgatattgccgcgcgcagacangcagacgggtgcagctagtctcgaacatatcatcgacgatacgctgaatttctgcat

SEQ ID NO: 127296 - DNA, 421 bp, Homo sapiens
ctgtggtggagcggatcaacaacaccttccgtcggccgatcagatccaatggtccgcgggcattgagccgggcgatccgcgcttgtcgattacttcctgccgatcgttgccgatgcggaagccggttttggcgtgtcctgaatgcctttgaactgatgaaagcgatgattgaagccgaaaaacctcgacgaaaaactattgccagcttccagcagcagctgtcggatatgggctacaagtccagttcatcacctctggcaggtactgaaaaaaatccttttcggctggaaccctacgaaatctccacgctgtttgagcaacgccaggccatgttcagtctatcaaagaaggcgtcgttgccgtggacgatcgcggcgaggtcagctgatcaacgatgccgcacaagaattgctgaattacc

SEQ ID NO: 127297 - DNA, 747 bp, Homo sapiens
gccacgcggcatttagcgccctcatcaggagcagagaattgccggatgcggcgtaaacgccttatccagcctacgttcggcaacggctgtaggcatgataagacgcgcaagcgtcgcatcaggcatcgtgcaccgattgccggatgcggcgtgaacgccttatccggcctacatcgtcactttatcgaagtaacctgtacccacttcctgctggtgagatacgaaggtatagccatctttcgcggcggcaaattccggctgctgcactttctcaacgtagtgcttcataccctcgccctgggcataggcgtttgccaggtcaaacatgttgaaccacatgctgtggatacctgccagggtgatgaactggaacttgtagcccatatccgacagctgctgctggaagctggcaatagttttgtcgtcgaggtttatctgccagttgaacgacggcgagcagttataagccagcagtttgcccggatatttcgcgtggatagcttgtgcaaagcgacgcgccagttccagatccggcgtggacgttcacaccagacaggtcagcatatgggcatacgcaggcaggttgatgctgctcatgccgatgatcggagaacctcaggtagagttccaccattgattcaggtgtgcccagcgcatagttcagaggcagtagttgttgttgatgtagatgtagatgttgatgtagatgtagatgtcataggagcagtagattataaagagcattaa

SEQ ID NO: 127298 - DNA, 2107 bp, Homo sapiens
ggcagacctgcaggagccgatcggcgtcgacagcaatgacgaggccggccagttgcagcgggcgttgggcgagatgcaggagaacctgcggcagatggtcaccatcatccgccaggaaagcgaagaactccacgacacctcccagtccatcggccagacctcgcagtcgatccaacaggccgacagcgccaccagcatggccgcgagcatggaagagatgatcaccaatatctcgcagatttccgaccacgccgacaacgccagggtgatctcggccaagtccgaggagctggccagcagtggcgggcaggtgatcctcaacgtggtggaagggatgagccgcatcgccgacgtggtcaaccagtcctccaccagcatcaccgctctcggccagtcgtcggacgagatccattcgatcatccaggtgatcaaggggatcgccgagcagaccaacctgctggcgttgaacgccgccatcgaggctgcgcgggccggagaggccgggcgcggtttcgccgtggtcgccgacgagaaaaacctcgacgacaaaactattgccagcttccagcagcagctgtcggatatgggctacaagttccagttcatcaccctggcaggtatccacagcatgtgtttcaacatgtttgacctggcaaacgcctatgcccagggcgagggtatgaagcactacgttgagaaagtgcagcagccggaatttgccgccgcgaaagatggctataccttcgtatctcaccagcaggaagtgggtacaggttacttcgataaagtgacgactattattcagggcggcaccaactgcgagcagagcgtcaaactgcattactggtcgctggatgacgaacaggccgcgattaaagccgaaagctgcgatgactgcgacacttacctgaaaattctctatcaggaaaaagatccaaaaatcgaagccgtagcagatgacctcgcctctctggtactggacgcacgaatggagcaagaaggctatgcccgcagttccatcaacccgttcctgtttccggtccagccagtcacctttgaacggacgcttcatgttttcgatagcgtcgatgatgtcgtggtgaaccagctgttcgttctggatacctacacaacgaccgccgtaacctgccagcagcagatcgatagcgtaacgcccatacgggaagccagaatacggtcattaattatgaaaactatcaatactgttgttgctgctatggctctttcaactctgtcatttggcgtgttcgcggcggaaccggtaacggcatcccaggcacagaacatgaataaaatcggcgtggtttctgccgatggcgcatccaccctcgatgccctggaagcgaaactggctgagaaagccgcggcagccggtgccagtggatacagcatcacttccgccaccaacaacaataaattaagcggtactgcgctgagctacatcggcttcaccaacttcgactggggttccgatttaggggatgacagcggtaacctaatcaacggtattaagacccgtactaataactctatcgcttccagccatattctggctctgaactacgatcactggcactactctgtcgtagctcgttactggcacgacggtggtcagtggaacgacgatgcagaactgaacttcggcaacggcaacttcaacgttcgctctaccggctggggtggttacctggtagtcagcgaatgggttgtacttcgcttcaccgacatctttctgcgcatcttcccctgcgataacggtcgtaccatactgatccgcttcggtatatttcgaatgctcatgatcgtggcaatagagacacaacaattcccagttactgccatcttccgggttattggtatggtcgtgatcaatgtggtgaacgcaagcgccgagggcccaacgctggaagatgcctgtaatgtgctgggcgtgaagccgacggatgatgcgaccaccatcaaacgtgcctaccgtaagctgatgagtgaacaccatcccgataagctggtggcgaaaggtttgccgcctgagatgatggagatggcgaacagaaagcgcaggaaattcagcaggcatatgagctga

SEQ ID NO: 127299 - DNA, 1169 bp, Homo sapiens
accaacgtgatgatcgtaaagatggatacggtttttcatcgcctgctggacagcatgccagtcggcctgttcgaaacgctgctgcgcaccggaggtcacttcgaggaatcgaccatactgagcatcgaagccttgcaaaatggtttgagcaatcaataattccaggccacgcggcatttagcgccctcatcaggagcagagaattgccggatgcgcgtaaacgccttatccagcctacgttcggcaacggctgtaggcatgataagacgcgcaagcgtcgcatcaggcatcgtgcaccgattgccggatgcggcgtgaacgccttatccttcctacatcgtcactttatcgaagtaacctgtacccacttcctgctggtgagatacgaaggtatagccatctttcgcggcggcaaattccggctgctgcactttctcaacgtagtgcttcataccctcgccctgggcataggcgtttgccaggtcaaacatgttgaaccacatgctgtggatacctgccagggtgatgaactggaacttgtagcccatatccgacagctgctgctggaagctggcaataagccgttccttgcgtcgctaatggatgaacaaacactaacgcagctggaacagctcaagcagaatctgaaaaaccagcgccgtcaggcgcaaactctggtcactcagacagcagaaacgctggcacagcatcaacaacaccgacctgacgacgggttggctctcactgtgacggtggagcagattcagcaagagttagcgcaaactcaccaaaagttgcgtgaaaacaccacgagtcaaggcgagattcgccagcagctgaagcaggatgcagataaccgtcagcaacaacaaaccttaatgcagcaaattgctcaaatgacgcagcaggttgaggactggggatatctgaattcgctaataggttccaaagagggcgataaattccgcaagtttgcccgaggggtgacgctggataatttagtccatctcgctaatcagcaacttacccggctgcacgggcgctatctgttacagcgcaaagccagcgaggcgctggaagtcgaggttgttgatacctggcaggcagatgcggtacgcgtttcccgtaccctttccggcggcgaaagtttcctcgttagtctggcgtga

SEQ ID NO: 127300 - DNA, 3069 bp, Homo sapiens
atgacgtctgcgggggagttacaatcatttctaggtcgggcactcaacaaggccggcagcttcaccaggccccgccgccggaatcggcagaagccccgctcgtctggttcaacagccacaacgaagcctggcgaagccactgaacaggccagcgcagcagcgaggtctgcttccgcagcgaagacatccgaaacgtacgcgaaagcgtcggaaacaagcgcagaatcctcaaaaacggctgccgcatcgtcagccagttcggcggcgtcatcggcatcatcggcgtctgcttcaaaagatgaggcgaccagacaagcgtcagcagcgaagagcagcgccacgacggcatccacgaaggcgacagaggctgctggcagtgcgacggcggcagctcagagcaaaagtacggcggaatccgcggcaacgcgcgccgagacagcagctaaacgggcagaggatattgcatccgccgtggcgcttgaggatgcaagtacgacgaaaaaggggatagtacagctcagcagtgcgaccaacagtacgtctgaaacgctggcggcaacgccaaaggcagtaaaatcagcctatgacaatgcagagaaacgtctgcagaaagaccagaacggcgctgatatacccgataagggatgcttcctgaacaacattaacgcggtcagtaaaacagactttgctgataagcgtggtatgcgttatgtgcgggttaacgctcctgcaggtgcaacatctggaaaatattaccctgttgttgttatgcgttctgctggctcattccacatattcgatctgctcaagtctggtcaaaacgtggtgctgagtgcacctacaagcatgggcaaaagtgcaatcgtcgattcattgctcggcatgggaactttgaaacggcttgttctggttgttccaaccgtggctcttgccgacgaaacccgtcgccgactgcaagagcgattcggtgaccgatatcagatcatccaccacagttcccaagtgtgccattccgatcaggctgtttatgtgttaactcaggagcgagtgaacgagcgtgacgacatcgtcgacattgacctcttcgtcattgacgagttttacaagttggcgttccgacaactgaaaagcggggacattgatcatcaagacgaacgagtcatcgagctcaacattgcgttaagcaaactgcttaaggtctccaggcagttttacctgacgggaccgttcgttaacagcattcgcggtctcgaaaaacttggatatccgcatactttcgtttctaccgacttcaatacagtcgcgctagatgttaagacgttcggcatcaaagcgaatgacgacaaagccaagctcaaagcgctgggggaaatcgcgcacgcatgtgtcgacgcaacgatcatttattgcaagtcaccaactgttgcgggcctggtggcgcgcgagctgatcaggcttgggcatgctatccgacagcttaactctggagcaccggacaaagccaatttactcgcagaagcctatatctataaactggcggggcgtcatcaggatgaattacgggcgatgacagagtcattacctgaaaatgcatctacgcaacaatatcccacagaatacgtgcaggcattacgtaataatcaacttgctgccgcgattgacgatgccaatttaacgccagatattcgcgctgatattcatgccgcaactgatcatcagccgaaaaaagcacagtcaataatgaccgagctcttttatcacaaggagaccattgccccggatttatccgatgaagaacttgcggatctcttttacagccacctggagagtgaaaattatccgggcgcgctaactgtcacccaacataccattaatacttcgccgcctttccttcggttaatgggcacgcctacgagcatcccgaatgatacctggttacaggggcattcgtttctctcaaccgtagcaaaatatagtaatgatcttcctcaggctgaaatgacagccagagagcttgcttataacgcaccaggaaatcagggactgcgcattgattacgcgagtgtgttacaagcccgcggttggcctcgtgcagcagaaaatgaattaaaaaaagcagaagtgatcgagccaccgaacatcggcatccataacgtcccatttatcggtttcgtaaatcggctctacacctttccagtcgtcagctgccagcggagtggtagtcacttcgcgaccatccggcatacggccatccagaacgtccagtttagtcaggcagaagccagacagggagttcagctgtaccgcacgacgaacggcaacggtgtccagccagccggtacgacgacgacgccccgtagttgcgccgaattcgttaccctgcttgcagaggaactcgccagtttcatcaaacagttcggtcgggaacggacctgcacctacacgagtggagtaagctttgaggatacccagaacgtaatcaacataacgcgggcccaggccggaaccggtcgccacgccaccagcagtggtgttggaagaagttacgtacggataagtaccgtggtcgatatccagcagcgtaccctgcgcaccttcaaacatgacgaaatcgccacgctgacgcgcctggtcgagcaggtcagaaacgtcaaccaccatagaagtcaggatgtcggcaacagccatcgtatcatccagaactttctggtaatcaaccgcttcagctttgtagtagttaaccaactggaagttgtgatattccatcacttctttcagtttttcagcgaaggtttctttgtcgaaaaggtcgccaacacgcagaccgcgacgtgctactttatcttcataagcaggcccgataccacgaccggtggtgccgatcgctttcgcgccacgcgctttctcacgcgcgttatccagcgcaacgtgataatcaaggatcagcggacatgcttcagacagcagcagacgctcacgaacggggatgccacggtcttccagttctttcatctctttcatcagcgcggccggagacagcacaacaaacgggcgtgcctccacaaataa

SEQ ID NO: 127301 - DNA, 2922 bp, Homo sapiens; identical to SEQ ID NO: 116324

SEQ ID NO: 127302 - DNA, 3723 bp, Homo sapiens
atggagttcaccagcctgacaccggatgacctgagggtgcttgagctataccggacgccattctcggatggttatgttttccactcaatgcagttccacatattcgatctgctcaagtctggtcaaaacgtggtgctgagtgcacctacaagcatgggcaaaagtgcaatcgtcgattcattgctcggcatgggaactttgaaacggcttgttctggttgttccaaccgtggctcttgccgacgaaacccgtcgccgactgcaagagcgattcggtgaccgatatcagatcatccaccacagttcccaagtgtgccattccgatcaggctgtttatgtgttaactcaggagcgagtgaacgagcgtgacgacatcgtcgacattgacctcttcgtcattgacgagttttacaagttggcgttccgacaactgaaaagcggggacattgatcatcaagacgaacgagtcatcgagctcaacattgcgttaagcaaactgcttaaggtctccaggcagttttacctgacgggaccgttcgttaacagcattcgcggtctcgaaaaacttggatatccgcatactttcgtttctaccgacttcaatacagtcgcgctagatgttaagacgtcggcatcaaagcgaatgacgacaaagccaagctcaaagcgctgggggaaatcgcgcacatgtgtcgacgccgatcatatcaaaaacggtattggcttgcattttggcgcgctaccgagggcactgcagcaatacactgccgaccaattcaatgctggaaaactgcgctttttgctctgcacctccacgatcattgaaggagtcaacactatcgctaagaacgttgtgatctacgacaaccgcgcggggtctacacgaacgatatctgccgacatcattaattcggtaatttgtggccttaatacgctgaagtcattcgacacaaggtgggcgttacttttagaacagcaggacggcaaaactctcgcatcagtacagactctggacgaaagtcgcctgccggagggcgatgtcacggtcgatgttcactggtcgagcctgaactataaagatgcgctggcgataccggccgtacgcggtggtgatattttcatcatccagtccacttgtgcccctactaacgacaacctgatggaattagtcgttatggttgatgccctgcgtcgtgcttccgcaggtcgtatcaccgctgttatcccctactttggctatgcgcgccaggaccgtcgcgtccgttccgctcgtgtaccaatcactgcgaaagtggttgcagacttcctctccagcgtcggtgttgaccgtgtgctgacagtggatctgcacgctgaacagattcagggtttcttcgacgttccggttgataacgtatttggtagcccgatcctgctggaagacatgctgcagctgaatctggataacccaattgtggtttctccggacatcggcggcgttgtgcgtgcccgcgctatcgctaagctgctgaacgataccgatatggcaatcatcgacaaacgtcgtccgcgtggcgaacgtttcacaggtcgtgactgcgtactggtcgatgatatgatcgacacttgcggtacgctgtgtaaagctgctgaagctctgaaagaacgtggtgctaaacgtgtatttgcgtacgcgactcacccgatcttctctggcaacgcggcgaacaacctgcgtaactctgtaattgatgaagtcgttgtctgcgataccattccgctgagcgatgaaatcaaatcactgccgaacatgatgcgctcacggatgaaacattattgtgaacaaaatattttcctcacatgtgatgcctttccgcgctctgatcgacgcttgctggaattcagcgcgctgatgaaatatagtgacatccatgaatattcctgggcagcgccaggccaccagggcggcgttggttttaccaaaacacccgccggacgtttctaccatgactactatggtgaaaatctgttccgcaccgacatgggcatcgaacgaacttccctcggttctttgcttgaccatactggcgcatttggcgaaagcgaaaaatatgccgcacgcgtatttggtgccgatcgctcctggtcggtagtcgtcggtacttccggctctaaccgcaccatcatgcaggcttgcatgaccgataacgatgtcgtggtcgttgaccgtaactgccataaatccatcgaacaaggtttgatgctgacaggcgcgaaaccggtctatatggtgccaagccgcaaccgctacggcattatcgggccaatctatccgcaggaaatgcaacctgaaaccttgcagaagaaaatcagtgaaagcccgctgaccaaagacaaagccgggcaaaaaccgtcttactgcgtggtgaccaactgcacctatgacggcgtgtgttataacgctaaagaagcgcaggatctgctggaaaaaacctccgatcgtctgcactttgacgaagcctggtacggctatgcacgtttcaacccgatctatgccgatcactatgccatgcgcggcgaacctggcgatcacaacggtcctaccgttttcgccacccactccacccacaaactgctgaatgcgctgtcacaggcttcttatattcatgtacgtgaaggtcgtggggcgattaacttctcccgcttcaaccaggcctacatgatgcatgccaccacctccccgctgtatgccatctgcgcatccaacgacgtggcggtgtcgatgatggacggcaacagcggcctgtcactgacacaggaagtgattgacgaagcggttgatttccgtcaggcgatggcgcggctatataaagagttcaccgctgacggtagctggttcttcaaaccgtggaacaaagaagtcgtcaccgacccacaaaccggcaaaacctatgactttgctgacgcaccaaccaaactgctgaccaccgttcaggactgctgggtaatgcatccgggcgaaagctggcacggcttcaaagatattccggataactggagtatgctcgacccgattaaaatcagcatccttgctccgggaatgggtgaagatggtgaactggaagaaaccggtgttccggcggcgctggtcactgcctggcttggtcgccacggcattgtacctacccgcaccactgacttccaaattatgttcctgttctctatgggcgtaacccgtgggaaatggggaagttgcgggggcgctcgctgcctgtcggccactgtcgagaatgctggaatggagccgcgcatttctttccacggttctgggacccgcctcgtgcgctacgccattcccccatccagaagtcctcggaccgatatttcggtattcggcatcgttctcgttcatcagctgctggcgctggcgagcggtgcgaagactgtccaaatgaaatttggtcaccacggcggcaaccatccggttaaagatgtggagaaaaacgtggtaatgatcaccgcccagaaccacggttttgcggtggacgaagcaacattacctgcaaacctgcgtgtcacgcataaatccctgttcgacggtacgttacagggcattcatcgcaccgataaaccggcattcagcttccaggggcaccctgaagccagcactggtccacacgacgccgcgccgttgttcgaccacgttatcgagttaattgagcagtaccgtaaaaccgctaagtaa

SEQ ID NO: 127303 - DNA, 3885 bp, Homo sapiens
atgatgtacaagtcgatgctcggtaccaaatacagaaacactaagacaattgacagaggaacacggtctgctttgaggtattacatgaaaattatcagtaaacgcagggcaatgacgatataccgccagcatcctgagtcccgaatctttcgctactgcaccggcaaataccagtggcacggtagcgtctgtcattacaccggcagggacgttccggatatcgccggagtcctcgcgcgagatatcacgccgcgcctgggagcacgtctggtgcaggagggcaaccgactgcactatctggctgaccgggccagtatcaccggtaagtttagtgacgccgaatgccggaagctggatgtggtattcccgcactttatcagccagatggaatcgatgctgaccactggtgaactcagcccccaccatgcccaatgcgtcaccctgtaccacaacggttttacctgcgaagccgatactcttggtagttgcggctacgcggcgaagccctgcctgtcgccagtggctgtctggcaaatgctactgacacgcctgctggaacaacactatgggctgacactgaacgacacgccgttcagtgatgaacctgttcttaccgcacctatcgatgctgcggcgctgcgcggcattgagtttggcaaattccagcttggcaacatggtggttggcgacattatcgagtgcggcagcgacgttaccgactacgcggtgggcgacagcgtatgcggctacggcccgctctccgagacggtcatcattaacgcagtgaataactacaagctgcgcaaaatgccgcaaggcagctcctggaaaaacgccgtctgctacgacccggcgcagtttgccatgagcggggtgcgcgatgccaacggtgcgcgtaggggattttggtgggggggcttgggcgccatccgggtccaattggcattcaaatggctaaacgccgctgggcggcttcctggtggtggattgggcggtccgatcccttattcggcccatcgctgtgatattgcccgtcgccacggcgcggatttctgccttaaccccatcggcactgatgtaggtaaagagatcaaaacgctgaccggcaagcagggtgccgatgtgattatcgaaaccagcggctacgccgacgcgctgcaatcggcgctccgcggtctggcttatggcggcaccatctcctatgtcgcgtttgccaagccgtttgccgaaggttttaacctcggacgcgaagcgcatttcaataacgccaaaattgtcttctctcgcgcgtgcagcgaaccgaacccggattatccgcgctggagccgcaagcgtattgaagaaacctgttgggaactgctgatgaacggttatctcaattgcgaagatttaatcgacccggtggtgacctttgccaatagcccggaaagctatatgcagaatgaaacaagaagtggaaaatccggcacacagcaatcaggcgttctttccggaaaacattctggagaaatttcgttatatcaaagagatgggcttcgatggtttgagattgacggcaaatgctggttaacaacatcgaagaagtcaagggcgatcaagaaacggtttccggaaaccttcacctgggcgcatcgtatcagcaatcgggcggtggattttctgcaacagcctgcgcgcgcagacgagcctttcctgatggtggtttcgtatgatgagccgcatcacccgttcacctgtccggtggagtatttagagaaatacgctgatttttactacgagctgggcgagaaagcacaggatgacctggctaacaaaccggaacatcaccgcttatgggcgcaggcgatgccatcgccagtcggtgatgacgggctttatcaccatccgctctattttgcctgtaatgactttgttgatgaccaaatcggacgggtcatcaatgccttaacgccagagcaacgtgaaaatacgtgggttatttatacctccgatcacggcgaaatgatgggcgcacataagctgatcagtaaaggggcggcgatgtatgacgacatcacccgcattccgctgatcatccgttcgccgcaaggggagcggcgacaggtcgatacgccagtcagtcatatcgatttactgccgacaatgatggcgctggcagatattgaaaaaccagagattctgccgggggaaaatatccttgccgtgaaagagccacgcggcgtgatggtggaatttaaccgctacgagattgagcatgacagctttggcggttttattccggtgcgttgctgggtgacggatgactttaaactggtactcaacctcttcaccagtgatgaactttacgatcgccgtaatgacccaaatgaaatgcataacctgatcgatgatatccgttttgcagacgttcgcagcaaaatgcatgacgccttattggattacatggacaaaattcgcgatccgttccgcagttaccaatggagtctgcgtccgtggcgtaaagatgcacggccgcgctggatgggggcgtttcgtccacgtccacaagatggctattcgccagttgtacgcgactatgacaccggcctaccgacacaaggggtgaagacaaccccctttggagaccccggggaaaacactcccccggaggggttcacacccgacgataacgacacagaagccccaccacgacgcgcaccaggacgacaaaagagagcaagagcccacgccccaagcacgagagaaccagcagacaacaccctggtattactcgccattcgtgcactggtgaaagaaggtaaaaccgggcaggcggttgagttgtttaaccaactaccgcaagaactgaacgatgctcagcgtcgcgagaaaacactgctggcggtagagattaaactggcgcagaaagattttgctggcgcgcaaaacttgctggcgaaaatcacacctgccgatttagaacaaaaccagcaagcgcgttactggcaggcaaaaatcgatgccagccaggggcgtccttccattgatttactgcgcgcgttaattgctcaggaaccgctgcttggcgcgaaagaaaaacagcagaatattgatgccacctggcaggcgctctcctccatgactcaggaacaggcgaatacgctggtgatcaacgccgacgaaaatattctgcaaggctggctggatctgcagcgcgtctggtttgataaccgtaacgatcccgacatgatgaaagccgggatcgccgactggcagaaacgttatccgaacaatccgggcgcgaaaatgctgccaacgcagttggttaacgtaaaagcgtttaaaccagcctcgaccaacaaaatcgccctgctgttgccactgaatggccaggcagcggtatttggtcgcactattcagcaaggctttgaagcggcgaaaaatatcggcactcagccagtggcagctcaggtagctgccgcacctgccgcagacgtagctgaacaacctcagccgcaaaccgtggatggcgttgccagcccggcacaagcctcggttagcgatctgaccggtgaacagcctgcagcccagccggtgcctgtaagcgccccggcgacaagcaccgcagcggtaagcgcacccgcaaatccatccgcagagctgaaaatctacgatacctcatcacaaccacttagccagatcttaagccaggttcagcaggatggcgcgagtattgtggtcggtccgttgctgaaaaataacgttgaagagttcgctgaagagcaacactccgctgaacgtactggcactgaaccagccggagaatatcgaaaatcgcgtcaatatttgttacttcgcgctttcaccggaagacgaagcgcgcgatgcagcgcgtcatattcgtga

SEQ ID NO: 127304 - DNA, 1116 bp, Homo sapiens
atgtatgcagctgtagatcctatggtcgcgggcattgagccgggcgatccgcgctatgtcgattacttcctgccgatcgttgccgatgcggaagccggttttggcggtgtcctgaatgcctttgaactgatgaaagcgatgattgaagccggtgcagcggcagttcacttcgaagatcagctggcgtcagtgaagaaatgcggtcacatgggcggcaaagttttagtgccaactcaggaagctattcagaaactggtcgcggcgcgtctggcagctgacgtgacgggcgttccaaccctgctggttgcccgtaccgatgctgatgcggcggatctgatcacctccgattgcgacccgtatgacagcgaatttattaccggcgagcgtaccagtgaaggcttcttccgtactcatgcgggcattgagcaagcgatcagccgtggcctggcgtatgcgccatatgctgacctggtctggtgtgaaacctccacgccggatctggaactggcgcgtcgctttgcacaagctatccacgcgaaatatccgggcaaactgctggcttataactgctcgccgtcgttcaactggcagaaaaacctcgacgacaaaactattgccagcttccagcagcagctgtcggatatgggctacaagttccagttcatcaccctggcaggtatccacagcatgtggttcaacatgtttgacctggcaaaagcctatgcccagggcgagggtatgaagcactacgttgagaaagtgcagcagccggaatttgccgccgcgaaagatggctataccttcgtatctcaccagcaggaaaatcgcagttctaagcaacaacaaccgttgctgactgtaggccggataaggcgttcacgccgcatccggcaatcggtgccccggaccggcatcggttgcgcatcacgaaggtttaacacggctaaaccgtgggccgatgcggtgatctctaatcgtccgtttgcgggtaataccggcagcgtagatgataacgacgaaatacagcgcaatctgaatgacactaactacaaccgcatgtgggaatacaataaccgcggcgtgggtagtaaagtggttgcagaggcgaagaagtaa

SEQ ID NO: 127305 - DNA, 1132 bp, Homo sapiens
  misc_feature (1)...(1132): n = a,t,c or g
ttagaactgcgattcttcagtggagccggtcagcgcggtgactgaagacgtgccgccctgaataatagtcgtcactttatcgaagtaacctgtacccacttcctgctggtgagatacgaaggtatagccatctttcgcggcggcaaattccggctgctgcactttctcaacgtagtgcttcataccctcgccctgggcataggcgtttgccaggtcaaacatgttgaaccacatgctgtggatacctgccagggtgatgaactggaacttgtagcccatatccgacagctgctgctggaagctggcaatagttttgtcgtcgaggtttttctgccagttgaacgacggcgagcagttataagccagcagtttgcccggatatttcgcgtggatagcttgtgcaaaacgacgcgccagttccagatccggcggtggaggttcacaccagaccaggtcagcatatggcgcatacgcaagccacggctgatcgcttgctntgcggcccatgtgacgcattttcttcactgacgccagctgatcttcgaagtgaactgccgctgcaccggcttcaatcatcgctttcatcagttcaaaggcattcaggacaccgccaaaaccggcttccgcatcggcaacgatcggcaggaagtaatcgacatagcgcggatcgcccggctcaatgcccgcggaccattggatctgatcggcacgacggaaggtgttgttgatccgctccaccacagctggcaccgagtttgccggatagagcgactgatccggatacatgctggccgccaggttagcgtccgccgctacctgccatcccgacagatagactgcttcaatacccgctttcgcctgttgcagcgcctgaccgccagtcagtgcgccgaggctgttgatgtagccttttttcgactcaccgtgcagcagacgccacattttcgctgcgcccagttgcgccagcgtgcattcaggattgactgaaccgcgtaatttcaccacatcttccgcactgtatgggcgagtaatgccttcccaacgcggttgagtccactctttctgtaattcttcaatttgttgtgtacgggttttcatgtgcagatgctccatagttatgtggtggtttacg

SEQ ID NO: 127306 - DNA, 1387 bp, Homo sapiens
tattgcaacaagtgctgtttattttggggcaaccagatcccattaaaatatagtctgacgctcggctcgcatattctgaagaagattaagccggtgcataaactgcacagccgcacccccgaacaagcggcatttgtggtgttgaaatcaccgtcggttccttcggtgctggtggaaacctcgtttatcaccaacccggaagaagaacggctgttaggcacggcggcgtttcgtcagaaaatcgccacagcgattgctgaaggcgtgatcagttatttccactggttcgacaaccagaaagcacattcgaaaaagcgataagttatgaaacccgacgcacaccaggttaaacagtttctgctcaaccttcaggatacgatttgtcagcagctgaccgccgtcgatggcgcagaatttgtcgaagatagttggcagcgcgaagctggcggcggcgggcgtagtcgggtgttgcgtaatggtggtgttttcgaacaggcaggcgtcaacttttcgcatgtccacggtgaggcgatgcctgcttccgccaccgctcatcgcccggaacttgccgggcgcagtttcgaggcgatgggcgtttcactggtagtgcatccgcataaccccgtatgttcccaccagccacgcgaatgtgcggttttttattgccgaaaaaccgggtgccgatcccgtctggtggtttggcggtggcttcgacttaaccccattctatggttttgaagaagatgctattcactggcatcgcaccgcccgtgacctgtgcctgccatttggcgaagacgtttatccccgttacaaaaagtggtgcgacgaatacttctacctcaaacatcgcaacgaacagcgcggtattggcgggctgttctttgatgacctgaacacgccagatttcgaccgctgttttgcctttatgcaggcggtaggcaaaggctacaccgacgcttatttaccaattgtcgagcgacggaaagcgatggcctacggcgagcgcgagcgcaatttccagttatatcgtcgcggtcgttatgtcgagttcaatctggtctgggatcgcggcacgctgtttggcctgcaaactggcgggcgcaccgagtctatcctgatgtcaatgccgccactggtacgctgggaatatgattatcagccaaaagatggcagcccagaagcggcgttaagctgtgtcttcggcgcgatcccccctttcagcttccatccaaaactcaaactggttgccgaccctctactcttcgaacgatttgatgaaatcgccttcaatgcaggcatgctggataaatccgttattttgaaaaccgcggattatttgcgcattgcgcaaccagaactggtcaatttccgccgcactgcgtaa

SEQ ID NO: 127307 - DNA, 1143 bp, Homo sapiens
atgatctatgtctttgttaccgtcaaacataggaatgatcattttactaagaacacactcgcatcatatcgaggacgaaccctgctcggtaccctgtttaaaggcgtttaccacctttataaagacgaaacctatctctatcagagcggtaaaggccacaccattcaggaagtccgcattgttaaagggctgaataacccggatctcgatgctgcggttggtgaagatctggcacagcagctgcgtgacgaactggaactggtgaaaggcgcgtctaacgagttcgacaaagagctgttccttgcgggcgaaatcactccggtattcttcggtactgcgctgggtaacttcggcgtcgatcatatgttggatggcctggtggagtgggcacctgcgccgatgccgcgtcagactgatacccgtaccgtagaagcgagcgaagataaatttaccggcttcgtatttaaaattcaggccaacatggacccgaaacaccgcgaccgcgtggcgtttatgcgtgtggtgtccggtaaatatgaaaaaggcatgaaactgcgccaggtgcgcactgcgaaagatgtggtgatctccgacgcgctgacctttatggcgggtgaccgttcgcaccgtatccgggcgatatactcgggctgcacaaaccacggcaccattcagatcggcgacacttttacccagggtgagatgatgaagttcaccggtattccgaacttcgcaccagaactgttccgtcgtatccgcctgaaagatccgctgaagcaaaaacagctgctcaaagggctggtacagctttccgaagagggcgcggtgcaggtgttccgtccaatctccaacaacgatctgatcgttggtgcagttggtgtgctgcagtttgatgtggtggtagcgcgcctgaagagcgaatacaacgttgaagcagtgtatgagtcagtcaacgttgccactgcccgctgggtagaatgtgcagacgcgaagaaattcgaagagttcaagcgtaagaacgaaagccaactggcgcttgatggcggcgataacctcgcttacatcgctaccagcatggtcaacctgcgcctggcacaggaacgttatccggacgttcagttccaccagacccgcgagcattaa

SEQ ID NO: 127308 - DNA, 2377 bp, Homo sapiens
atggacccgaaacaccgcgaccgcgtggcgtttatgcgtgtggtgtccggtaaatatgaaaaaggcatgaaactgcgccaggtgcgcactgcgaaagatgtggtgatctccgacgcgctgacctttatggcgggtgaccgttcgcacgttgaagaagcgtatccgggcgatatcctcggcctgcacaaccacagcaccattcagatcggcgacacctttacccatggtgagatgatgaagttcaccggtattccgaacttcgcaccagaactgttccgtcgtatccgcctgaaagatccggtgaagcaaaaacagctgctcaaagggctggtacagctttccgaagagggcgcggagcaggtgttccgttcaatctccaacaacgatctgatcgttggtgcagttgacgttcgcagcaaaatgcatgacgccttattggattacatggacaaaattcgcgatccgttccgcagttaccaatggagtctgcgtccgtggcgtaaagatgcacggccgcgctggatgggggcgtttcgtccacgtccacaagatggctattcgccagttgtacgcgactatgacaccggcctaccgacacaaggggtgaagcttgagagacctgtatctacgttccgacaactgaaaagcggggacattgatcatcaagacgaacgagtcatcgagctcaacattgcgttaagcaaactgcttaaggtctccaggcagttttacctgacgggaccgttcgttaacagcattcgcgtcgcgctagatgttaagacgttcggcatcaaagcgaatgacgacaaagccaagctcaaagcgctgggggaaatcgcgcacgcatgtgtcgacgcaacgatcatttattgcaagtcaccaactgttgcgggcctggtggcgcgcgagctgatcaagcttgggcatggcactccgactgagaatccccatgtctactgggtcagcgaaaagttcgatgccgactgggattacacagtcgcccttagaaacggtaatttctacacggcggttttgcgccttaccttctgcggtgctgttgctggcgattgggttagccgggccaaggccctgagtacggatgcggctggcgtccacgccctgggtgatcaacgcgctggcaacggaatccgcacgttgctgggagagacgcatgttcaggtcgtgaccacccgtgctgtcggtataaccaatcacgttaaccgccgttttcggatactctttcagtaccattgccacgccgctgcgcctgctgctgcgccaatcagcgcgcctttaccgcgatctttctcgaagaagagagcgcacaaataccgcgcccagagagagccagactggggatgcaattactgttcggtcgcggcagtttggcgatgcgctgatggaactggatgtggtaatccacaagctgacgcctgctttcatggtggcgatcagcgccagttgttcatcattacgtccttcaccagctgcgcgtagtcgttgtcactttttgccgaccaggacgggtcaggtcagccgcatagccgttatattctgccccggcatccagcggaaagctgcgcatctacttccggttgcctggataggtccaagttttggggtaaatgcgagtacccgcaagcgtgttcggttaagcgccacaatgttgtgtaaggtacgtcggtatcacgatgaccggtcgcggccagttcgactcagttttgaaggagcgatagtaatgcaggtagtcgataacccctttgggttgatgttgctggcctcaatacccagttgcagcgcacgttccggcacggaccgatataaccgatattgccgcgcgcagcaggcagcaggctaccatgccatcggctttcggcagcgcgatcacttccacatcttcagtccagaagaggtcggcagcgaaaaactcgacgacaaaactattgccagcttccagcagcagctgtcggatatggctacaagttccagttcatcaccctggcagaatggggttaagtcgaagccaccgccaaccaccagacgggacggcacccggtttttcggcgataaaaaaccgcacattcgcgtggctggtggaacatacggttatgcggatgcactacacagtgaaggccggtaccgactactaggatcgaaagatgcagctggcaataccgcgctgcgcatggcgatgcagactgcgagcaacatatccgccgtgagaaagcgaactccaacatttgtacttccaggtactgctggcaaacatcgccagcctgtatgccgtttatcacggccggttggcctgaaacgtatcgctaaccgcattcaccgtctgaccgatatctggcggcgggcctgcaacaaaaaggtctga

SEQ ID NO: 127309 - DNA, 1368 bp, Homo sapiens
atgatcaccggcgatgcgctgctggattttggcgacgggcataaaattaaacgtagcgccaaaccgggctggtatatttatcacagcctgcccgccagtcatcaggcgatatttttccctgtatccggcttgaaaaaatggcgttatgacctggaatataaagtttcttccgactacgcgctggcagccaaaatgtataaagccggttatgcatttaaaaaactcaatggcctggtgtctgaattttccatgggctgtgtcttcggcgcgatcccccctttcagcttccatccaaaactcaaactggttgccgaccctctactcttcgaacgatttgatgaaatcgccttcaatgcaggcatgctggataaatccgttattttgaaaaccgcggattatttgcgcattgcgcaaccagaactggtcaatttccgccgcactgcattcttgcgtcgtataaatgcggggaacaaccagatagcagcagcaatcatccgcgtaatttgtttgtctggcgctctaacctgcttggctcctccgggcaaaggccacgagtatatgcagaagtatctgctggggaccgaaagcgggattcagggcgaggaactcggtgccagcgacgggatcaaaccggaagaagtcgagtggcaaactgcagcgattgaaggcaagctcgacctgctggtgacgctcgacttccgcatgtccagtacctgcctgttctccgatatcgttctgcccaccgccacctggtacgaaaaagacgatatgaacacctcggatatgcatccgtttattcatccgctttctgcggcggtcgatccggcgtgggaatcacgcagcgactgggaaatctacaaaggtatcgccaaagcattttcgcaagtgtgcgtgggtcatcttggcaaagaaaccgacgtggtattacaacccctactgcatgactctccggcagagctctcacagccgtgtgaagtgctcgactggcgcaaaggcgaatgcgatctgattccaggcaaaaccgcgccgaatattgtggcggtggagcgcgactaccctgctacgtatgaacgctttacctcgctcgggccattgatggacaaacttggcaatggcatggacctgaccgattacgctaacatggcgctgagcatcccgtctgcgaacaccgatatctggaacctggaacaagacaccgttggtactcgtctgaccaactctcgtcatggcctggctgataacggcggcgcatgggtaagctacttcggtggtaacttcaacggcgacaacggcaccatcaactatgatcaggatgttaacggcatcatggtcggtgttgataccaaaattgacggtaacgacggctaa

SEQ ID NO: 127310 - DNA, 1445 bp, Homo sapiens
tgattccaggcaaaaccgcgccgaatattgtggcggtggagcgcgactaccctgctacgtatgaacgctttacctcgctcgggccattgatggacaaacttggcaatggcggtaaagggatttcgtggaatacccaggatgaaatcgatttcctcggcaaactcaattacaccaagcgtgatggcccggcacaggggcgtccgctgattgacaccgccattgacgcttcagaagtgattctggcactggcaccggaaaccaacggtcatgttgcagtcaaagcgtggcaggcgctgggcgagatcaccgggcgcgaacatacccatctggcgctgcacaaagaggacgagaagattcgctttcgcgatattcaggcgcagccgcgtaaaattatctccagccccacctggtccggtctggaaagcgctcccgtctcctataacgcgggatacaccaacgttcatgagttaattccgtggcgcacgctgtcgggacgccagcagctctatcaggatcatccgtggatgcgtgcttttggtgaaagcctggtggcttatcgcccgcctatcgacacccgtagcgtcagtgagatgcgccagataccgccaaacggcttcccggaaaaagcacttaacttcctgacgccgcaccagaaatggggcattcactcaacctacagtgaaaacctgctaatgctgacgctctctcgcggtggaccgattgtctggatcagcgaaacagatgcccgagaactgaccattgtcgataacgactgggtggaagtattcaacgccaacggcgcgctgactgcccgcgcggtggggggaacatggtttttcacggtgaatttacgaaatcgtcgaagccaacttttgaccacccagtaccagatgctccgtcacgccattattaaagttaagcgagacaggccttttgaaatcaacgcctgggtcgttttgccagagcatatgcactgtatctggacattacctgaaggcgatgatgatttttcctcgcgctggcgggaaattaaaaagcaatttacccatgcttgtggattgaaaaatatctggcaaccacgtttttgggagcacgccatccgcaataccaaagattataggcatcatgttgattatatttatataaatccagtaaagcatggttgggtaaagcaatatggtcgattcctcgaagtgacctccggtgcgcagcagcgtttcgaacaggccgactggcatgctgtccagcaggcgatgaaaaaccgtatccatctttacgatcatcacgttggtctggtcgtggagcaactgcgctgcattactaacggccaaagtacggacgcggcatttttactacgtgttaaagagcattacacccggctgttgccggattacccgcgcttcgagattgcggagagcttttttaactccgtgtactgtcggtga

SEQ ID NO: 127311 - DNA, 1060 bp, Homo sapiens
ccatgactacggattctatggccgtagccgtacaacatcatgcctgggacgaccctgtagttaccctacctaattgccctgctggcgagggcatggtttaacggcctgctgacctcgcgcacccgtttgtatattaaaggtaacggcattgtcgatttgcctaagttgcaggagatggtcgccgacgtgtcgcaccatttcccgctgcgcttacctgcaccgacaccgaaggcgctctacagcccgtgtgagatccgccatctggcgattaatgttaacctggaatatgacccgacagcggcgttccgcaatcaggtggtgcatttcgatttccgtaagctggatgtcttcagctttggcgagaatcaaaattgcctggtaggtaacgttgacctgctgtcaccgaaactcgtggaacgaagtgcgtacgctgcacttcaacggggagcaatcgatgatcgaagccctgaaaactattctcggcaaaatgcatcaggacgccgcaccgccagatagcgtggaagtcttctgttatagccagcatctgcgcggcttaattcgtactcgcgtgcagcaactggtttctgagtgtattgaattgcgtctttccagcacccgccaggaaaccgggcgtttcaaggcgctgcgcgtttctggtcaaacctgggggttgttcttcgaacgcctgaatgtatcggtacagaaactggaaaacgccatcgagttttatggcgcgatttcgcataacaaactgcacggcctgtcagtgcaggttgaaaccaatcacgtcaaattaccggcggtggtggacggctttgccagcgaagggatcatccagttctttttcgaagaaacgcaagacgagaatggctttaatatctacattctcgacgaaagcaaccgggttgaggtatatcaccactgcgaaggcagcaaagaggagctggtacgtgacgtcagtcgcttctactcgtcatcgcatgaccgctttacctacggctcaagcttcatcaacttcaacctgcaagatccctatttaagggcgcgggtttcaatataa

SEQ ID NO: 127312 - DNA, 1427 bp, Homo sapiens
ggcctgctgatccttccggttgaacatgataacgcctccgatcctgattggtgggggtacaaagtccaaaagccctcggttctccagaatggtgtttcggtgcgatgtacccgccccaagattaggggtagcgttgacctgctgtaccgcaactcgtggaacgaagtgcgtacgctgcacttcaacggcgagcaatcgatgatcgaagccctgaaaactattctcggcaaaatgcatcaggacgccgcaccgccagatagcgtggaagtcttctgttatagccagcatctgcgcggcttaattcgtactcgcgtgcagcaactggtttctgagtgtattgaattgcgtctttccagcacccgccaggaaaccgggcgtttcaaggcgctgcgcgtttctggtcaaacctgggggttgttcttcgaacgcctgaatgtatcggtacagaaactggaaaacgccatcgagttttatggcgcgatttcgcataacaaactgcacggcctgtcagtgcaggtccactctagaggacccaaaatggcacgggcaggtcttctggttatcgaagcggccttggcgcacacaggcaaaaccaaggcccccacgcccaacacgccttcgacacccaacttcccgcgcaacttcccgccaagccccccctcggcccccaactattttcgctatggttatgctcagtggaacaaagaaaaccgtttcaccggttggtacgacgtggatctgtctgagaaaggcgtaagcgaagcaaaagcagcaggtaagctgctgaaagaggaaggttacagctttgactttgcttacacttctgtgctgaaacgcgctatccataccctgtggaatgtgctggacgaactggatcaggcatggctgcccgttgagaaatcctgtgcagtgaaaatgactgccctgatgatccttatcactctgatgaactctgccggtggtaaagcatctgacctgttcggtgaactgaccggtatcgcagtactgctgactatgctgccgtatttctactcttgcgttgacctgattcgttttgaaggcgttaacatccgcaactttgtcagcctgatctgctctgtactggggtgccgtgttctgctttattcgcgctgaatgggcgcaagctccttcgagctggcaggtaccttcatcgtcagcctgattatcctgatgttctacgctcgcaaaatgcacgagcgccagagccactcaatggataaccacaccgcgtctaacgcacattaattaaaagtattttccgaggctcctcctttcattttgtcccatgtgttgggaggggccttttttacgtggagatatgactatgaccgttattgcaatattgactcacatgggggtttattttaaagaagaacccatccgtgaacttcttcgcgcgcttgacc

SEQ ID NO: 127313 - DNA, 240 bp, Homo sapiens
catttcaagcgccagacattttggcgcgctggcctgtacgctggaacttggcaaagcgttgacctttgggcaaaacgatcttcgccagtttgcagtaactgcaagcgcaattgctgcgctgctattcgccactcgccgtccttcgaaatgcatatggcaagtgacacgctgaattttatgccgtttgagaaaggaacattgctggcgcaggacggagaggaacgttttaccgtaacccat

SEQ ID NO: 127314 - DNA, 358 bp, Homo sapiens; identical to SEQ ID NO: 118570

SEQ ID NO: 127315 - DNA, 1638 bp, Homo sapiens
atgccgcgaagttcggcgataattcgacgtttaatccgccagcgaaaacagcgtcgcagtgaaagcgcagaccaaatacccatagcgccaggccaaaaaccactgttaccgagcctgcaggtccaatatttatcactggctgaacagagcggatttttcacattaccgctggtgcccaaatacccccagcccaggccgagcgtaaaatcgaacggcccccaggctttgctggcaacaagatattccgcatcaaacagccccgtaccgccgatatcccgcgcaccaaccgccacttgcgccagctacgtaactctcttcccacaaacgcagtttgagatcgaaggctttatctttatacgtttgatcgccagagaacgcttcgacgctgctgtactgccggacggagtccgcgaggccaacataaataatgctgccgggcatcggctctacgtgacgcttgttccagtaagccaccggcgctttttgcgtgcgtccgtccggggcaaagaatctgtgcgctggcaccttgatctacataccgcaattcgtggctccttgcatccgcagttcggtgtattaccgcaacgcgacattccctgggacgagaaatttctgacgtggctgggtgcggcggggctggaagcgctggtgttccatcaggaacctggtggtacgtttacccatttcagcgccagacattttggcgcgctggcctgtacgctggaacttggcaaagcgttgccctttgggcaaaacgatcttcgccagtttgcagtaactgccagcgcaattgctgcgctgctatctgacaccactaccgcagcaccggctgacgcgaacccattgatgcaccacaaaggcaagttcggtccgcatcaggacatgatgttcaaagacctgaacctgaccgacgcgcagaaacagcagatccgcgaaatcatgaaaggccagcgtgaccagatgaaacgtccgccgctggaagaacgccgcgcaatgcatgacatcattgccagcgataccttcgataaagtaaaagctgaagcgcagatcgcaaaaatggaagaacagcgcaaagctaacatgctggcgcacatggaaacccagaacaaaatttacaacatcctgacgccggaacagaaaaagcaatttaatgctaattttgagaagggcccaaccgccaaaacggacgcgattaccgctcagtcatgccgaccaacctcattgctgcgtcgcttccacgaggcgacggcacagaatgcgccggacgtggtggtatggggcagcggtacaccgatgcgcgaatttctgcacgtcgatgatatggcggcggcgagcattcatgtcatggagctggcgcatgaagtctggctggagaacacccagccgatgttgtcgcacattaacgtcggcacgggcgttgactgcactatccgcgagctggcgcaaaccatcgccaaagtggtgggttacaaaggccgggtggtttttgatgccagcaaaccggatggcacgccgcgcaaactgctggatgtgacgcgcctgcatcagcttggctggtatcacgaaatctcactggaagcggggcttgccagcacttaccagtggttccttgagaatcaagaccgctttcgggggtaa

SEQ ID NO: 127316 - DNA, 1363 bp, Homo sapiens
atgctgaacgcgttgtttggcgcgatatctcacggcgagatcccgttacgttgccggttgttggtgatcctagggaatcctcctgcgttgaagcaagggaaacgttattgccatagcgatatgaatcgaatgtttggcggtcgttggcagctatttgctgaaagcggagaaacctgtcgggcgcgcgaactggaacagtgcctggaagatttttatgaccagggcaaagaatctgtgcgctggcgccttgatctacataccgcaattcgtggctccttgcatccgcagttcggtgtattaccgcaacgtgacattccctgggacgagaaatttctgacgtggctgggtgcggcggggctgaaggcgctggtgttccatcaggaacctggtggtacgtttacccatttcagcgccagacattttggcgcgctggcctgtacgctggaacttggcaaagcgttgccctttgggcaaaacgatcttcgccagtttgcagtaactgccagcgcaattgctgcgctgctatatggtgagagtgtcggtatcgtgatcgtcagcctttttctttttatatatcagttactttgcgtgccagtaagccgctgcacgtacccgctgtgggtcatactgttccgcttcaaaccggcgaagaaactgcaacagtccctgtaccctgctgatcggaatagttgtgctcatcaacgcagcagcagaaacactagttttcctctcaaaccacatggaggaccaaggaagggcggggtaagaccacccgcactgcaccaagagaatgtcggagggtatctccagactccggcgaagcccaactggcggagcctggggggtggagaggagcgcgccccagttatcacgcgcaggcagcggggtcaaacggggattaacccgggatcccgtcctacggcatttaacattatggggctgcccgcgcagggtgtgggggggaacaccttagcgaagctattggcaagtgacgatatcgccaaaggggggaaaagaaataaaagcgaagctagcgtcgtgagaaacgcggcggacgccccaaaggtgcttcaggaccaggagttcaagccaagcttagccaactgtagaacacacggcacgcagttccagtccatatcagaggttacaggtggtgcctctgtcatgcccacagtggaggagctgtccagggccttacgagccctcatcgagagtcattgtgatcggatgttaatcataagtactgaggggaaaaaaaagccttctttccttgggaaatgcaggaagccagcaagcggccggagtctccggagcccgcaaggaggcgcgttggctgcgcagaggactctagaggatcccacgg

SEQ ID NO: 127317 - DNA, 455 bp, Homo sapiens
atgacctgcagtacgaattcgcggtccgtacccgcggatcgtccgggcagccctaaccctgacgcaaccccatttaatatactcgcagattgccggcgataacctgcgtaccgatattctggccggcttccaggcaggtctggagacgattctggtgctttctggtgtttctaccctcgacgatatcaacagtatgcctttccgccccagctggatttacccgtcagtcgctgaaatcgacgttatctgaatagcaaccacgtctgcggacgtggttggctctgatgacaaacgccaaactgcctgatgcgctacgcttatcaggcctacgcagctcctgcaatatattgaattttcatgcttttgtaggccgcataaggcgttcacgccgcatccggcctgaaccaatcgcactttgtcagcaatttggcccccgtacaatataaacattcaag

SEQ ID NO: 127318 - DNA, 392 bp, Homo sapiens
atgtgccccattgaggaaactgcgtcatccttcggcggcaaaccgctgtcgatggtactggttattcagatgtttatgctgctgaccggggcgctgattattatcctgaccaaaaccaatcccgcgtctatctcaaaaaacgaagtcttccgttccggtatgatcgccatcgtggcggtgtacggtatcgcatggatggcagaaaccatgttcgcaccggcttgctacggttattacatcctgccgacttatccgagcgatctggcagcgattcagtttgaccgttccggcaccacccacatcggtcgcttcgtcatcaaccacagctttattctgccggggttgattggtgtgagcgtatcgtgcgtcttcggctggatcttcgccgcgat

SEQ ID NO: 127319 - DNA, 370 bp, Homo sapiens
tttgacgtgctagtgtatcatttcttccgctggcgatcaataacgtcagcgccttctcgaaaacgcagccaggtggggttattacatcctgccgacttatccgagcgatctggcagcgattcagtttgaccgttccggcaccacccacatcggtttttacaggtttcttcaccgtcacgcttaaatcgattgccgtcacatttatggttggcacacgtaccgcaatcgcttcaaagcgatcgttaaattgcggaaaaaatcgtgtgataccggcggccagtttagtatcgaccggaatgatcgactggctggctgcccgggtgcgacgcaggtcaggatggtatgcatcaataacctgttgatcgtgcat

SEQ ID NO: 127320 - DNA, 2186 bp, Homo sapiens
tcaataaaggaagcggggtcgatcatgacgacataatgtgccgttcccatggcgaccatgtaacggataatgcctaaactcgttatgcgatgttaaccagacacgataaccatctttcgaaattttacctggctcggggaaggtatcgggcggactttcatgctccagagacgaacactggggaacgttgttatcgatataagccacttccttattggctcgaatagcgacgcgggaggaataggtatccagctcttcaataaacgatgtttctacctgctgatgggccagccagatgcttaagccgacaggcagcaatactgaaagaatcagtactcccgaaataaggccgaccagatgtcgtgttctcaccagcatatccttattaacacagtgtagggaaagtatatctgactcgtggaaaaaggctggatcaactgcagcatcctcatcatctgaatcttgtagaccaagagctgctttttgtaacttcttcctctcattagccaaagcttgttctgtttcatcaaacttgaatcccttaccagagaacccactactctttttaattattttcccctcgccagcatctttttctttttcatcctccttgtcatctttgtcttttttcttctctttagaactttccccaccatcagttttctctttggacctagatatcgcggcgaagatccagccgaagacgcacgatacgctcacaccaatcaaccccggcagaataaagctgtggttgatgacgaagcgaccgatgtgggtggtgccggaacggtcaaactgaatcgctgccagatcgctcggataagtcggcaggatgtaataaccgtagcaagccggtgctgaagccacgatgtatgccggatcaacgccgatcgccagcgcgaccggaacaatcgccgccagcgccgcagcctgagagtttacaaacttggaaaccagcagcagaacaatggcataggcccacggatactctttcaccatttcacccagtacgccctgaatttcagacatatgcgcaccgaacatggtttctgccatccatgcgataccgtacaccgccacgatggcgatcataccggaacggaagacttcgttttttgagatagacgcgggattggttttggtcaggataataatcagcgccccggtcagcagcataaacatctgaataaccagtaccatcgacagcggtttgccgccgaaggatggacgcaggtacgcatcctggttgcccgcattttctccggcagaggtaatctcgggctggacgtgctggatgtggttaacctgcgcgttatgatgggggatggtcatggcccagcggaaggatcgattgaggccagcctgaccgtgctggcagagatgcaacaacaaggcctggtaaaacatattggcctgagcaacgtcacaccgacgcaggttgcagaggcgcgcaagattgccgaaattgtctgtgtgcaaaacgaatacaacatcgcgcaccgtgctgatgatgcaatgattgatgctttggcccacgatggcattgcctacgtgccgttcttcccgctcgggggctttacaccgctgcaatcgtccacactttccgatgttgctgcgagccaagtatttgcaaacaaaagctctgactccaagagcaagaagagcacatcccaccaatctaaatattcgaaaagagtcaaattcttctgttgtatttccatcctcttgactgggtttttcactaatcagctgtttccttagcttcattgcttcttcgaatctggaaaggtactgctctaggccatggcgggaacccctctggaccgagtccgctgtcaggtcccctctgttccgctgccggagctcaaggttgacatcactactgcactcggccacaccaccctgctggtcagttgttcctgtactgactgaatcacccagcactactcgctttgaaacggaaggaacgctgagggagttcagtttatcactgtcctgctgctttgattttgtttgactttcttcttctttggtgcaccgaatcctcatgactgcctcaaagccaatcttccgagtaaggtatctctgtagttccttctgtaatttctgtacttggactgggttgtgctgatgatggtaagagggatagtaatagacactacctgctgaataccgagaaatacaac

SEQ ID NO: 127321 - DNA, 1620 bp, Homo sapiens
catgtcctgactttgcagcgcgtggttgatggtttctggtgtgatggtcaatttgccagtggcatttgccagataagagagcgcttctttcagcaaatcgttacggttattgggcaaactcagattaaacagcgtggtgtcataagagacaattaccggcggcatcgggcgtttagggtcgatcccctgctgccacaatgaacgcgcctgtgctgcgtcaaggccaccgctttgcgttagcgcaatactagggatggcgtgactgtaaccgctctgttgtgtactttcggcgagcgaaccggtattaaccagcaggcgaatttcaacacgatcgctgggacgctggggggtggtcagcacttgccactctttgtacatgtccagcgccgcattctgtgaatagcgcaggttatcttcgatataggtgttatagacgcctttcgacagcgtttcttcatcaccgccgccggtccacacgcgctggccttttttaccgacgatgatcgcggtgccggtatcctggcaggtcggcagcacgcctttggcggcgatttcggagtttcttaagaattgcagcgccacgtacttgtcgttttcgctggcttctggatcgtgaagaatagccgcaacctgtttctggtgtgccgggcggagcataaaagaagcgtcgtgaaaggcttgctgcgccagcaaggtcagggcttctggttccactttcaggatggtttcgccgtcgaagtcggcaacgctaacgtaatcggaagtgagtagatagtattcggtattgtctttccccatcgggaaaggtgcctggtagataaagggtttgtttgacataacttccagcctgtaactctgtatttgttattcgaaaatggcgtgccgcgtagtcacgggcggcacgcaaagtgcatttataagaacccgtacatcgcggcgaagatccagccgaagacgcacgatacgctcacaccaatcaaccccggcagaataaagctgtggttgatgacgaagcgaccgatgtgggtggtgccggaacggtcaaactgaatcgctgccagatcgctcggataagtcggcaggatgtaataaccgtagcaagccggtgctgaagccacgatgtatgccggatcaacgccgatcgccagcgcgaccggaacaatcgccgccagcgccgcagcctgagagtttacaaacttggaaaccagcagcagaacaatggcataggcccacggatactctttcaccatttcacccagtacgccctgaatttcagacatatgcgcaccgaacatggtttctgccatccatgcgataccgtacaccgccacgatggcgatcataccggaacggaagacttcgttttttgagatagacgcgggattggttttggtcaggataataatcagcgccccggtcagcagcataaacatctgaataaccagtaccatcgacagcggtttgccgccgaaggatggacgcaggtccgaatcagcaccaagaagggcgactacagcgattgccccgaggaaaatccacattgccagccagttgctggtcgttatcattattcgctcgttggtcgggtgtcgaatgcgacgctggcgcgtcttatccgac

SEQ ID NO: 127322 - DNA, 1377 bp, Homo sapiens
gccaccgcctggcgaaatacatcggtgcctacactgcgctgatggatggtcgtctggacgctgttgtattcactggtggtatcggtgaaaatgccgcaatggttcgtgaactgtctctgggcaaactgggcgtgctgggctttgaagttgatcatgaacgcaacctggctgcacgtttcggcaaatcaggcagtcaggcggctcgcgtcttgcgcgataaccagttcttcgttggttgggataaccaccgcaggacgggtaccttctttgttgatgaaaccagatttgccgaaacgtgcagccaggtgctgttttttacattggcaacaagggcaatatcctgtccagcaatggctggacaggcgatgcaaaacagtaatgacagaaacagaattattctcttcatcagcttacgttgagtgggatgcatatatagttcctgaatctgcggcgaaacggaaactgtgccgcactcttacccgcatgaccataaacaaagtgagactggataggacctacagggaggaaatgcagatcggtagccgtggatctctagagtcatctttggatctgatgaatactattattaatatgatcgccgcaggtccatgcttccgccgttattacatcctgccgacttatccgagcgatctggcagcgattcagtttgaccgttccggcaccacccacatcggtcgcttcgtcatcaaccacagctttattctgccggggttgattggtgtgagcgtatcgtgcgtcttcggctggatcttcgccgcgatcgttgccgacttcgacggcgaaaccatcatgaaagtggaaccagaagccctgcgccctgctggcgcagcaagcctttcacgacgcttcttttatgctccgcccggcacaccagaaacaggttgcggctattcttcacgatccagaagccagcgaaaacgacaagtacgtggcgctgcaattcttaagaaactccgaaaatcgcccaaaggcgtgtcccgacctgccagcataccgcacgcgatcatcgtcggccagcgcgtgtggaccggcggcggtgatgaagaaacgctaccgggttgcaccactacagtgactcaccgcttcactaaaaatctgcgtcatcacgtagaaaatgccgatctattgatcgttgccgttggcaagccaggctttattcccggtgactggatcaaagaaggcgcaattgtgattgatgtcggcatcaaccgtctggaaaatgtcgccatgttactcatcctgttgatctcgctcggtaccctggatccgctagagtcctttgattcgctgccgtggtatcagataatcaccgattatctgtggcatatcacgctgccggtgctggcttattggtag

SEQ ID NO: 127323 - DNA, 564 bp, Homo sapiens
atgcgctggcggatgggcgtgcgtaacagtgcacataccctggcgaaactggcgacgccatttgccgaaggtgaggcgctgcgtctttccagcgtttcgcatccggaatacattggacgcgtcgcgaagttctttagcgatatcggcgggcgggcgctactaatgcatggtactgaaggtgaagtgtatgataatccgcagcgctgcccgcagatcaatctcattgaccgtgaagggatgcgggtgctgtatgaaaaacaggacactgctggtagcgagttactgccacaagcaaaagatccggaaaccacggcgcagtggattgagcgttgccttgctggcagcgaaccgattcacgaatcgctgaaaatccagatggcttgctgcctggtggctacgggtgaagcgggcacaataaaaaaacgaggaaacaaactaggagtatcacaaaaagcaacgccggcaccactatcatattcggacccgtttaacagcaaaaacacaacgggtgtaaacatactcccctcgaaaacggcgcccccatatcaggggaagcccaaatga

SEQ ID NO: 127324 - DNA, 744 bp, Homo sapiens
atgaacgcccaggttggcatcacctcgccgggctttattggtgcggacgtttcacacacttcacggatcgtttcttcatacacgaccgaggaagccggctttcaccggcaggcgtggtgtcaaatgcccgttattgttagcggaaacgaaaaacaggccattactcacagtataacggtcggcagtcgcataaccgttcaggggttcatttcatgccacaaggcaaagaacggactgagcaaaatggttttgcatgataatggcgaggaaactacccggctgaggcgtgatgaacgacaagcaacaccactacaatacgggctgattcaatctgaatcgggaatcggctttataaccggtgtcgacttggaagttaagaatatttccatggtgaacgaacgagacgcaataatccctgcccattattggcacatgctgaaagctcaccacaagcggcgaacatcgtctcccacggcgcttgggggaaactgctggaatagggtggatctatggctgtatcggttcctgtatgtccgttgtcgagtgttctttgacggggtgtccacgcttgggcgcctggggttacgagaaaggaggaataacttttttcccattcacagtaccaggaccagctcccagcaggcgtttagatacagtcgatcatctacgaagaacatcatacaaacaactacaaagcatcaggggacaaactacagcgacaggacacccacgacaatattataa

SEQ ID NO: 127325 - DNA, 1042 bp, Homo sapiens
cttctctgcctgcattgttcggatccctcggtgccttatacgtgtcactcgagagcattctcaatacatcacttgcataagcattcgcttcacaggcatagcttctaaagaaactgcccattctgccgacatggaagccatcacaaacggcatgatgaacctgaatcgccagcggcatcagcaccttgtcgccttgcgtataatatttgcccatggtgaaaacgtatttattcgcgataagctcatggagcggcgtaaccgtcgcacaggaaggacagagaaagcgcggatctgggaagtgacggacagaacggtcaggacctggattggggaggcggttgccgccgctgctgctgacggtgtgacgttctctgttccggtcacaccacatacgttccgccattcctatgcgatgcacatgctgtatgccggtataccgctgaaagttctgcaaagcctgatgggacataagtccatcagttcaacggaagtctacacgaaggtttttgcgctggatgtggctgcccggcaccggatcagaaaatctgatggcaccctacaggaacatgacggtatctgcgagatccatgttgctaaatatgctgaaatattcggattgacctctgcggaagccagtaaggatatacggcaggcattgaagagtttcgcggggaaggaagtggttttttatcgccctgaagaggatgccggcgatgaaaaaggctatgaatcttttccttggtttatcaaacgtgcgcacagtccatccagagggctttacagtgtacatatcaacccatatctcattcccttctttatcgggttacagaaccggtttacgcagtttcggcttagtgaaacaaaagaaatcaccaatccgtatgccatgcgtgttacgaatccctgtgtcagtatcgtctgtgttaatgagatcaacagcagaactccaatgcgcctctcatacattgagaaaaagaaaggccgccagacgactcatatcgtattttccttccgcgatatcacttccatgacgacaggatag

SEQ ID NO: 127326 - DNA, 1974 bp, Homo sapiens
atggaaattcgaggacgggttgagcaacgtgttggttatacaattgaacaaattaatcatatgcgtgatgtgtttggtacgcgattgcgacgtgctgaagacgtatttccaccggtgatcggggttgctgcccataaaggtggcgtttacaaaacctcagtttctgttcatcttgctcaggatctggctctgaaggggctacgtgttttgctcgtggaaggtaacgacccccagggaacagcctcaatgtatcacggatgggtaccagatcttcatattcatgcagaagacactctcctgcctttctatcttggggaaaaggacgatgtcacttatgcaataaagcccacttgctggccggggcttgacattattccttcctgtctggctctgcaccgtattgaaactgagttaatgggcaaatttgatgaaggtaaactgcccaccgatccacacctgatgctccgactggccattgaaactgttgctcatgactatgatgtcatagttattgacagcgcgcctaacctgggtatcggcacgattaatgtagctttgcagaactttcagcggtataccggcatacagcatgtgcatcgcataggaatggcggaacgtatgtggtgtgaccggaacagagaacgtcacaccgtcagcagcagcggcggcaaccgcctccccaatccaggtcctgaccgttctgatctggctctgaaggggctacgtgttttgctcgtggaaggtaacgacccccagggaacagcctcaatgtatcacggatgggtaccagatcttcatattcatgcagaagacactctcctgcctttctatcttggggaaaaggacgatgtcacttatgcaataaagcccacttgctggccggggcttgacattattccttcctgtctggctctgcaccgtattgaaactgagttaatgggcaaatttgatgaaggtaaactgcccaccgatccacacctgatgctccgactggccattgaaactgttgctcatgactatgatgtcatagttattgacagcgcgcctaacctggtttttcgcatatgcttcgtgatctgggctcaagaacgtatagatattaaagggttcgagcctgatgtacgtattttgcttaccaaatacagcaatagtaatggctctcagtccccgtggatggaggagcaaattcggcacgcctggggaagcatggttctaaaaaatgggtacgtgaaacggatgaagttggtaaagacaccggcgttcggtcgaagagtatctggtgtcatagaaattcccgatgggagtcgccgtcgtaaagctgctgctcttaccgaaagtgattatcgtgttctggttgccgagctgtatgatgagcagatggctgcattatccagattgggtctcgattatcgcccaacaagtgattatgaacgtggtcagcgttatgcaagccgattgcagaatgaatttgctggaaatatttctgcgctggctgatgcgcaaaatatttcaccgcaggtaaatgtgtcaaaatctgatgacacactcaaaatcaacggagtggaagatcacaaaacgatttttgacggagacggaaaaacatatcagaacgttcagcagtttatcgatgaaggcaattatacatccggcgacaaccatacgctgagagaccctcactacgttgaagacaaaggccataaataccttgtattcgaagccaacacgggaacagaaaacggataccaaggcgaagaatctttatttaacaaagcgtactacggcggcggcacgaacttcttccgtaaagaaagccagaagcttcagcagagcgctaaaaaacgcgatgctcagttagcgaacggcgccctcggtatcatagagttaaataatgattacacattgaaaaaagtaatgaagccgctgatcacttcaaacacggaactgatgaatcgagcgcggaatgtttcacaatga

SEQ ID NO: 127327 - DNA, 3216 bp, Homo sapiens
cgtgtttgaagtgatcagcggcttcattacttttttcaatgtgtaatcattatttaactctatgataccgagggcgccgttcgctaactcagcatcgcgttttttagcgctctgctgaagcttctggctttctttacggaagaagggcgtgccgccgccgtagtacgctttgttaaataaagattcttcgccttggtatccgttttctgttcccgtgttggcttcgaatacaaggtatttatggcctttgtcttcaacgtagtgagggtctctcagcgtatggttgtcgccggatgtataattgccttcatcgataaactgctgaacgttctgcgctgttgtcaggctttgtttgccgtaatgtttaccggaatagtcagtgtagaataaacggaattttccgtcaagatgtaaagggtgcagaaccgggaccattcttggcgtctgatctttcaggatcggatcgttggcggccgaacttatcggttgggccccgccctgtttttcatcgcagtactgttgaaattcattaagcattctgccgacatggaagccatcacaaacggcatgatgaacctgaatcgccagcggcatcagcaccttgtcgccttgcgtataatatttgcccatggtgaaaacgggggcgaagaagttgtccatattggccacgtttaaatcaaaactggtgaaactcacccagggattggctgagacgaaaaacatattctcaataaaccctttagggaaataggccaggttttcaccgtaacacgccacatcttgcgaatatatgtgtagaaactgccggaaatcgtcgtggtattcactccagagcgatgaaaacgtttcagtttgctcatggaaaacggtgtaacaagggtgaacactatcccatatcaccagctcaccgtctttcattgccatacggaattccggatgagcattcatcaggcgggcaagaatgtgaataaaggccggataaaacttgtgcttatttttctttacgggaggcttaacaccacatgaaggctgcctaggcttatggtttgcaccctctggagaagaagcctgaggcatatctggggcccttttagtcacaggatactgacacagggattcgtataaacgcatggcatacggattggtgatttcttttgtttcactaagcctaaactgcgtaaaccggttctgtaacccgaggaagaagggaatgagatatgggttgatatgtacactgtaaagccctctggatggactgtgcgcacgtttgataaaccaaggaaaagattcatagcctttttcatcgccggcatcctcttcagggcgataaaaaaccacttccttccccgcgaaactcttcaatgcctgccgtatatccttactggcttccgcagaggtcaatccgaatatttcagcatatttagcaacatggatctcgcagataccgtcatgttcctgtagggtgccatcagattttctgatctggtcaacgaacagatacagcatacgtttttgatcccgggagagactatatgcccgctcagtgaagtcgtttgactggacgattcgcgggctatttttacgtttcttgtgattgataaccggtggttccgccatgacagatccatgtggaagggggacaagttttttagaatgggcacaccgggttggactcaagacgatagttaccggataaggcgcagcggtcgggctgaaccgggggttcgtgcacacagcccagcttggagcgaacgacctacaccgaactgagatacctacagcgtgagctggattggggaggcggttgccgccgctgctgctgacggtgtgacgttctctgttccggtcacaccacatacgttccgccattcctatgcgatgcacatgctgtatgccggtataccgctgaaagttctgcaaagccaatacccgattttcaaactttcctacaagaaccccgttacacaaacagcatggttcctggttcccaaaccgtatatttggacccgtgccgatcaacgtctcattttcgccaaaagttggcccagggcttcccggtatcatatagggacaccatgatttatttattctgcgaagtgatcttgcgtgagaggtatttattcgcgataagctcatggagcggcgtaaccgtcgcacaggaaggacagagaaagcgcggatagaacggtcaggacctggattggggaggcggttgccgccgctgctgctgacggtgtgacgttctctgttccggtcacaccacatacgttccgccattcctatgcgatgcacatgctgtatgccggtataccggtgaaagttctgcaaagccagtgcatttagcaaatatgggaattgaccattttcaattgttttggcattcatgaggatgttgataaaggtaggggttgggggcagagctgattctttaatgattttgacattaatcgtgccgatacccaggttaggcgcgctgtcaataactatgacatcatagtcatgagcaacagtttcaatggccagtcggagcatcaggtgtggatcggtgggcagtttaccttcatcaaatttgcccattaactcagtttcaatacggggcaaagccagaacaggaaggaataatgtcaagccccggccagcaagtgggtgcccgctttccagtcgggaaacctgtcgtgccagctgcattaatgaatcggccaacgcgcggggagaggcggtttgcgtattgggcgccagggtggtttttcttttcaccagtgagacgggcaacagctgattgcccttcaccgcctggccctgagagagttgcagcaagcggtccacgctggtttgccccagcaggcgaaaatcctgtttgatggtggttccgaaatcggcaaaatccccaaatcccggtggaaatacgtcttcagcacgtcgcagtcgcgtaccaaacacatcacgcatatgattaatttgttcaattgtataaccaacacgttgctcaacccgtcctcgaatttccatatccgggtgcggtagtcgccctgctttctcggcatctctgatggcctgagaagaaaccccaactaaatccgctgcttcacctattctccagcgccgggttattttcctcgcttccgggctgtcatcattaaactgtgcaatggcgatagccttcgtcatttcatgaccagcgtttatgcactggttaagtgtttccatgagtttcat

SEQ ID NO: 127328 - DNA, 813 bp, Homo sapiens
ctatcctgtcgtcatggaagtgatatcgcggaaggaaactacgatatgagtcgtctggcggcctttctttttctcaatgtatgagaggcgcattggagttctgctgttgatctcattaacacagacctgcaggaagcggcggcggaagtcaggcatacgctggtaactttgaggcagctggtaacgctctatgatccagtcgattttcagagagacgatgcctgagccatccggcttacgatactgacacagggattcgtataaacgcatggcatacggattggtgatttcttttgtttcactaagccgaaactgcgtaaaccggttctgtaacccgataaagaagggaatgagatatgggttgatatgtacactgtaaagccctctggatggactgtgcgcacgtttgataaaccaaggaaaagattcatagcctttttcatcgccggcatcctcttcagggcgataaaaaaccacttccttccccgcgaaactcttcaatgcctgccgtatatccttactggcttccgcagaggtcaatccgaatatttcagcatatttagcaacatggatctcgcagataccgtcatgttcctgtagggtgccatcagattttctgatctggtcaacgaacagatacagcatacgtttttgatcccgggagagactggttggggaggcggttgccgcgctgctgctgacggtgtgacgttctctgttccggtcacaccacatacgttccgccattcctatgcgatgcacatgctgtatgccggtataccgctgaaagttctgcaaagcctgatgggacat

SEQ ID NO: 127329 - DNA, 1180 bp, Homo sapiens
gaaattagacgtggctgcccatgggagtcatctggcactcaagtgccactggggcacttccaaaactcagaaacctccccagcactcccagatttctgatgtaattgatttgggggattttgccgatttcggaaccaccatcaaacaggattttcgcctgctggggcaaaccagcgtggaccgcttgctgcaactctctcagggccaggcggtgaagggcaatcagctgttgcccgtctcactgcagcaaaacgaaaaataccaagtgcctcaattcgatcaatcaacgattaaaaatattgagtctgcaaaaggacttgatgtgtgggacagctggccgctgcaaaacgctgacggaacagtagctgaatacaacggctatcacgttgtgtttgctcttgcgggaagcccgaaagacgctgatgacacatcaatctacatgttttatcaaaaggctggaaaaacgcgggccgtgtctttaaagacagcgcataagttcgacgccaacgatccgatcctgaaagatcagacgcaagaatggtccggttctgcaacctttacatctgacggaaaaatccgtttattctacactgactattccggtaaacattacggcaaacaaagcctgacaacagcgcaggctgccaaacttgaattcctagtgattcacactagctggcccttcacaggcctcagagagcacgggcaggaagaggccacaggctccaggcctcctgatgcccctgcccccagcagccctaagagtggcctggagcaggtgctgggcaagggtctgctcttcgatacaggaaacagctatgaccatgattacgaattcgagctcggtacccccgttgaactgatggacttatgtcccatcaggctttgcaagaactttcagcggtataccggcatacagcatgtgcatcgcataggaatggcggaacgtatgtggtgtgaccggaacagagaacgtcacaccgtcagcagcagcggcggcaaccgcctccccaatccaggatctggctctgaaggggctacgtgttttgctcgtggaagattctgcagtaacccaaacacatccccagtgaaggacgagggccacaacccaggatgccaggtgtcaggcaactgtcccagtatgccttgccgcacagttactggactccttgaatcttaa

SEQ ID NO: 127330 - DNA, 1293 bp, Homo sapiens
atgagtgaagtcccattcacaattgcttcaaagagaataaaatacctaggaatccaacttacaagggatgtgaagggccacttcaaggagaactacaaaccactgctcaacgaaataaaagaggacacaaacaaatggaagaacattccatgctcatggataggaagaatcaacatcatgaaaatggccatactgctcaaggtatttattcgcgataagctcatggagcggcgtaaccgtcgcacaggaaggacagagaaagcgcggatctgggaagtgacggacagaacggtcaggacctggattggggaggcggttgccgccgctgctgctgacggtgtgacgttctctgttccggtcacaccacatacgttccgccattcctatgcgatgcacatgctgtatgccggtataccgctgaaagttctgcaaagcctgatgggacataagtccatcagttcaacggaagtctacacgaaggtttttgcgctggatgtggctgcccggcaccggtgtgacaatctaaaaacttgtcacacttcacatggatctgtcatggcggaaacagcggttatcaatcacaagaaacgtaaaaatagcccgcgaatcgtccagtcaaacgacctcactgaggcggcatatagtctctcccgggatcaaaaacgtatgctgtatctgttcgttgaccagatcagaaaatctgatggcaccctacaggaacatgacggtatctgcgagatccatgttgctaaatatgctgaaatattcggattgacctctgcggaagccagcattgaagagtttcgcggggaaggaagtggaaattatcgccctgaagaggatgccggcgatgaaaaaggctatgaatcttttccttggtttatcaaacgtgcgcacagtccatccagagggctttacagtgtacatatcaacccatatctcattcccttctttatcgggttacagaaccggtttacgcagtttcggcttagtgaaacaaaagaaatcaccaatccgtatgccatgcgtttatacgaatccctgtgtcagtatcgtaagccggatggctcaggcatcgtctctctgaaaatcgactggatcatagagcgttaccagctgcctcaaagttaccagcgtatgcctgacttccgccgccgcttcgtgcaggtctgtgttaatgagatcaacagcagaactccaatgcgcctctcatacattgagaaaaagaaaggccgccagacgagtcatatcgtattttccttccgcgatatcacttccatgacgacaggatag

SEQ ID NO: 127331 - DNA, 1080 bp, Homo sapiens; identical to SEQ ID NO: 121245

SEQ ID NO: 127332 - DNA, 672 bp, Homo sapiens
tcagggctcgaactctttaagatcaacgttcttgagcacatcacgaagcatatcgaaaaactgcagtgcggaggtgtagtcaaacaactcagcaggcgtgggaacaatcagcacatcagcagcacatacgacattaatcgtgccgatacccaggttaggcgcgctgtcaataactatgacatcatagtcatgagcaacagtttcttcatcaaatttgcccattaactcagtttcaataccgggcacagccacacaggaaggaataatgtcaagcccccgccagcaagtgggctttattgcataagtgacatcgtcctttttcccaagatagaaaggcacgagagatgtcttctgcatgaatatgaagaaatggtacccatccgcgatacattgaggctgttccctggggggcgttacctgctgacgtgtgacgttctctgttccggtccaccacatacgttccgccattcctatgcgatgcacatgctgtatgccggtataccgctgaaagttctgcaaagccgcctggccctgagagagttgcagcaagcggtccacgctggtttgccccagcaggcgaaaatcctgtttgatgggggttccgaaatcggcaaaatccctcatattgtcctctacaaacccgttcagtgcagtctctgggcctttgttcat

SEQ ID NO: 127333 - DNA, 3288 bp, Homo sapiens
ttagttgactgccaactgtcctggctccaggatgctgtttttgacaacggatgttttattgcctttgatgttcattaagaagcttggcgcaaatgttgcctttttatcctcgaagaagcctctgtttgtcatgtagcttgtgataaccacattgttgcctttggcttgcggcactgcgaagtgagagtaagtgaatgtcacatcgtttggatcaagacccatttgcagcacaagccctgttttgttcagcggcttgtaagggccggttaaagagtttgatacataaccaagcatgtaaatatcgtttgagttaataccatcgatcgtcatttttgaaccgcgtgaatcagtgaacaagtaccatttgccgttcattttgaaaacattcgcgcgctcgatttcatcagttaccgtgtttgaagtgatcagcggcttcattacttttttcaatgtgtaatcattatttaactctatgataccgagggcgccgttcgctaactcagcatcgcgttttttagcgctctgctgaagcttctggctttctttacggaagaagttcgtgccgccgccgtagtacgctttgttaaataaagattcttcgccttggtatccgttttctgttcccgtgttggcttcgaatacaaggtatttatggcctttgtcttcaacgtagtgagggtctctcagcgtatggttgtcgccggatgtataattgccttcatcgataaactgctgaacgttctgatatgtttttccgtctccgtcaaaaatcgttttgtgatcttccactcggttgattttgagtgtgtcatcagattttgacacatttacctgcgctgttgtcaggctttgtttgccgtaatgtttaccggaatagtcagtgtagaataaacggatttttccgtcagatgtaaaggttgcagaaccggaccattcttgcgtctgatctttcaggatcggatcgttggcgtcgaacttatcgctgtctttaaagacacggcccgcgtttttccagctgtcgattgagttgtcgccgaccttttgataaaacatgtagattgatgtgtcatcagcgtctttcgggcttcccgcaagagcaaacacaacgtgatagccgttgtattcagctactgttccgtcagcgttttgcagcggccagctgtcccacacatcaagtccttttgcagactcaatatttttaatcgttgattgatcgaattgaggcacttggtatttttcgttttgctgctgtttagggatctgcagcatatcatggcgtgtaatatgagagacgccgtacgtttctttgtatgctttttggttattttctttcgcgaaggcttgagtcgctcctcctgccagaagtgcagtcgtaaaagtcagaactgtggcttgttttacaatttttttgatgttcatgttcatgtctccttctgtatgtactgttttttgcgatctgccgtttcgatcctcccgaattgactttcttggcttcaggatgctgggtgccaccttgaaatcaaggttcggtgggagggaaatgaagaccttagccgtgggtagagtcctcaaggccttgcctgtggtcgacagggccttagtgcccaccagcttgctgtgctgtcgtctgaggacctggccctggtgtcggagtacatggggagaaggcagctgggccttggtgtggaggctgtgggtaggggtccccgagtccttgccttccccagagcctcgctgggtcagcagagggactgctgggcggacccccatccgccgatgacacatcgccatgggcttcttgatggtgaagccctctaccaggagccggatgcccacatattgaggcacctccacagcaggctctgagtcagtacctagagtcacagagctccaggaattgctggccacttggttgatgacaggagcaaagtaggtgggcccatagagctgcactgtgcgcaggctctggaaatagctctccagcacaccctcgatgcccgcacagttggggtcctcatcattgttgtttgccttgagggccatggcatagacgctgagctggtagggactcatgtagtgcagggaggtaggctgcagaggattccctccgactttttcactcatccgtgtctcaccattggaagccgtgaagtcaatggctactgtgaagttcagctgtgtcgtgtctttctccttctcagaactctcatactccaggaacacgatgtgccggggatagtggccacagatatccccattcgtgtttggaatcacgctgaaacagtagtctcggccaaacagctccagacatctcttctcaatgcgctcaacccagggattggctgagacgaaaaacatattctcaataaaccctttagggaaataggccaggtttttcacccgtaccacgcccacattcttgcgaatatattgtgtagaaacgtctttcattgccatacggaactccggatgagcattcatcaggcgggcaagaatgtgaataaaggccggataaaacttgtgcttatttttctttacggtctttaaaaaggccgtaatatccagctgaacggtctggttataggtacattgagcaactgactgaaatgcctcaaaatgttctggattggggaggcggttgccgccgctgctgctgacggtgtgacgttctctgttccggtcacaccacatacgttccgccattcctatgcgatgcacatgctgtatgccggtataccgctgaaagttctgcaaagccggtttggagatgttggttttggagtccacgttgtacacatcgaagcgcagattttgcttttcctcaaagaaatagtcgaggacgaatttgcgcacgaagtctgggttcagcgtgttatcaatcacctcggtccgtccgaactcccgccactcatggctggcccggctctgcgtgtaaagcaccaccatggggtcggacttggagaaggtatcaaggtctagcaggttccggcaggacacggtaatttcaatcttggtggccgggacgctgcgctcggaggctccgccgagagacatggctggtcgggcgaccagagccgcaggaggctgcgagaccagggctgctggggctaggggcgacggcagcggcggggccggcccatgtgccgcggtgtcggcggcggcggcggctgcactcgctccagccctgcgtgcgctccagccgctcgcgccctgacagtggccgccggcggcagcggctccagatggcagcacagccccgcccggccctgcgggcggcccccgccccat

SEQ ID NO: 127334 - DNA, 1350 bp, Homo sapiens; identical to SEQ ID NO: 119093
  misc_feature (1)...(1350): n = a,t,c or g

SEQ ID NO: 127335 - DNA, 783 bp, Homo sapiens; identical to SEQ ID NO: 119094

SEQ ID NO: 127336 - DNA, 891 bp, Homo sapiens
ttagttgactgtcagctgtccttgctccaggatgctgtttttgacaacggatgttttattgcctttgatgttcattaagaagcttggcgcaaatgttgcctttttatcctcgaagaagcctctgtttgtcatgtagcttgtgataaccacattgttgcctttggcttgcggcacatcgatcgtcatttttgaaccgcgtgaatcagtgaacaagtaccatttgccgttcattttgaaaacattcgcgcgctcgatttcatcagttaccgtgtttgaagtgatcagcggcttcattacttttttcaatgtgtaatcattatttaactctatgataccgagggcgccgttcgctaactcagcatcgcgttttttagcgctctgctgaagcttctggctttctttacggaagaagttcgtgccgccgccgtagtacgctttgttaaataaagattcttcgccttggtatccgttttgatactgacacagggattcgtataaacgcatggcatacggattggtgatttcttttgtttcactaagccgaaactgcgtaaaccggttctgtaacccgataaagaaaggaatgagatatgggttgatatgtacactgtaaagccctctggatggactgtgcgcacgtttgataaaccaagggaaagattcatagcctttttcatcgccggcatcctcttcagggcgataaaaaaccactttcttccccgcgaaactcttcaatgcctgccctatatccttacctggattggggaggcggttgccgccgctgctgctgacggtgtgacgttctctgttccggtcacaccacatacgttccgccattcctatgcgatgcacatgctgtatgccggtataccgctgaaagttctgcaaagc

SEQ ID NO: 127337 - DNA, 918 bp, Homo sapiens
atgaaagagaaaccttcttcacctcgacagtactcctattcatttctctcatcaatgatcttattgggggggggtgaaagttggaacctcttacgtgccgatcaacgtctcattttcgccaaaagttggcccagggcttcccggtatcaacagggacaccaggatttatttattctgcgaagtgatcttccgtcacaggtatttattcgcgataagctcatggagcggcgtaaccgtcgcacaggaaggacagagaaagcgcggatctgggaagtgacggacagaacggtcaggacctggattggggaggcggttgccgccgctgctgctgacggtgtgacgttctctgttccggtcacaccacatacgttccgccattcctatgcgatgcacatgctgtatgccggtataccgctgaaagttctgcaaagcctgatgggacataagtccatcagttcaacggaagtctacacgaaaggtttttgcgctggatgtggctgccccgcacccggagtccacaccggtacacctaccatcgcgggagaacaaaattcctccacctattatgagaataccgtgtgggctaccgacatcccccatcgaacagaaacaaggaaaaatatctgccacgggaacacagtggaggaggttaaagcaagaaacgcgcctaagctcggtatcggcacgattaatgtcgtatgtgggggtgatgtgctgattgttcccacgcctgctgagttgtttgactacacctccgcactgcagtttttcgatatgcttcgtgatcttctcaagaacgtttatcttaaagggttcgagcctgatgggctggccattgatcaacgctcttcaactggtgcctggagaaatgctctttctatttgggaacctgtctgcatgaaattttcgatcggctga

SEQ ID NO: 127338 - DNA, 540 bp, Homo sapiens
gctatgtttggattcttcatccggggctatgggtttttcacaccatttggcaggactctttttccacttggatttggttcaaccccacctttcacctttccgcttttgacaaagaccattggggtatttattctcgataagctcatggagcggcgtaaccgtcgcacaggaaggacagagaaagcgcggatctgggaagtgacggacagaacggtcaggacctggattggggaggcgggtgccgccgctgctgctgacggtgtgacgttctctgtttcggtcacaccacatacgttccgccattcctatgcgatgcacatgctgtatgccggtataccgctgaaagatcttcaaagcctgatgggacataaatccatcagttcaacggaaggctacaccaaagatttttcgctggatgtgggtggcccggcaccgggtgcaattttgcgatgcccggagtctgatgcggttggcgatgttgaaacaattattctgagaataaaaaaccttggccttttttttgtaaaatgtgggaactga

SEQ ID NO: 127339 - DNA, 547 bp, Homo sapiens; identical to SEQ ID NO: 119096

SEQ ID NO: 127340 - DNA, 735 bp, Homo sapiens; identical to SEQ ID NO: 119097

SEQ ID NO: 127341 - DNA, 1602 bp, Homo sapiens
atggtgctgattgtagcagccacagtggtggtggtggtcgtggtaggactgtgctggatggcgaaaagtgaatgccgctcagccatgcgtttgtcttcccttcaggttcgcatcttcacatacctcattggacgagaggctgcgtttgcagacaatctaaagtggatggcctgtgccaacaaagagtcagcccttcttgatcgtttcatcttcctcattctgcttctatgtaaagagccttgggaatgtcactgtttgccactcttcaaagtagcaatgccatcaaaatgtgatattccagtcatctgtgcccatataaacattggcttcacgttgcgtcagttaaggggttttggaccatgtaacatcggcagctttgaggcaaaagactctaaaaatccccaagtaagggtaatatctcagaaacacaaagcactgcgttgcatatggtttatcacatgcagtatttgtaacccagagttcacagaaggagctctgcaagggaataagcagcgaaagaggcagtgtcttcagtggttcagagcaaaggctttggaatcaaatgaacctggattcgaattcatccaggacaaattactgactcagagtttgtgtttcttcccctacacgttcctctggctaactggtcctcatccttcaggttctagctacactgacccttgctcaagcaaagctgatgtgaccccaagctctacagcagtacaggaacatagcagcgccctggaactaaagaccaaaatagtgtcaccaatcacaagacaacagcatggattttttacccagatctccaccttggctgatgtgcaggagaatgtcatggaataccttcacgtgcttagccggcccaaagtcatcgaccaggagcatgatgtggtgtggaccgaagcttacattgacagcactgtctgccgggtgaagagaaggcagctgctgcttcaacaggtacctctgaccaggaagcagcagtttcttccagctccttatgtggacctggattctgccaggacacgaacaaacaaacaacaacaaaaccccatcatttatacggggtcaaaacagggttcacatgtgatcttatttcattatggtgaaagttggaacctcttacgtgccgatcaacgtctcattttcgccaaaagttggcccagggcttcccggtatcaacagggacaccaggatttatttattctgcgaagtgatcttccgtcacaggtatttattcgcgataagctcatggagcggcgtaaccgtcgcacaggaaggacagagaaagcgcggatctgggaagtgacggacagaacggtcaggacctggattggggaggcggttgccgccgctgctgctgacggtgtgacgttctctgttccggtcacaccacatacgttccgccattcctatgcgatgcacatgctgtatgccggtataccgctgaaagttctgcaaagcctgatgggacataagtccatcagttcaacggaagtctacacgaaggtttttgcgctggatgtggctgcccggcaccgggtgcagtttgcgatgccggagtctgatgcggttgcgatgctgaaacaattatcctga

SEQ ID NO: 127342 - DNA, 1626 bp, Homo sapiens
ttacgccccgccctgccactcatcgcagtactgttgtaattcattaagcattctgccgacatggaagccatcacaaacggcatgatgaacctgaatcgccagcggcatcagcaccttgtcgccttgcgtataatatttgcccatggtgaaaacgggggcgaagaagttgtccatattggccacgtttaaatcaaaactggtgaaactcacccagggattggctgagacgaaaaacatattctcaataaaccctttagggaaataggccaggttttcaccgtaacacgccacatcttgcgaatatatgtgtagaaactgccggaaatcgtcgtggtattcactccagagcgatgaaaacgtttcagtttgctcatggaaaacggtgtaacaagggtgaacactatcccatatcaccagctcaccgtctttcattgccatacggaactccggatgagcattcatcaggcgggcaagaatgtgaataaaggccggataaaacttgtgcttatttttctttacggtctttaaaaaggccgtaatatccagctgaacggtctggttataggtacattgagcaactgactgaaatgcctcaaaatgttctggattggggaggcggttgccgccgctgctgctgacggtgtgacgttctctgttccggtcacaccacatacgttccgccattcctatgcgatgcacatgctgtatgccggtataccgctgaaagttctgcaaagcatcaggctcgaaccctttaagatcaacgttcttgagcagatcacgaagcatatcgaaaaactgcagtgcggaggtgtagtcaaacaactcagcaggcgtgggaacaatcagcacatcagcagcacatacgacattaatcgtgccgatacccaggttaggcgcgctgtcaataactatgacatcatagtcatgagcaacagtttcaatggccagtcggagcatcaggtgtggatcggtgggcagtttaccttcatcaaatttgcccattaactcagtttcaatacggtgcagagccagacaggaaggaataatgtcaagccccggccagcaagtgggctttattgcataagtgacatcgtccttttccccaagatagaaaggcaggagagtgtcttctgcatgaatatgaagatctggtacccatccgtgatacattgaggctgttccctgggggtcgttaccttccacgagcaaaacacgtagccccttcagagccagatcctgagcaagatgaacagaaactgaggttttgtaaacgccacctttatgggcagcaaccccgatcaccggtggaaatacgtcttcagcacgtcgcaatcgcgtaccaaacacatcacgcatatgattaatttgttcaattgtataaccaacacgttgctcaacccgtcctcgaatttccatatccgggtgcggtagtcgccctgctttctcggcatctctgatagcctgagaagaaaccccaactaaatccgctgcttcacctattctccagcgccgggttattttcctcgcttccgggctgtcatcattaaactgtgcaatggcgatagccttcgtcatttcatgaccagcgtttatgcactggttaagtgtttccatgagtttcat

SEQ ID NO: 127343 - DNA, 1239 bp, Homo sapiens; identical to SEQ ID NO: 119102

SEQ ID NO: 127344 - DNA, 1026 bp, Homo sapiens; identical to SEQ ID NO: 124784

SEQ ID NO: 127345 - DNA, 936 bp, Homo sapiens
atgctgcagatccctaaacagcagcaaaacgaaaaataccaagtgcctcaattcgatcaatcaacgattaaaaatattgagtctgcaaaaggacttgatgtgtgggacagctggccgctgcaaaacgctgacggaacagtagctgaatacaacggctatcacgttgtgtttgctcttgcgggaagcccgaaagacgctgatgacacatcaatctacatgttttatcaaaaggtcggcgacaactcaatcgacagctggaaaaacgcgggccgtgtctttaaagacagcgataagttcgacgccaacgatccgatcctgaaagatcagacgcaagaatggtccggttctgcaacctttacatctgacggaaaaatccgtttattctacactgactattccggtaaacattacggcaaacaaagcctgacaacagcgcagacccaacaccaggtcgtgtgggtgacaaagtccggtggagtcaaaggattgagaaaaagacagtttgagagagaaatgtgggcatcagggggccattgcgattgtggaggctgtgaaggccctgagctctgggagtccacgttatttattggtaattcaacaaagaaacatatggcaaggacagagaaagcgcggatctgggaagtgacggacagaacgggcatgacctggattggggaggcgggtgccgccgctgctgctgacggtgtgacgttctctgttccggtcacaccacatacgttccgccattcctatgcgatgcacatgctgtatgccggtataccgctgaaaggtctgcaaagcctgatgggacataactccatcagttcaacggaagtctacacgaaggtttttgcgctggatgtggctgcccggcaccgtgtgcaatttgcgatgcccgagtctgatgctgttgcgatgctgaaacaattatcctga

SEQ ID NO: 127346 - DNA, 1281 bp, Homo sapiens; identical to SEQ ID NO: 119103

SEQ ID NO: 127347 - DNA, 708 bp, Homo sapiens
atgatctgcaaaacctgctgccacatcatgctgtcccaagaggagaagaagcagtttctggactatctaaagaggcccggcctgacctaccttcagaagcgaggactgaaaaagaaaatctctgacaagtgccggaagaaaaacatctgccatcactgtggcgcttttaatgatcatgtttattgttgcacattcaggtttttgaaatacggaaatcgagaaaagatggctcaagagctcaagtatggtgacatcgtagagagacacctcatcgatggagatgtggtgctgttcaatcggcagccctcgctgcacaaattgagcattatggctcatctggtatttattcgcgataagctcatggagcgttgtaaccgtcgcacaggaaggacagagaaagcgcggatctgggaagtgacggacagaacggtcaggacctggattggggaggcggttgccgccgctgctgctgacggtgtgacgttctctgttccggtcacaccacatacgttccgccattcctatgcgattcacatgctgtatgccggtataccgctgaaagttctgcaaagcctgatgggacataagtccatcagttcaacggaagtctacacgaaggtttttgcgctggatgtggctgcccggcaccgggtgcagtttgcgatgccggagtctgatgcggttgcgatgctgaaacaattatcctga

SEQ ID NO: 127348 - DNA, 895 bp, Homo sapiens; identical to SEQ ID NO: 119104

SEQ ID NO: 127349 - DNA, 429 bp, Homo sapiens
cagcatcattgcggcctgttgtggcgtcaggatccctgcctgatgctcaccatacaacggctgtttctcattgcgagcatccggtgaaagcgtacccggcgcactgtgacgtttttgtgcatgagcgaccggacagtttcccggcagggccagtgcacctatcactttcaggaaacgtcggcgggacgggtcaatcacgccggccgcccatttgcaggtcatccatggaccaacgttggtatatccactgatttttatctccattttagcttccttagctcctggattggggaggcggttgccgccgctgctgctgacggtgtgacgttctctgttccggtcacaccacatacgttccgccattcctatgcgatgcacatgctgtatgccggtataccgctgaaagttctgcaaagcctgatgggacat

SEQ ID NO: 127350 - DNA, 1419 bp, Homo sapiens; identical to SEQ ID NO: 117440

SEQ ID NO: 127351 - DNA, 2787 bp, Homo sapiens
atgaacaactccagaggcgccgccttaagagctataacactcactgcgaaggtccgcggcttcattcttgaagtcggctcagcccgcggccacctacgccccgcccctgccggctgcgcccgagcccagtcccgcgagccgctccccggcgggctggctcttggccccggaagcgcgagcgttcacttcgcggcgagtggctccgtctccgcggacagagcgcgcgccccctggcccggcccgcgggggggggctccggcacggtccccgagcgtttcccgccgggtggagcgggccgagcccagcaggttgaccagccccgcggccacgcagagccgggagatctactgtttgagcgcggaagcgcagaggctggcggaggcccggctcgccgcaaaacgggaggcccgcgcggaggctcgtgagatccccatgaaggagctggagcggcagcagaaggaggtagaagagagaccagaaaaatattttactgagaaggggtctcgtaacatgctgggcccgtctgcagccacgctggcctttctgggtgggacttcctctcagagaggcagcggagacacctctatatccatcgacaccgaggcgtccatcagggaaatcaaggactctctagcagaagttgaagagaaatgtaagaaggctatgttttccaatgctcagttagacaatgaaaacacaaacttcatttaccaagttgacaccctgaaagatatgttgctggagattgaagaacagctggctgaatataggcggcaatcctaccaagatgacgaaagaagagttaaatgccctcaagtcgacaggggatgggaccctaggaaagccagtgaggtggaggtgaagaatgaaatcgtggcgaatgtggggaaaagagaaatcttgcacaatactgagaaagaacaacacacagaggacacagtgaaggattgtgtggacatagaggtattcactgctggtgagaataccgaggaccagaaatcctctgaagacactgccccattcctaggaaccttagcaggtgctacctatgaggaacaggttcaaagccaaattcttgagagcgcttctctccctgaaaacacagcacaggttgagtcaaatgaggtcatgggtgcaccagatgacaggaccagaactccccttgagccatccaactgttggagtgacttagatggtgggagccacacagagaatgtgggagaggcagcggtgactcaggttggagagcaggcagacacagtggcctcatgtcctttagggcatagtgatgacacagtttatcatgatgacagatgtatggtagaggtcccccaacagttagagacaagcatagggcatagtttagagaaagaattcaccaaccaggaagcagctgagcccaaggaggttccagtgcagagtacagaagcaggtagggatcacaacgaagaagagggtgaagaaaaaggattaagggatgagaaaccaatcaagacagaagttcctggttctccagcaggaactgagagcaagggtcaggaggcgacaggtccaagtacagtagacactcaaagtgaaccctcagatatgaaagagccagatgaagaaaagaatgaccaacagggagaggcattggactcattgcagaagagaaagaacaagaaaaagaaaaagaagaggaaaaaatccccaaacacagatttaagtgaaattaaggaagaagagcaggtaaagtctactgacagaaagtcagcagtggaagcccaaaacgaggtgactgaaaatccaaaacagaaaattgcagcagaaagcagtgaaaatgttgattgtccagagaatcctaaaatgaagttggatggaaaacttgaccaagaaggcaatgatgtaaaaacagcagctgaggaggtactagctggtagagacacattagattttgaggatgtcacagttcaatcatcaggcccgagggctggtggtgaagaattagatgaaggtgttgcaaaagataatgctaaaatagctgacaccctgccctgcgagaatgtatctcatcctttgctggagcaggtttgcaggcacagtggagagaggagagaagaaatgaagggacacttatgcagaaccatgagtggccagagaggaggagaaggagggacagcctttcctgcctcagggaagaagagagagacagactacagtgatggagacccactagatgtgcacaagaggctgccatccagtgctggagaggaccgagccgtgatgctggggtttgccatgatgggcttctcagtcctaatgttcttcttgctcggaacaaccattctaaagccttttatgctcagttggcccagggcttcccggtatcaacagggacaccaggatttatttattctgcgaagtgatcttccgtcacaggtatttattcgcgataagctcatggagcggcgtaaccgtcgcacaggaaggacagagaaagcgcggatctgggaagtgacggacagaacggtcaggacctggattggggaggcggttgccgccgctgctgctgacggtgtgacgttctctgttccggtcacaccacatacgttccgccattcctatgcgatgcacatgctgtatgccggtataccgctgaaagttctgcaaagcctgatgggacataagtccatcagttcaacggaagtctacacgaaggtttttgcgctggatgtggctgcccggcaccgggtgcagtttgcgatgccggagtctgatgcggttgcgatgctgaaacaattatcctga

SEQ ID NO: 127352 - DNA, 416 bp, Homo sapiens
cttcatcaaatttgcccattaactcagtttcaataccgggcacagccacacaggaaggaataatgtcaagcccccgccagcaagtgggctttattgcataagtgacatcgtcctttttcccaagatagaaaggcacgagagatgtcttctgcatgaatatgaagaaatggtacccatccgcgatacattgaggctgttccctggggggcgttacctgctgacgtgtgacgttctctgttccggtccaccacatacgttccgccattcctatgcgatgcacatgctgtatgccggtataccgctgaaagttctgcaaagccgcctggccctgagagagttgcagcaagcggtccacgctggtttgccccagcaggcgaaaatcctgtttgatgggggttccgaaatcggcaaaatcc

SEQ ID NO: 127353 - DNA, 1434 bp, Homo sapiens; identical to SEQ ID NO: 119110

SEQ ID NO: 127354 - DNA, 858 bp, Homo sapiens
atgctgcagatccctaaacagcagcaaaacgaaaaataccaagtgcctcaattcgatcaatcaacgattaaaaatattgagtctgcaaaaggacttgatgtgtgggacagctggccgctgcaaaacgctgacggaacagtagctgaatacaacggctatcacgttgtgtttgctcttgcgggaagcccgaaagacgctgatgacacatcaatctacatgttttatcaaaaggtcggcgacaactcaatcgacagctggaaaaacgcgggccgtgtctttaaagacagcgataagttcgacgccaacgatccgatcctgaaagatcagacgcaagaatggtccggttctgcaacctttacatctgacggaaaaatccgtttattctacactgactattccggtaaacattacggcaaacaaagcctgacaacagcgcaggcattgccccaaacactgaccctcaactgtgtttgcagaaatttgctctttgaaacagaaaagcgaaagctcatggagcggcgtaaccgtcgcacaggaaggacagagaaagcgcggatctgggaagtgacggacagaacggtcaggacctggattggggaggcggttgccgccgctgctgctgacggtgtgacgttctctgttccggtcacaccacatacgttccgccattcctatgcgatgcacatgctgtatgccggtataccgctgaaagttctgcaaagcctgatgggacataagtccatcagttcaacggaagtctacacgaaggtttttgcgctggatgtggctgcccggcaccgggtgcagtttgcgatgccggagtctgatgcggttgcgatgctgaaacaattatcctga

SEQ ID NO: 127355 - DNA, 1098 bp, Homo sapiens
atgctggcatctgctcagcttctggggatgcctcaggaaacctacaatcatgatagaggtgaagggggagcagacacttcacatggtgaaagcaggaggaagacagagagcagggagttgtggcttacagcaggggtcctcaaatccctggctgcagaccagtatcagtccagtgcgtggcctcttagaaacccggcagcacggcaggaggctttgcagaactttcagcggtataccggcatacagcatgtgcatcgcataggaatggcggaacgtatgtggtgtgaccggaacagagaacgtcacaccgtcagcagtctagcgcgcaaccgcctccccaatccaggtcctgaccgttctttcatctgtgaggaagagggccaccatcctccaggtctctgtgaaggtagatccactgacaactttcactctgtgtctggaaaagatgcagacactcaaccccagctcatgagagcagctgtgggggctaaatcctgcaaagccacaagggcagagctttccagggccttgggagctcactccttcacaccagtgtgccctggatacaaaggccataaataccttgtattcgaagccaacacgggaacagaaaacggataccaaggcgaagaatctttatttaacaaagcgtactacggcggcggcacgaacttcttccgtaaagaaagccagaagcttcagcagagcgctaaaaaacgcgatgctgagttagcgaacggcgccctcggtatcatagagttaaataatgattacacattgaaaaaagtaatgaagccgctgatcacttcaaacacggtaactgatgaaatcgagcgcgcgaatgttttcaaaatgaacggcaaatggtacttgttcactgattcacgcggttcaaaaatgacgatcgatggtattaactcaaacgatatttacatgcttggttatgtatcaaactctttaaccggcccttacaagccgctgaacaaaacagggcttgtgctgcaaatgggtcttgatccaaacgatgtgacattcacttactctcacttcgcagtgccgcaaccaaaggcaacaatgtggttatcacaagctacatga

SEQ ID NO: 127356 - DNA, 1050 bp, Homo sapiens
atgaatcggcaactaagtgactcctatacagaagacaccaaagagccatcagatgtcaccacatctgagagaaccagaagtcctccaggttctgccaaaaccactatgatagacaccttgaaaaaactgcaggatgtactaaaaactgaggactccaaaaatcccacaaagtcagcagcagatttgttggaacaatatgtcaaggctacgggaccaatcatagagatcctccaaaaagcgacaaagactatggaaatgatcatgattgtggaggagaaagccagtgacgaactccaacctgacccggagctccagcagcgatacatccacagtgtccgtgggaagcccgggctggtgaagcagcggacacaggagattgagacccggctccggctggcgggcctcaccgtctcttccccactgaagcgctcacactctcttgccaagctggggagtctcaccttctcaacggaagacctgtccagccgtccccctggacctcccccaggtccacctccaggtctgcatcctggtccccctcctcgtagacccccaccaaagctacctccccctgcacctccaggttgttctgtccattgctgtcattatccgctccacttcgtcgtgtcaccgctcgaaggtttctattgttccttgatgcgtattcaaatcgttttcgttaccgctttcgtgcatcatgacagtgcactgcttcctcttgacgcttcactggctcctgaggctttgcagaactttcagcggtataccggcatacagcatgtgcatcgcataggaatggcggaacgtatgtggtgtgaccggaacagagaacgtcacaccgtcagcagcagcggcggcaaccgcctccccaatccagctcccttgccaaaccctggggttttaagtgccccacccaacttgattcagcgacccaaggcggatgatacaagtgcagccaccattgagaagaaagccacagcaaccatcagtgccaagccacagatcactaatcccaaggcagagattactcgattttgcccactgcactga

SEQ ID NO: 127357 - DNA, 1185 bp, Homo sapiens
atggaaattcgaggacgggttgagcaacgtgttggttatacaattgaacaaattaatcatatgcgtgatgtgtttggtacgcgattgcgacgtgctgaagacgtatttccaccggtgatcggggttgctgcccataaaggtggcgtttacaaaacctcagtttctgttcatcttgctcaggatctggctctgaaggggctacgtgttttgctcgtggaaggtaacgacccccagggaacagcctcaatgtatcacggatgggtaccagatcttcatattcatgcagaagacactctcctgcctttctatcttggggaaaaggacgatgtcacttatgcaataaagcccacttgctggccggggcttgacattattccttcctgtctggctctgcaccgtattgaaactgagttaatgggcaaatttgatgaaggtaaactgcccaccgatccacacctgatgctccgactggccattgaaactgttgctcatgactatgatgtcatagttattgacagcgcgcctaacacgcgcacaggcacgaaaaaagcccaatgtgctacccaaagagcggataagaaccacacccgccgaaggaacaagactacaccgcccggccggacagttagaacccatggcaaagaagttaaaaacctcgaaggaaaattagacgactggctaataaaaataaccaattcagagaagtccttaaaggacctaatggagctgaaaaccaaggcacgagaactatgtgatgaatgtacaagcctcagtagccaattcgatcaactggaagaaaggcccagcctaggggagctggacaaggtatttattcgcgataagctcatggagcggcgtaaccgtcgcacaggaaggacagagaaagcgcggatctgggaagtgacggacagaacggtcaggacctggattggggaggcggttgccgccgctgctgctgacggtgtgacgttctctgttccggtcacaccacatacgttccgccattcctatgcgatgcacatgcttgatgccggtataccgctgaaagttctgcaaagcctgatgggacataagtccatcagttcaacggaagtctaccacaaggtttttgccttggaatgtggctgcccagcaccgggtgccaatttgccattgccggaatccgaattccgatgccaagcctaa

SEQ ID NO: 127358 - DNA, 1653 bp, Homo sapiens
ttacgccccgccctgccactcatcgcagtactgttgtaattcattaagcattctgccgacatggaagccatcacaaacggcatgatgaacctgaatcgccagcggcatcagcaccttgtcgccttgcgtataatatttgcccatggtgaaaacgggggcgaagaagttgtccatattggccacgtttaaatcaaaactggtgaaactcacccagggattggctgagacgaaaaacatattctcaataaaccctttagggaaataggccaggttttcaccgtaacacgccacatcttgcgaatatatgtgtagaaactgccggaaatcgtcgtggtattcactccagagcgatgaaaacgtttcagtttgctcatggaaaacggtgtaacaagggtgaacactatcccatatcaccagctcaccgtctttcattgccatacggaactccggatgagcattcatcaggcgggcaagaatgtgaataaaggccggataaaacttgtgcttatttttctttacggtctttaaaaaggccgtaatatccagctgaacggtctggttataggtacattgagcaactgtctgaaatgcctcaaaatgttctggattggggaggcggttgccgccgctgctgctgacggtgtgacgttctctgttccggtcacaccacatacgttccgccattcctatgcgatgcacatgctgtatgccggtataccgctgaaagttctgcaaagctctgatggtagtttctttggctgtgcagaagctctttagtttaattagatcccatttgtcaattttggcttttgttgccattgcttttggtgttttggacatgaagtccttgcccacgcctatgtcctgaatggtaatgcctaggttttcttctagggtttttatggttttaggtctaacgtttaaatctttaatccatcttgaattgatttttgtataaggtgtaaggaagggatccagtttcagctttctacatatggctagccagttttcccagcaccatttattaaatagggaatcctttccccattgcttgtttttctcaggtttgtcaaagatcagatagttgtagatatgcggcattatttctgagggctctgttctgttccattgatctatatctctgttttggtaccagtaccatgctgttttggttactgtagccttgtagtatagtttgaagtcaggtagtgtgatgcctccagctttgttcttttggcttaggattgacttggcgatgcaggctcttttttggttccatatgaactttaaagtagttttttcccattcctcggcaccaggctccctcctccagtaggccacaaggaactcaaactggggccccaggtcctccagctcaataaccaggtggaagccatctttggtgatctccatcccaggtcgggtaaggatggctgttggcaagacaacaggagagtcaaagccagccccagacagggttgatttcccccgtgagggggcatattttgggcccacacccaccccttccaaggagaaaattttcctgggactgatgtagttcaccaaatttacatcccctccagcaatgtacaaatgtttgcttttctctgcatcctcatcaacctttttattgttctttttgataaaagccat

SEQ ID NO: 127359 - DNA, 1089 bp, Homo sapiens
atgcttcaaagcaaccgaaccgccgccagccattcaccatccatccagccagccatccagccagccatccagccagccaaccaactatccatccacaatttgtggacacaattccggcattcaaccaaaattccagttgaatgggtgaatggtgaatggctgaatggacgaatgccaggggatcatcatgaatggcaatgcaactatcaggctttgcagaactttcagcggtataccggcatacagcatgtgcatcgcataggaatggcggaacgtatgtggtgtgaccggaacagagaacgtcacaccgtcagcagcagcggcggcaaccgcctccccaatccagacaaaggccataaatacctggtattcgaagccaacacgggaacagaaaacggataccaaggcgaagaatctttatttaacaaagcgtactacggcggcggcacgaacttcttccgtaaagaaagccagaagcttcagcagagcgctaaaaaacgcgatgctgagttagcgaacggcgccctcggtatcatagagttaaataatgattacacattgaaaaaagtaatgaagccgctgatcacttcaaacacggtaactgatgaaatcgagcgcgcgaatgttttcaaaatgaacggcaaatggtctctcatgaaaatctacagctttttcatcaagaatgaaggctcagcagtgttgagacatgtggacccacaccagttagtaatcgccgtgggagagaaagttcctggctgccgggtcagcgtggtccattcaaggagtacggtagagacctccatgtctccacagccctccctcttcagaagaaggactggtgtcttgtggcctagagcctcatcttggatggtgggtataagtgcggagccgcatcctcagtgcgtccccacggtgatcagtagggatgtcgggtctgggggatatgatcgagatttcgacagcgtctgtgttaatgagatcaacagcagaactccaatgcgcctctcatacattgagaaaaagaaaggccgccagacgactcatatcgtattttccttccgcgatatcacttccatgacgacaggatag

SEQ ID NO: 127360 - DNA, 1695 bp, Homo sapiens
tcacattgtgaagttggacaaataaaacatcttttcagtttttgttccctttattacaacattttttagaaccatgcttccccaggcatcccgaatttgctcctccatccacggggactgagagccattactattgctgtatttggtaagcaaaatacgtacatcaggctcgaaccctttaagatcaacgttcttgagcagatcacgaagcatatcgaaaaactgcagtgcggaggtgtagtcaaacaactcagcaggcgtgggaacaatcagcacatcagcagcacatacgacattaatcgtgcccaatacccaggttaggcgcgctgcaggaccaacaccatgtggaagctgccaaggcttggagcttgcatcctctgaagcaatggcccaagctgtcccttggccccttttagtcatagctggagtggctggggtgtagggcaccaagtcctccatgcaagggggccccaatgtatacatctccacgccttcattggctggggctctagttttatttctaggaccgcctttggtggatgttacccttcttgtgctatctggcgattttggactgagatttatggtagaagtaatcgttggctgtttcttttccaaagtgcatgaagcgttttcttttggcagtgggggctcagaaatatttaccactcgtttcttctggtggcccaggtcgtaagagacggctcttgaggggtagagagtaatttggtggttgtggttgcgctctgccacaggcttatttatttggtttgggggacaagaacggtcaggacctggattggggaggcggttgccgccgctgctgctgacggtgtgacgttctctgttgcggtcacaccacatacgttccgccattcctatgcgatgcacatgctgtatgccggtataccgctgaaagttctgcaaagcgagggtggttgcgctggatgtggctgcccggcaccgggtgcagtttgcgatgccggagtctgatgcggttgcgatgctgaaacaattatcctgagaataaatgccttggcctttatatggaaatgtggaactgagtggatatgctgtttttgtagggcattgaaagcgtagggtctggttgcttcttgggttgcctctgaccccagtagcttccagggcaggatggcttgatctgcctgaactctgctgtggctctggctgtgaggcccatatgctctgcattttgttgttcaaacccaggactttcctagttgatggtcctcggagccccttatctggagggtcaggattctcagctactgtcctgtgcatctctggggtatgaaggactttctggagtttctttcccaaaacatctctcctctctgcttgtggctgttgagttacattctttcctggttcctctctcctcccagcttctttagcagttttggctaaggatttttcttcctcctctaggctcacagatgtctcttccatgcccttccttgatggagcgttacaaaaatctttgaccatttctggcaaaatagacaaaacatctctcctctctgcttctggctgttgagttacattctttcctggttcctctctcctcccagcttctttagcagttttggctaaggatttttcttcctcctctaggctcacagatgtctcttccatgcccttccttgatggagcgttacaaaaatctttgaccat

SEQ ID NO: 127361 - DNA, 1172 bp, Homo sapiens
ttactgttgtaattcattaagcattctgccgacatggaagccatcacaaacggcatgatgaacctgaatcgccagcggcatcagcaccttgtcgccttgcgtataatatttgcccatggtgaaaacgggggcgaagaagttgtccatattggccacgtttaaatcaaaactggtgaaactcacccagggattggctgagacgaaaaacatattctcaataaaccctttagggaaataggccaggttttcaccgtaacacgccacatcttgcgaatatatgtgtagaaactgccggaaatcgtcgtggtattcactccagagcgatgaaaacgtttcagtttgctcatggaaaacggtgtaacaagggtgaacactatcccatatcaccagctcaccgtctttcattgccatacggaactccggatgagcattcatcaggcgggcaagaatgtgaataaaggccggataaaacttgtgcttatttttctttacggtctttaaaaaggccgtaatatccagctgaacggtctggttataggtacattgagcaactgactgaaatgcctcaaaatgttctggattggggaggcggttgccgccgctgctgctgacggtgtgacgttctctgttccggtcacaccacatacgttccgccattcctatgcgatgcacatgctgtatgccggtataccgctgaaagttctgcaaagccttgctgaagaccacatgcttgccatccaaccactcagtcttggcagcacagatgaaaaactgggaactgtttgcgttgggtccagcatttgccatggacaagatgccagaaactgtatgcttccggatgaagttcttgtcatcaaatttctccctgtagatggacttgccaccagtgccatcatggcatgtgaagtctcccaccctaattcctgttggtgtagatgcttcataggggaacatttccttaagaatatccctttctactcttctttcctctgttttttctcccacctcatgaataacttgattaatggggtaggtgattaaaatttcaatagaatcaactgagacaaaaattttaaactgactcatttgaatttcaactttacagtcattgaccataaagcccactacaaatgtaacgttattcttcacatcatctcgaataaaaatcctta

SEQ ID NO: 127362 - DNA, 987 bp, Homo sapiens
atggtggccttttacctctctactcacatcaggagggcccagatccacgcaaccacgtgtatgcctactacattcctgcaccaaaccatccagggagttcccagaggcttttcatacctggcagtgctgaccgtggccatccagacctgtttagagatgcagctttctccagcatccacccgctgctcctggtttggctgctggaggccatcaagaacaaatctaatcccttctgacagtcgtattgagagacaagacacctacccattccccagtcattctcttcagcccatgctcaacgccttcagattcttcagagtctctgaaaatgtgataatgaggctactggtatttattcgcgataagctcatggagcggcgtaaccgtcgcacaggaaggacagagaaagcgcggatctgggaagtgacggacagaacggtcaggacctggattggggaggcggttgccgccgctgctgctgacggtgtgacgttctctgttccggtcacaccacatacgttccgccattcctatgcgatgcacatgctgtatgccggtataccgctgaaagttctgcaaagcctgatgggacataagtccatcagttcaacggaagtctacacgaaggtttttgcgctggatgtggctgcccggcaccggaaccggtttacgcagtttcggcttagtgaaacaaaagaaatcaccaatccgtatgccatgcgtttatacgaatccctgtgtcagtatcgtaagccggatggctcaggcatcgtctctctgaaaatcgactggatcatagagcgttaccagctgcctcaaagttaccagcgtatgcctgacttccgccgccgcttcctgcaggtctgtgttaatgagatcaacagcagaactccaatgcgcctctcatacattgagaaaaagaaaggccgccagacgactcatatcgtattttccttccgcgatatcacttccatgacgacaggatag

SEQ ID NO: 127363 - DNA, 580 bp, Homo sapiens
gatactgacacagggattcgtataaacgcatggcatacggattggtgatttcttttgtttcactaagccgaaactgcgtaaaccggttctgtaacccgataaagaaaggaatgagatatgggttgatatgtacactgtaaagccctctggatggactgtgcgcacgtttgataaaccaagggaaagattcatagcctttttcatcgccggcatcctcttcagggcgataaaaaaccactttcttccccgcgaaactcttcaatgcctgccctatatccttacctggattggggaggcggttgccgccgctgctgctgacggtgtgacgttctctgttccggtcacaccacatacggtccgccattcctatgcgatgcacatgctgtatgccggtataccgctgaaagttctgcaaagcctcttcttttaagttctctaataatgggcagactttggaagccttaaccaatacccgaacttgggtaagggtaaataaaactttcccaagagtgcttcccttgttgctggggctgtcttccttggccgggcctgggttccttgtggttcggggaagaaccat

SEQ ID NO: 127364 - DNA, 426 bp, Homo sapiens
atggcgtccgagcggggtcgacatttcttgcggaaggaagcatctaatgggaccacgccgaagtatctttcgattcccaagaatatatgccggaaagatgatgtcagcgagagccaatgtaatggcgcggacgtcgcggctagtccaggagtcgtccgctttgattttttctccggctttgagccgctcccatcgttcgctttgcagaactttcagcggtataccggcatacagcatgtgcatcgcataggaatggcggaacggttatctccatggcgccatgccacctttttgtctcccgtgggcgggtttcacacggcggaccggtccttcatccgccgcggtgttgaaggcggtaataaaaacccccataagcggatccgtaggaccccggacccgaaaggaaccaggacgccagatcactaa

SEQ ID NO: 127365 - DNA, 1749 bp, Homo sapiens; identical to SEQ ID NO: 124762

SEQ ID NO: 127366 - DNA, 1923 bp, Homo sapiens
  misc_feature (1)...(1923): n = a,t,c or g
atgaaactcatggaaacacttaaccagtgcataaacgctggtcatgaaatgacgaaggctatcgccattgcacagtttaatgatgacagcccggaagcgaggaaaataacccggcgctggagaataggtgaagcagcggatttagttggggtttcttctcaggctatcagagatgccgagaaagcagggcgactaccgcacccggatatggaaattcgaggacgggttgagcaacgtgttggttatacaattgaacaaattaatcatatgcgtgatgtgtttggtacgcgattgcgacgtgctgaagacgtatttccaccggtgatcggggttgctgcccataaaggtggcgtttacaaaacctcagtttctgttcatcttgctcaggatctggctctgaaggggctacgtgttttgctcgtggaaggtaacgacccccagggaacagcctcaatgtatcacggatgggtaccagatcttcatattcatgcagaagacactctcctgcctttctatcttggggaaaaggacgatgtcacttatgcaataaagcccacttgctggccggggcttgacattattccttcctgtctggctctgcaccgtattgaaactgagttaatgggcaaatttgatgaaggtaaactgcccaccgatccacacctgatgctccgactggccattgaaactgttgctcatgactatgatgtcatagttattgacagcgcgcctaacctgggtatcggcacgattaatgtcgtatgtgctgctgatgtgctgattgttcccacgcctgctgagttgtttgactacacctccgcactgcagtttttcgatatgcttcgtgatctgctcaagaacgttgatcttaaagggttcgagcctgatctctccagcttcgctaagcaggccctgtcccaggcccagaagtctattgacagggttctggacatccaggaagaggagccgagcatctgggccgagaccattccgtatggagagccgggtatttattcgcgatttttcatggagcggcgtaaccgtcgcacaggaaggacagagaaagcgcggatctgggaagtgacggacagaacggtcaggacctggattggggaggcggttgccgccgctgctgctgacggtgtgacgttctctgttccggtcacaccacatacgttccgccattcctatgcgatgcacatgctgtatgccggtataccgctgaaagttctgcaaagcctgatgggacataagtccatcagttcaacggaagtctacacgaaggtttttgcgctggatgtggctgcccggcaccggtgtgacaatctaaaaacttgtcacacttcacatggatctgtcatggcggaaacagcggttatcaatcacaaaaaaagtaaaaatagcccgcgaatcgtccagtcaaacgacctcactgaggcggcatatagtctctcccgggatcaaaaacgtatgctgtatctgttcgttgaccagatcagaaaatctgatggcaccctacaggaacatgacggtatctgcgagatccatgttgctaaatatgctgaaatattcggattgacctctgcggaagccanaatatgccaagagggagccctgagcagtgctccagaacagggatcggcatgggcagaagctcagaggggtgagcgaacaggagtcagtggggtgggggctttgcagaactttcagcggtgtaccggcatacagcatgtgcatcgcataggaatggcggaacgtatgtggtgtgaccggaacagagaacgtcacaccgtcagcagcagcggcggcaaccgcctccccaatgggtaccgagctcgaattcgtaatcatggtcatagctgtttcctgtgtgaaattgttatccgctcacaattccacacaacatacgagccggaagcataa

SEQ ID NO: 127367 - DNA, 2536 bp, Homo sapiens
atggggatgacagtacctgctctacttctcgggattgtcatgaggttcaaactaagcgacagagcctatgtgactgtgctggctgttaagctattgtttctcagcactaatccacctctgctctgggatgctggagctgggactctgcaaaccacgctccccctgccagctgctccttgttacgattgccaaaagcggggaatggtcacagggcacgtcccaggacaagcagaggcaagcaagcagggcacctgggacgcagcacgtcaggaggcactgactctctgtgtggaccctgcagttgcccaaccacatggaaatgctaaactctgtccttttaccatctccaatttacggacacagaccctgattagtgatgaaggcttgatgaggttaactgccttgcccaaggttacacatgatgaagcacaggttatcattagtgttagtgtattttatgtgtggcccaagacaattcttcttccaatgtggctcagggaagccaaaagattgaacaccgctgccctaggctttcacattcactcaccactcactgactcacccagagcaacttccagtcctgcaagctccattcatggctgccccagccacctgaaaagcatgccaggacctgaaatagcagccatactcgttggtctgcaaaatgcttttttctgccagtttgatatttttgtcactgtggatcctcatgttctgtatttaaaatatgaagacacttattcaggtataatcaatgcaccaagcaggctatgttctccaggtgggggccctggacagcagcagcagcatcctccggaacttattagaaatgttcctgctcccgccaatcccagacctattgaatccaaaactctaagggtggggcccagccatctgctttttaacaaggcctccaggtgtacagccaaatttgagaaccactgtgccactacacagggcattggaccagatgtcaaatgcagttggcccagggcttcccggtatcaacagggacaccaggatttatttattctgcgaagtgatcttccgtcacaggtatttattcgcgataagctcatggagcggcgtaaccgtcgcacaggaaggacagagaaagcgcggatctgggaagtgacggacagaacggtcaggacctggattggggaggcggttgccgccgctgctgctgacggtgtgacgttctctgttccggtcacaccacatacgttccgccattcctatgcgatgcacatgctgtatgccggtataccgctgaaagttctgcaaagcctgatgggacataagtccatcagttcaacggaagtctacacgaaggtttttgcgctggatgtggctgcccggcaccgggtgcagtttgcgatgccggagtctgatgcggttgcgatgctgaaacaattggcggagagcatcccgggggacagctcttcaatgcccatgtgcactaggcagagagcatcctgggcgcagctcttcaatgcacgtgtgcaccaggatcacctggagagtggagcaaagctcaagctcccggaccaccttagaactcgcatgggatggagtgccccatgggaacgactccctgtatgggaacggctcctgcatggaatggacccccccgccatggttcagggcctccctgaagcagcactctgccttctcctctggcagcatcctggctcctacacggagcaggtatttattcgcgataagctcatggagcggcgtaaccgtcgcacaggaaggacagagaaagcgcgggtgtgggaagtgacggacagaacggtcaggacctggattggggaggcggttgccgccgctgctgctgacggtgtgacgttctctgttccggtcacaccacatacgttccgccattcctatgcgatgcacatgctgtatgccggtataccgctgaaagttctgcaaagcctgatgggacataagtccatcagttcaacggaagtctacacgaaggtttttgcgctggatgtggctgcccggcaccgggagcacgccaagatgtcccttgtgactgtccccttctaccagaagagacataggcacttcgaccagtcctaccgtaatattcaaacacggtacctgctggacgaatatgcgtcaaaaaagagggcaggcgagacggtcactctcaagtgcaccatgctggtgacgccggacctgaagcgggtgcagccgcgcgccgagtggtaccgcgatggggccgggaatgcacagattcatcttgtcaatggacagcctcccgtgatcctggtgcacacgtgcattgaagagctgcgcccaggatgctctctggctaatgcacatggggtaccgagcctcgaatcccgaatcatgggcataggctggttccctggggggaaaaatggtatccgggtggacggcttgacggaaggctcactctacgagttcaaaatcgccgccgtcaacctggccggcatcggggagccctcagatcccagtgagcacttcaagtgtgaggcctggaccatgccggagcccg

SEQ ID NO: 127368 - DNA, 1310 bp, Homo sapiens
atgggggactttaacaccccactgtcaacattagacagattaatgagacagaaagttaacaaggatatccaggaattgaactcagctctgcaccaagcagatctaacagacatctacagaactcttcaccccaaatcaacagaatatacattcttctcagcaacacaccgcacttattccaaaactgaccacatagttggaagtaaagcactcctcagcaaatgtaaaagaacagaaattatgacaaactgtatctcagaccacagtgcaatcaaactagaactcaggattaagaaactcactcaaaaccgctcaactacatggaaactgaacaacctgctcctgaatgactactggggttcacacccaaagtccccccccacgggaccctgttccaaaaggcccgaaaaaaaagggcggggacgaaagcaaggtaagcaaaatctgaaagcgggctacccgggaaagcgtcagttccaaaccaggaaccccccccagaacggacagaagaacaaacacattaacccgattttaaaaattaaaaatccaaaagcatgtttccccaggattcaacctacagcagacagaaattttttttcctctgaactttttactggcatcctgctccacaaagggtaccctgctcctgctgacttaatgtctcagaactttgatgtcgttggtctcagacaccactttaccattcactatctggcaggtggtggtcttttggattgtttgcatggagttgctgctgtccagggcatcaccaagattgaagtcctcgccatcttccagtgggcagcggtagctggtgatctcagcctccagcttgagcttgatgttcagcagggcctcttactcctgggcctgacgctgtctctgaaggccagagaaagcgcgttctggggagtgacggacagaacggtcaggacttggattgggagggcggttgccgccgctgctgctgacggtgtgacgttctctgttccggtcccaccacatacgttccgccattcctatgcgatgcacatgctgtatgccggtataccgctgaaagttctgcaaagcctgatgggacataagtccatcagttcaacggaagtctacacgaaggtttttgcgctggatgtggctgcccggcaccgggtgcagtttgcgatgccggagtctgatgcggttgcgatgctgaaacaattatcctgagaataaatgccttggcctttatatggaaatgtggaactgagtggatatgctgtttttgtctgttaaacagagaagctggctgttatccactgagaagcgaacag

SEQ ID NO: 127369 - DNA, 873 bp, Homo sapiens
ttagttgactgtcagctgtccttgctccaggatgctgtttttgacaacggatgttttattgcctttgatgttcattaagaagcttggcgcaaatgttgcctttttatcctcgaagaagcctctgtttgtcatgtagcttgtgataaccacattgttgcctttggcttgcggcactggattggggaggcggttgccgccgctgctgctgacggtgtgacgttctctgttccggtcacaccacatacgttccgccattcctatgcgatgcacatgctgtatgccggtataccgctgaaagttctgcaaagcatgttcacccagagacaccataaatattggttggtgcttgtgtaagtccgttttcacactgctataaagaacttcccggtgcagcacaccagcatggcacatgtatacatatgtaactaacctgcacattgtgcacatgtaccccagccgtctgctctcaataccacactcatctggtgcgcttccaaagtgaaacgccttgacgttggtcagcctgtgaccggctccttgctgccgacgctgggttacataaggtcctgggagacccgagcggcgccccggacgcgtctgggaggagccgccacgccacagctccgtggggctccgcactctaccctggccacagacaaaaagaacttctgctgcatcaccccgtggcgccaggatcacttccctcttgagagacagtgtgtgcacatcgtagacgctagagccagcccctgcaggaactccgtttgaaaattcttcaaggagaaataaccgaaactctgagattcctcttgccgcagacagacagacagacagccacacacgaacgcacacacgctttctcctcgctcccat

SEQ ID NO: 127370 - DNA, 2431 bp, Homo sapiens
atgaacatgaacatcaaaaaaattgtaaaacaagccacagttctgacttttacgactgcacttctggcaggaggagcgactcaagccttcgcgaaagaaaataaccaaaaagcatacaaagaaacgtacggcgtctctcatattacacgccatgatatgctgcagatccctaaacagcagcaaaacgaaaaataccaagtgcctcaattcgatcaatcaacgattaaaaatattgagtctgcaaaaggacttgatgtgtgggacagctggccgctgcaaaacgctgacggaacagtagctgaatacaacggctatcacgttgtgtttgctcttgcgggaagcccgaaagacgctgatgacacatcaatctacatgttttatcaaaaggtcggcgacaactcaatcgacagctggaaaaacgcgggccgtgtctttaaagacagcgataagttcgacgccaacgatccgatcctgaaagatcagacgcaagaatggtccggttctgcaacctttacatctgacggaaaaatccgtttattctacactgactattccggtaaacattacggcaaacaaagcctgacaacagcgcaggtaaatgtgtcaaaatctgatgacacactcaaaatcaacggagtggaagatcacaaaacgatttttgacggagacggaaaaacatatcagaacgttcagcagtttatcgatgaaggcaattatacatccggcgacaaccatacgctgagagaccctcactacgttgaagacaaaggccataaataccttgtattcgaagccaacacgggaacagaaaacggataccaaggcgaagaatctttatttaacaaagcgtactacggcggcggcacgaacttcttccgtaaagaaagccagaagcttcagcagagcgctaaaaaacgcgatgctgagttagcgaacggcgccctcggtatcatagagttaaataatgattacacattgaaaaaagtaatgaagccgctgatcacttcaaacacggtatttattcgcgataagctcatggagcggcgtaaccgtcgcacaggaaggacagagaaagcgcggatctgggaagtgacggacagaacggtcaggacctggattggggaggcggttgccgccgctgctgctgacggtgtgacgttctctgttccggtcacaccacatacgttccgccattcctatgcgatgcacatgctgtatgccggtataccgctgaaagttctgcaaagcctgatgggacataagtccatcagttcaacggaagtctacacgaaggtttttgcgctggatgtggctgcccggcaccggtgtgacaatctaaaaacttgtcacacttcacatggatctgtcatggcggaaacagcggttatcaatcacaagaaacgtaaaaatagcccgcgaatcgtccagtcaaacgacctcactgaggcggcatatagtctctcccgggatcaaaaacgtatgctgtatctgttcgttgaccagatcagaaaatctgatggcaccctacaggaacatgacggtatctgcgagatccatgttgctaaatatgctgaaatattcggattgacctctgcggaagccaatcgtaagccggatggctcaagcatcgtctctctgaaaatgactgatcataaacgttccagctgcctaagataccagcgttgccgacttccggcgccgttctgcagaagagacgctcccaggatttggtttccagtgggagaaggaaggcgccgcaaataccatcggctgcgaggcgactgtggtggtcgaaggaacgtgatcctttgtcagctcagcggagccgaagtgatcgccgagttggctgagcagcgccgagggagtttagaatccgctgcagaaaacctaccagcttcttcgcggacacagcagctgaagccctccggatcgacacaacacaacttccgggatcgacgcaacacaacttcccgccagccccttcccttcagcgggctggacacagcccatggcggtgagaagatatcgagtgtcagcaacctggtctggacctggattggggaggcggttgccgccgctgctgctgacggtgtgacgttctctgttccggtcacaccacatacgttccgccattcctatgcgatgcacatgctgtatgccggtataccgctgaaagttctgcaaagcctgatgggacataagtccatcagttcaacggaagtctacacgaaggtttttgcgctggatgtggctgcccggcaccgggtgcagtttgcgatgccggagtctgatgcggttgcgatgctgaaacaattatcctgagaataaatgccttggcctttatatggaaatgtggaactgagtggatatgctggttttgtctgttaacaaagaaactggctggtattcactgagaaacgaacgaaacagg

SEQ ID NO: 127371 - DNA, 1281 bp, Homo sapiens
ttatctaatctcccagcgtggtttaatcagacgatcgaaaatttcattgcagacaggttcccaaatagaaagagcatttctccaggcaccagttgaagagcgttgatcaatggcctgttcaaaaacagttctcatccggatctgacctttaccaacttcatccgtttcacgtacaacattttttagaaccatgcttccccaggcatcccgaatttgctcctccatccacggggactgagagccattactattgctgtatttggtaagcaaaatacgtacatcaggctcgaaccctttaagatcaacgttcttgagcagatcacgaagcatatcgaaaaactgcagtgcggaggtgtagtcaaacaactcagcaggcgtgggaacaatcagcacatcagcagcacatacgacattaatcgtgccgatacccaggttaggcgcgctgtcaataactatgacatcatagtcatgagcaacagtttcaatggccagtcggagcatcaggtgtggatcggggggcagtttacctggattggggaggcggttgccgccgctgctgctgacggtgtgacgttctctgttccggtcacaccacatacgttccgccattcctatgcgatgcacatgctgtatgccggtataccgctgaaagttctgcaaagcctgagcttcttcttgttgctttttcaactgttcgagcatctgctgaaattcagcttccttctgttcagcctcttccaatgtggcctgattctgttcctcataggccatggccaccacagccaagatcaaatttattagatagaatgagcccaagaaaatgaccagcacaaaaaatatcatgtacgttttcccagcagcacgtagtgtctcctcttgtttgcgtttcaacgtggtcgtaatgggctcataagagactttggaggggtttgatgccatgaatcgctcttccatctgtattcgaagggcatccatctctccactctcacccaaaacacgctttgtaaaagcaaataagatgtcaagacagtggatccggtcaccactcaccatgggcagatccatggcaatgagctggactttgttgggttttgctatgagaagaggaggatccagggcatctgcaaaatcagaaagtttggcaaactctataaactgggtcgcatcgggatcaaacttctcccaaacctcatagaacatctcaaagtcatcctcactcagaggctctgcactttcttcagtagcaacactgaagttctccaggatgaccgcgatgtacat

SEQ ID NO: 127372 - DNA, 3756 bp, Homo sapiens
  misc_feature (1)...(3756): n = a,t,c or g
atgctggatggcccactgttctccgaggggcctgacagcccccgggagctccaggatgaggagtctggcagctgcctctgggtgcagaagtccaagctattggtgatagaagtgaagactatttcctgtcattatagtcgccgcgccccttctcgacagcccatggacttccaggccagccactgggctcgcgggttccagaaccgcacgtgtgggccgcgcccgggatccccacagccgccgccccgccggccctgggcctccagggtgctgcaggaggcgaccaactggcgggcggggcccctggccgaggtccgagctcgggagcaagagaaaaggaaagcggcgtcgcaggagcgggaggccaaggagaccgagcgaaaaaggcgcaaggctggtggggcccgacggagccccccgggtcgaccccgcccggagccccgcaacgcccctcgggtggcccagctggcagggctccctgctcccttgcggccggagcgcctggcgcctgtggggcgagcgccccgtccatccgcgcagccgcagagcgacccagggtcggcgtgggcggggccctggggaggtcggcggcccgggcccccaagctacgaggctcacctgctgctgagaggttctgccgggaccgccccacgacgccgctgggaccggccgccaccctacgtggctccaccttcttacgaaggcccccataggaccttggggactaagagaggccccgggaactctcaggtgcccacttcatcagccccagctgcgactccagccaggacagacggagggcgcacaaagaagaggctggatcctcggatctaccgggacgtcctcggggcttggggtctccgacaggggcaaggtctcttggggggatccccaggctgtggagcggccagagcaaggccagagcccggcaagggggtcgtggagaaaagcctggggctggctgctgctgacctgaacagtggtagcgacagccatccccaagccaaagctacagggagcgcaggcaccgagatagctcctgcggggtctgcaactgcggctccctgtgccccgcatcccgctcccagatccaggcaccacctcaagggctcgagggaagggaaagaaggagaacagatctggtttcccaaatgctggattccctcccctaaaaagcagccgccccgccatagccagacactccccagaccctgggctcccggaggcaccggatggagagaatctctgggtcttggagagggggcaggaccggagaccctggagggttggaaggcgacccgccgtgcccacaccttgccccgcagttcccagggcctgtcccgtggggaaggcgtctttgtcattgacgccacgtgcgtagtgatacgatcccaatatgttccaaccccccgaacccagcaggtgcagcttttgccctctggggtgacacgcgtggtgggggattcccccagccaatcgaagcccggcaaggaggagggtgaaggggccacggtctttccttccccttgtcaaaagcggctgtcgagcagtcgccttttacaccagcccggcgggggccgcgggggcgaagctgagggcgggaggccgggggactccacactggaggagcgcactttccgcatcttggggctcccggcccccgaagtaaacctgcgggacgcccccacgcagccaggtagcccagagcaccaagccttaggcccagcagcttcgggagcccagggcagagccgaggggtcggaagtggcggtggtccagcggcgcgccggccggggctgggcgcggaccccagggccctacgccggggccctgcgagaagccgtgtcccgtatccgccgccacacagcccctgactcggacacggacgaagctgaggagctcagcgtccatagcggctcctctgatggaagcgacacagaagccccgggcgcctcctggcggaatgagaggaccctgcccgaggttggaaacagttcgccagaggaagatgggaagacagcggaactgagcgacagtgtcggggagatcctagatgtcataagccaaaccgaggaggtcctcttcggngtatttattcgcgataagctcatggagcggcgtaaccgtcgcacaggaaggacagagaaagcgcggatctgggaagtgacggacagaacggtcaggacctggattggggaggcggttgccgccgctgctgctgacggtgtgacgttctctgttccggtcacaccacatacgttccgccattcctatgcgatgcacatgctgtatgccggtataccgctgaaagttctgcaaagcctgatgggacataagtccatcagttcaacggaagtctacacgaaggtttttgcgctggatgtggctgcccggcaccgggtgcagtttgcgatgccggaggattttgccgatttcggaaccaccatcaaacaggattttcgcctgctggggcaaaccagcgtggaccgcttgctgcaactctctcagggccaggcgattaaggccaatccacctgttgcccgtctccgtggtcaaaacaaaaagcaccttggcgcccgatacgcagaccgcctctccacgagagttgcttgattcattcatgcagctggcacgacaggtttccagactggaaagcgggcagaggccggatgtcgtgcgtcgaattgtgacaacgcgaaatgagattcgcgcggagtccattgcgatagtgtggacgtagaatgtcgacgggccaggcggtccgccgaggcttacccaaataggcaaggggggcaggaaggaagaacggcgagtatgggcaaaagaacaggctggtaaagggttggaagcctcattttcttgtttttgcatcctcccatccccaggacccagtaccttcaagcgttggctgtacggattaccagctcctgaattgcaggcctcttttccataaccagaaagacttgtaagtgcttctgtttccttccccataaactccccaggacccagtaccttcaagcgttggctgtacggattaccagctcctgaattgcaggcctcttttccataaccagaaagacttgtaagtgcttctgtttccttccccataaactcccggtgccgggcagccacatccagcgcaaaaaccttcgtgtagacttcggttgaactgatggacttatgtcccatcaggctttgcagaactttcagcggtataccggcatacagcatgtgcatcgcataggaatggcggaacgtatgtggtgtgaccggaacagagaacgtcacaccgtcagcagcagcggcggcaaccgcctccccaatccaggtcctgaccgttctgtccgtcacttcccagatccgcgctttctctgtccttcctgtgcgacggttacgccgctccatgagcttatcgcgaataaatacctttgaaattacccatgaaatccgcacgctgacaccatcagtggtaccagcagtaaggtgttttctctttctttttcctgcagttccacaaaacctctcgaatctagattcatttgtgctgatggagaatatatccagcccagaagcaatcacagggccacgcttcaagaaaccggctcggtcgcggggctcgccggacaggccaatgaaccgtgggtacaaggtggagtttgtcttgggcagtaggaggacagcccgggcacccaggggcccaattccaggggaaagccatctcccttctggaattgcccaactccgggggaaaaccat

SEQ ID NO: 127373 - DNA, 1410 bp, Homo sapiens
atggcccgatatcggttaatgcacctgcgcccaacaggcttgcccgactggaaaggggcgtcgaggatctccggggcgcggggcgcgggctggggcccagtgaggcttggcaggctgtgcgcggaccgcgccctggacggcgaaagcaggcccggagggggcggccagtccggcgtcccagcgtccgaggcgagccagaaggcggcccacggccgtcgcctcccgccctcgctcgctctcggtgcctccttggccttggcgcccactctggccgcacttgagcgcttcaacccgccgctgcactgtgggagcccctttctgggctggccaaggccggagccggctccctcagcttgcggggaggtgtggagggagaggcgcgtgcgggaactggggctgcgcacaggcttgcgggccagcgcgagttctggttggcccagggctttccggtatcaacagggacaccaggatttatttattctgcgaagtgatcttccgtcacaggtatttattcgcgataagctcatggagcggcgtaaccgtcgcacaggaaggacagagaaagcgcggatctgggaagtgacggacagaacggtcaggacctggattggggaggcggttgccgccgctgctgctgacggtgtgacgttctctgttccggtcacaccacatacgttccgccattcctatgcgatgcacatgctgtatgccggtataccgctgaaagttctgcaaagcctgatgggacataagtccatcagttcaacggaagtctacacgaaggtttttgcgctggatgtggctgcccggcaccgggaacatgacggtatctgcgagatccatgttgctaaatatgctgaaatattcggattgacctctgcggaagccagtaaggatatacggcaggcattgaagagtttcgcggggaaggaagtggttttttatcgccctgaagaggatgccggcgatgaaaaaggctatgaatcttttccttggtttatcaaacgtgcgcacagtccatccagagggctttacagtgtacatatcaacccatatctcattcccttctttatcgggttacagaaccggtttacgcagtttcggcttagtgaaacaaaagaaatcaccaatccgtatgccatgcgtttatacgaatccctgtgtcagtatcgtaagccggatggctcaggcatcgtctctctgaaaatcgactggatcatagagcgttaccagctgcctcaaagttaccagcgtatgcctgacttccgccgccgcttcctgcaggtctgtgttaatgagatcaacagcagaactccaatgcgcctctcatacattgagaaaaagaaaggccgccagacgactcatatcgtattttccttccgcgatatcacttccatgacgacaggatag

SEQ ID NO: 127374 - DNA, 3682 bp, Homo sapiens
  misc_feature (1)...(3682): n = a,t,c or g
ccatggatatccgcgcctgttccggtggacgtggtggagggtgcaatggactctgtgacggttcttagctttggtggtttaatgctctatttttgtgctggttggcctcctgccaggaggtggtgctttccagaaagcatcagctgtggtagtatggagagggaccagtggtgggggctccaagtagcgaagcgagcaggactggccggcggccaaagcggtcggacagtgctccgagaacgggtgcgcatagaaattgcatcaacgcatatagcgctagcagcacgccatagtgactggcgatgctgtcggaatggacgatatcccgcaagaggcccggcagctttgcagaactttcagcggtataccggcatacagcatgtgcatcgcataggaatggcggaacgtatgtggtgtgaccggaacagagaacgtcacaccgtcagcagcagcggcggcaaccgcctccccaatccaggtcctgaccgttcttgtgacaatctaaaaacttgtcacacttcacatggatctgtcatggcggaaacagcggttatcaatcacaagaaacgtaaaaatagcccgcgaatcgtccagtcaaacgacctcactgaggcggcatatagtctctcccgggatcaaaaacgtatgctgtatctgttcgttgaccagatcagaaaatctgatggcaccctacaggaacatgacggtatctgcgagatccatgttgctaaatatgctgaaatattcggattgacctctgcggaagccagtaaggatatacggcaggcattgaagagtttcgcggggaaggaagtggttttttatcgccctgaagaggatgccggcgatgaaaaaggctatgaatcttttccttggtttatcaaacgtgcgcacagtccatccagagggctttacagtgtacatatcaacccatatctcattcccttctttatcgggttacagaaccggtttacgcagtttcggcttagtgaaacaaaagaaatcaccgatccgtatgccatgcgtttatacaaataccctgtgtcagtatcgtaagccggatggctcaggcatcgtctctctgaaaatcgactggatcatagagcgttaccagctgcctcaaagttaccagcgtatgcctgacttccgccgccgcttcctgcagtgcataaacgctggtcatgaaatgacgaaggctatcgccattgcacagtttaatgatgacagcccggaagcgaggaaaataacccggcgctggagaataggtgaagcagcggatttagttggggtttcttctcaggctatcagagatgccgagaaagcagggcgactaccgcacccggatatggaaattcgaggacgggttgagcaacgtgttggttatacaattgaacaaattaatcatatgcgtgatgtgtttggtacgcgattgcgacgtgctgaagacgtatttccaccggtgatcggggttgctgcccataaaggtggcgtttacaaaacctcagtttctgttcatcttgctcaggatctggctctgaaggggctacgtgttttgctcgtggaaggtaacgacccccagggaacagcctcaatgtatcacggatgggtaccagatcttcatattcatgcagaagacactctcctgcctttctatcttggggaaaaggacgatgtcacttatgcaataaagcccacttgctggccggggcttgacattattccttcctgtctggctctgcaccgtattgaaactgagttaatgggcaaatttgatgaaggtaaactgcccaccgatccacacctgatgctccgactggccattgaaactgttgctcatgactatgatgtcatagttattgacagcgcgcctaacctgggtatcggcacgattaatgtcgtatgtgctgctgatgtgctgattgttcccacgcctgctgagttgtttgactacacctccgcactgcagtttttcgatatgcttcgtgatctgctcaagaacgttgatcttaaagggttcgagcctgatgtacgggctgcagcagttcatcactatttacatttatctaaaccccaattaaaaacccttatggtcttagagatgttgatcattgtgctgaaggcatggaaggaaatggaacctgctcctgccaaacgtatctatgtgatagaatatgctggcgaccaccattccactttctgtgtctatgaatttgactatttgaggtactgcatgaagggtttggtggaacagcctgtgaaacctgtgctgacgacaacttatttggacccagctgttcatcaggacaatcaaataaagcttaaactccatggaggcaaaaagaaggtaaaaattatacaaggggacatcattgcttccaatgggcttctgcacatccttgacagagccatggacaagttagaacccacatttgagagcaacaatgaggaaaccaatttgggacatgccttagatgaggatggagttggtggaccatacaccatttttgttccaaataatgaagcattgaataacatgaaggacggcactctcgattacctcctttctccagaggtatttattcgcgataagctcatggagcggcgtaaccgtcgcacaggaaggacagagaaagcgcggatctgggaagtgacggacagaacggtcaggacctggattggggaggcggttgccgccgctgctgctgacggtgtgacgttctctgttccggtcacaccacatacgttccgccattcctatgcgatgcacatgctgtatgccggtataccgctgaaagttctgcaaagcctgatgggacataagtccatcagttcaacggaagtctacacgaaggtttttgcgctggatgtggctgcccggcaccggtgtgacaatctaaaaacttgtcacacttcacatggatctgtcatggcggaaacagcggttatcaatcacaagaaacgtaaaaatagcccgcgaatcgtccagtcaaacgacctcactgaggcggcatatagtctctcccgggatcaaaaacgtatgctgtatctgttcgttgaccagatcagaaaatctgatggcaccctacaggaacatgacggtatctgcgagatccatgttgctaaatatgctgaaatattcggattgacctctgcggaagccagtaaggatatacggcaggcattgaagagtttcgcggngaaggaagtggttttttatcgccctgaagaggatgccggcgatgaaaaaggctatgaatcttttccttggtttatcaaacgtgcgcacagtccatccagagggctttacagtgtacatatcaacccatatctcattcccttctttatcgngttacagaaccggggtacgcagtttcggcttagagacacaaaagaaatcaccaatccgtatgccatgcgtttatacgaatccctgtgtcagtatcgtaagccggatggctcaggcatcgtctctctgaaaatcgactggatcatagagcgttaccagctgcctcaaagttaccagcgtatgcctgacttccgccgccgcttcctgcaggtctgtgttaatgagatcaacagcagaactccaatgcgcctctcatacattgagaaaaagaaaggccgccagacgactcatatcgtattttccttccgcgatatcacttccatgacgacaggatag

SEQ ID NO: 127375 - DNA, 1209 bp, Homo sapiens
gtcggcgtcaactcaatcgacagctggaaaaacacgggccgtgtctttaaagacagcgataagttcgacgccaacgatccgatcctgaaagatcagacgcaagaatggtccggttctgcaacctttacatctgacggaaaaatccgtttattctacactgactattccggtaaacattacggcaaacaaagcctgacaacagcgcaggctttgcagaactttcagcggtataccggcatacagcatgtgcatcgcataggaatggcggaacgtatgtggtgtgaccggaacagagaacgtcacaccgtcagcagcagcggcggcaaccgcctccccaatccaggtcctgaccgttctgatctggctctgaaggggctacgtgttttgctcgtggaaggtaacgacccccagggaacagcctcaatgtatcacggatgggtaccagatcttcatattcatgcagaagacactctcctgcctttctatcttggggaaaaggacgatgtcacttatgcaataaagcccacttgctggccggggcttgacattattccttcctgtctggctctgcaccgtattgaaactgagttaatgggcaaatttgatgaaggtaaactgcccaccgatccacacctgatgctccgactggccattgaaactgttgctcatgactatgatgtcatagtctatgttgaagtcgaggagcttatcggggaaataggagaagtacggacgccacacgtatttattcgcgataagctcatggagcggcgtaaccgtcgcacaggaaggacagagaaagcgcggatctgggaagtgacggacagaacggtcaggacctggattggggaggcggttgccgccgctgctgctgacggtgtgacgttctctgttccggtcacaccacatacgttccgccattcctatgcgatgcacatgctgtatgccggtataccgctgaaagttctgcaaagcctgatgggacataagtccattcagtcaacggaagtctacacgaaaggttttgcgctggatgtggctgccccgcaccgggtgcagtttgcgatgccggaggtcttccacgcggtcttccagcccgtgggtaataggttttcttggagctttttatctgtgcctgttgggggttctggattggaggcttctgcagcaccctggctgggatacatgggaggctacaaggaaacctga

SEQ ID NO: 127376 - DNA, 2334 bp, Homo sapiens
tcacaggtatttattcgcgataagctcatggagcggcgtaaccgtcgcacaggaaggacagagaaagcgcggatctgggaagtgacggacagaacggtcaggacctggattggggaggcggttgccgccgctgctgctgacggtgtgacgttctctgttccggtcacaccacatacgttccgccattcctatgcgatgcacatgctgtatgccggtataccgctgaaagttctgcaaagccccgccgtccggctctaggagataaccatcgataaactgctgaacgttctgatatgtttttccgtctccgtcaaaaatcgttttgtgatcttccactccgttgattttgagtgtgtcatcagattttgacacatttacctgcgctgttgtcaggctttgtttgccgtaatgtttaccggaatagtcagtgtagaataaacggatttttccgtcagatgtaaaggttgcagaaccggaccattcttgcgtctgatctttcaggatcggatcgttggcgtcgaacttatcgctgtctttaaagacacggcccgcgtttttccagctgtcgattgagttgtcgccgaccttttgataaaacatgtagattgatgtgtcatcagcgtctttcgggcttcccgcaagagcaaacacaacgtgatagccgttgtattcagctactgttccgtcagcgttttgcagcggccagctgtcccacacatcaagtccttttgcagactcaatatttttaatcgttgattgatcgaattgaggcacttggtatttttcgttttgctgctgtttagggatctgcagcatatcatggcgtgtaatatgagagacgccgtacgtttctttgtatgcctttttggttattttctttcgcgaaggcttgagtcgctcctccgacgatacgagtgggaccgtggttccggggtgataatcagaccgacgatacgagtgggaccatggtccccagactaataatcagaccgacgatacgagtgggaccgtggtcccagtctgattatcagacccacgataccagtgggaccgctttgcagaactttcagcggtataccggcatacagcatgtgcatcgcataggaatggcggaacgtatgtggtgtgaccggaacagagaacgtcacaccgtcagcagcagcggcggcaaccgcctccccaattccagtcctgaccgttctgtccgtcacttcccagaccgcgctttctctggccttcctgtgcgaccgacccccacagtagctgaatacatctgctatcacgttgtgtttgctcttgcgggaagcccgaaagacgctgatgacacatcaatctacatgttttatcaaaaggtcggcgacaactcaatcgacagctggaaaaacgcgggccgtgtctttaaagacagcgataagttcgacgccaacgatccgatcctgaaagatcagacgcgagagtggtccggttctgcaacctttacatctgacggaaaaatccgtttattctacactgactattccggtaaacattacggcaaacaaagcctgacaacagcgcaggtaaatgtgtcaaaatctgatgacacactcaaaatcaacggagtggaagatcacaaaacgatttttgacggagacggaaaaacatatcagaacgttcagcagtttatcgatgaaggcaattatacatccggcgacaaccatacgctgagagaccctcactacgttgaagacaaaggccataaataccttgtattcgaagccaacacgggaacagaaaacggataccaagggcgaagaatcttcacctccacaaagcgctttgcagaactttcagcggtataccggcacacagcatgtgcatcgcataggaatggcggaacgtatgtggtgtgaccggaacagagaacgtcacaccgtcagcagcagcggcggcaaccgcctccccaatccaggtcctgaccgttctatccgcgctttctctgtccttcctgtgcgacggttacgccgctcccatgagctgatgaactacgctggcaccaatccccagcccgatattgtctccggcccgaaaaaggtggcccaaattaccgggcccttcgaaagaaagtgtgtccaattccgcaaaggagaggccccccttctcccgaagggcaatacgggattctccaatttggccgaaacccggggggcaaaaccgattgtggtcaaccaaccaagggggtgccgcccttatatagatgccttttcccaccctgtttcttcaattgggtttcttgtggttccacgaaggaagtaccgcccgatccaagcccatgggagtcggatcgagttgtaa

SEQ ID NO: 127377 - DNA, 3226 bp, Homo sapiens
  misc_feature (1)...(3226): n = a,t,c or g
tcattgtttggttcgcttctccagggaataccagccagcttctctgtttaccagacaaaacnagcatatccactcagttccacatttcaaataaagggccaaggcatttatctcaggataatgtttcagcatcgcaaccgcatcagactccggcatcgcaaactgcacccggtgccgggcagccacatccagcgcaaaaaccttcgtgtagacttccgttgaactgatggacttatgtcccatcaggctttgcagaactttcagcggtataccggcatacagcatgtgcatcgcataggaatggcggaacgtatgtggtgtgaccggaacagagaacgtcacaccgtcagcagcagcggcggcaaccgcctccccaatccaggtcctgaccgttctgtccgtcacttcccagatccgcgctttctctgtccttcctgtgcgacggttacgccgctccatgagcttatcgcgaataaatacctgtgacggaagatcacttcgcagaataaataaatcctggtgtccctgttgataccgggaagccctgggccaacttttggcgaaaatgagacgttgatcggcacgtaagaggttccaactttcaccataatgaaataagatcacttcagggcatggtaaccgattagattttggagatgaaggagagacactaccaaaggactctctcagatgacaagtatggataacggggtcatgagctaagattgtgtcaacaggaggtaaaacttttttaatggagaagatgataaatttcattctaaacgtgaagttctgggtgcctttgggacagccagcatgagccagaaaatgctgcaggaagcggcggcggaagtcaggcatacgctggtaactttgaggcagctggtaacgctctatgatccagtcgattttcagagagacgatgcctgagccatccggcttacgatactgacacagggattcgtataaacgcatggcatacggattggtgatttcttttgtttcactaagccgaaactgcgtaaaccggttctgtaacccgataaagaagggaatgagatatgggttgatatgtacactgtaaagccctctggatggactgtgcgcacgtttgataaaccaaggaaaagattcatagcctttttcatcgccggcatcctcttcagggcgataaaaaaccacttccttccccgcgaaactcttcaatgcctgccgtatatccttactggcttccgcagaggtcaatccgaatatttcagcatatttagcaacatggatctcgcagataccgtcatgttcctgtagggtgccatcagattttctgatctggtcaacgaacagatacagcatacgtttttgatcccgggagagactatatgccgcctcagtgaggtcgtttgactggacgattcgcgggctatttttacgtttcttgtgattgataaccgctgtttccgccatgacagatccatgtgaagtgtgacaagtttttagattgtcacacttattggccagaattggtcccatgatcactgctagctctaaggaagaccagggattggctgagacgaaaaacatattctcaataaaccctttagggaaataggccaggttttcaccgtaacacgccacatcttgcgaatatatgtgtagaaactgccggaaatcgtcgtggtattcactccagagcgatgaaaacgtttcagtttgctcatggaaaacggtgtaacaagggtgaacactatcccatatcaccagctcaccgtctttcattgccatacggaactccggatgagcattcatcaggcgggcaagaatgtgaataaaggccggataaaacttgtgcttatttttctttacggtctttaaaaaggccgtaatatccagctgaacggtctggttataggtacattgagcaactgactgaaatgcctcaaaatgttcagaacgggcaggacctggattggggaggcgggtgccgccgctgctgctgacggtgtgacgttctctgttccggtcacaccacatacgttccgccattcctatgcgatgcacatgctgtatgccggtataccgttgaaagttctgcaaagcctcagaacacgtaggctggcatccatcgatcgtcatttttgaaccgcgtgaaatcagtgaacaagtaccatttgccgttcattttgaaaacattcgcgcgctcgatttcatcagttaccgtgtttgaagtgatcagcggcttcattacttttttcaatgtgtaatcattatttaactctatgataccgagggcgccgttcgctaactcagcatcgcgttttttagcgctctgctgaagcttctggctttctttacggaagaagttcgtgccgccgccgtagtacgctttgttaaataaagattcttcgccttggtatccgttttctgttcccgtgttggcttcgaatacaaggtatttatggcctttgtcttcaacgtagtgagggtctctcagcgtatggttgtcgccggatgtataattgccttcatcgataaactgctgaacgttctgatatgtttttccgtctccgtcaaaaatcgttttgtgatcttccactccgttgattttgagtgtgtcatcagattttgacacatttacctgcgctgttgtcaggctttgtttgccgtaatgtttaccggaatagtcagtgtagaataaacggatttttccgtcagatgtaaagggtgcagaaccggaccattcgtgcgtctgatctttcaggatcggatcgttggcgtcgaacttatcgctgtctttaaagacacggcccgcgtttttccagctgtcgattgagttgtcgccgaccttttgataaaacatgtagattgatgtgtcatcagcgtctttcgggcttcccgcaagagcaaacacaacgtgatagccgttgtattcagctactgttccgtcagcgttttgcagcggccagctgtcccacacatcaagtccttttgcagactcaatatttttaatcgttgattgatcgaattgaggcacttggtatttttcgttttgctgctgtttagggatctgcagcatatcatggcgtgtaatatgagagacgccgtacgtttctttgtatgctttttggttattttctttcgcgaaggcttgagtcgctcctcctgccagaagtgcagtcgtaaaagtcagaactgtggcttgttttacaatttttttgatgttcatgttcat

SEQ ID NO: 127378 - DNA, 1953 bp, Homo sapiens
atgtcccatcaggctttgcagaactttcagcggtataccggcatacagcatgtgcatcgcataggaatggcggaacgtatgtggtgtgaccggaacagagaacgtcacaccgtcagcagcagcggcggcaaccgcctccccaatccagaacatcgtaaagaacattttgaggcatttcagtcagttgctcaatgtacctataaccagaccgttcagctggatattacggcctttttaaagaccgtaaagaaaaataagcacaagttttatccggcctttattcacattcttgcccgcctgatgaatgctcatccggagttccgtatggcaatgaaagacgggtttattgagaatatgtttttcgtctcagccaatccctgggtgagtttcaccagttttgatttaaacgtggccaatatggacaacttcttcgcccccgttttcaccatgggcaaatattatacgcaaggcgacaaggtgctgatgccgctggcgattcagctgcatgctcagttgaagatgatgaccattcctgatcgagaaggacttaggttaagggctttgcagaactttcagcggtataccggcatacagcatgtgcatcgcataggaatggcggaacgtatgtggtgtgaccggaacagagaacgtcacaccgtcagcagcagcggcggcaaccgcctccccaatccagctgccccgatggtggattcgttaattgcgcgcgtaggagtaatggctcgcggtaatgccattactttgcctgtatgtggtcgggatgtgaagtttactcttgaagtgctccggggtgatagtgttgagaagacctctcgggtatggtcaggtaatgaacgtgaccaggagctgcttactgaggacgcactggatgatctcatcccttcttttctactgactggtcaacagacaccggcgttcggtcgaagagtatctggtgtcatagaaattgccgatgggagtcgccgtcgtaaagctgctgcacttaccgaaagtgattatcgtgttctggttggcgagctggatgatgagcagatggctgcattatccagattgggtaacgattgtcgcccaacaagtgcttatgaacgtggtcagcgttatgcaagccgattgcagaaagaatttgctggaaatatttctgcgctggctgatgcggaaaaatatttacgtatcagtgataaacttgggaataatacagaaacatcaatgagccaaaagccttgcaaaatgaaaaggataattctagagaagagttggcagtttgaaaaatggatcatcatagtgatcttatttcattatggtgaaagttggaacctcttacgtgccgatcaacgtctcattttcgccaaaagttggcccagggcttcccggtatcaacagggacaccaggatttatttattctgcgaagtgatcttccgtcacaggtatttattcgcgataagctcatggagcggcgtaaccgtcgcacaggaaggacagagaaagcgcggatctgggaagtgacggacagaacggtcaggacctggattggggaggcggttgccgccgctgctgctgacggtgtgacgttctctgttccggtcacaccacatacgttccgccattcctatgcgatgcacatgctgtatgccggtataccgctgaaagttctgcaaagcctgaagctccgactggccattgaaactgatgctcatgactatgatgtcatagttattgacagcgcgcctaacctgggtatcggcaacgataatgtcgtatgtgctgctgatgtggtgaatgttcccacggcctgctgagttggtttggctacagcaccgcactggcagtattcgatatgcatcgtgatctccaatggcatcaagcgaggcccacagcattgctgcaatgtttgcctgggtcacaccactctgagaatgtgacaggtggctggtcat

SEQ ID NO: 127379 - DNA, 1776 bp, Homo sapiens
atgaaactcatggaaacacttaaccagtgcataaacgctggtcatgaaatgacgaaggctatcgccattgcacagtttaatgatgacagcccggaagcgaggaaaataacccggcgctggagaataggtgaagcagcggatttagttggggtttcttctcaggctatcagagatgccgagaaagcagggcgactaccgcacccggatatggaaattcgaggacgggttgagcaacgtgttggttatacaattgaacaaattaatcatatgcgtgatgtgtttggtacgcgattgcgacgtgctgaagacgtatttccaccggtgatcggggttgctgcccataaaggtggcgtttacaaaacctcagtttctgttcatcttgctcaggatctggctctgaaggggctacgtgttttgctcgtggaaggtaacgacccccagggaacagcctcaatgtatcacggatgggtaccagatcttcatattcatgcagaagacactctcctgcctttctatcttggggaaaaggacgatgtcacttatgcaataaagcccacttgctggccggggcttgacattattccttcctgtctggctctgcaccgtattgaaactgagttaatgggcaaatttgatgaaggtaaactgcccaccgatccacacctgatgctccgactggccattgaaactgttgctcatgactatgatgtcatagttattgacagcgcgcctaacctgggtatcggcacgattaatgtcgtatgtgctgctgatgtgctgattgttcccacgcctgctgagttgtttgactacacctccgcactgcagtttttcgatatgcttcgtgatctgctcaagaacgttgatcttaaagggttcgagcctgatagaagcctgatagatgtggtcggagtgattaatagcaacctgtctccagagataaaagagtggcgagtgagacgcattgccctgactccacttctaattctgtgttgttatatgcggctgtttggccaagcggaggcaccacacccacagcaccgtatctggctgcaagccctggatttcctgggtcaccaagataagattctttcagtggaaaagaaaatgatctggggcagtggtatttacccagagcagggttgtaagctggagaaggcacaggaaaggcgtgttggtgcaggtttcacccctgttcctgcaatgccattatctggtgctctcccagtgagaaattcatcagtaggacaggatgcccaggaattgatcttatttcattatggtgaaagttggaacctcttacgtgccgatcaacgtctcattttcgccaaaagttggcccagggcttcccggtatcaacagggacaccaggatttatttattctgcgaagtgatcttccgtcacaggtatttattcgcgataagctcatggagcggcgtaaccgtcgcacaggaaggacagagaaagcgcggatctgggaagtgacggacagaacggtcaggacctggattggggaggcggttgccgccgctgctgctgacggtgtgacgttctctgttccggtcacaccacatacgttccgccattcctatgcgatgcacatgctgtatgccggtataccgctgaaagttctgcaaagcctgatgggacataagtccatcagttcaacggaagtctacacgaaggtttttgcgctggatgtggctgcccggcaccgggtgcagtttgcgatgccggagtctgatgcggttgcgatgctgaaacaattatcctga

SEQ ID NO: 127380 - DNA, 961 bp, Homo sapiens
ttacgccccgccctgccactcatcgcagtactgttgtaattcattaagcattctgccgacatggaagccatcacaaacggcatgatgaacctgaatcgccagcggcatcagcaccttgtcgccttgcgtataatatttgcccatggtgaaaacgggggcgaagaagttgtccatattggccacgtttaaatcaaaactggtgaaactcacccagggattggctgagacgaaaaacatattctcaataaaccctttagggaaataggccaggttttcaccgtaacacgccacatcttgcgaatatatgtgtagaaactgccggaaatcgtcgtggtattcactccagagcgatgaaaacgtttcagtttgctcatggaaaacggtgtaacaagggtgaacactatcccatatcaccagctcaccgtctttcattgccatacggaactccggatgagcattcatcaggcgggcaagaatgtgaataaaggccggataaaacttgtgcttatttttctttacggtctttaaaaaggccgtaatatccagctgaacggtctggttataggtacattgagcaactgactgaaatgcctcaaaatgttctggattggggaggcggttgccgccgctgctgctgacggtgtgacgttctctgttccggtcacaccacatacgttccgccattcctatgcgatgcacatgctgtatgccggtataccgctgaaagtttctgcaaagctggatttggagtaatcgtaaacctgctacccctctgctcatgcttctcaaataaatctcgtaaatccccagcgatagctgagtttttaagagtgtcatcatttgtgataataatcactgaaagatacacagaggctcttccatattgtttatggcagtgggccttcggcaagatcactcctgatagctctgtatcaggctgcctgtcacttctacgtcgcat

SEQ ID NO: 127381 - DNA, 2097 bp, Homo sapiens
  misc_feature (1)...(2097): n = a,t,c or g
atgacaaaggactctcagaacaaatgggaagtgaatcagaggaaaattaggagttcggtgatagaaaagcccagggaagtaagtgttttgagaaggaagtggttgactgtgtgggctgatgctgatcatcaggtcaaaatagatgagaacaaagaatgggccttcagtctgacacacagagctgcatggagtcttggcagaacagccactcaggcatgcatggaggcccaggacactcaggcatgcatggaggcccaggagctttacctactgtggcactgggctttccggcaaaatgactgccactctgtaagggttcagaaccggggtgaggctgagatggctgaaatgacagaagtagaattcagaatgtggataaacacaatcttcactgatcttaaggagcacattgtaacccaatgcaggaaagctaaaaatcataaaatattgcaggaagtgacagacaaaatagccagtatagagaagaatgtaatgaacctgatggagctgaaaaacacaatacaagaatttcataatgcaatcacaagtattaatagcagaaaagaccaagtggaggaaagaatctcagagtttgaggactgtgtttctgaaataaggcagacagacaagaatagagaaaaaagaatgaaaaggaacgaacaaaacctccaagaaatatgggattgtgtaaagagactggatctacaactaattggtgtgcctgaaagagatgttggcccagggcttctggatcaacagggacaccaggatttatttattctgcgaagtgatcttgcgtgagaggtatttattcgcgataagctcatggagcggcgtaaccgtcgcacaggaaggacagagaaagcgcggatctgggaagtgacggacagaacggtcaggacctggattggggaggcggttgccgccgctgctgctgacggtgtgacgttctctgttccggtcacaccacatacgttccgccattcctatgcgatgcacatgctgtatgccggtataccgctgaaagttctgcaaagcctgatgggacataagtccatcagttcaacggaagtctacacgaaagtttttgcgctggatgtggctgcccggcaccggnatcacaaaacgatttttgacggtgacggaaaaacatatcagaacgttcagcagtttatcgatgaaggcaattatacatccggcgacaaccatacgctgagagaccctcactacgttgaagacaaaggccataaataccttgtattcgaagccaacacgggaacagaaaacggataccaaggcgaagaatctttatttaacaaagcgtactacggcggcggcacgaacttcttccgtaaagaaagccagaagcttcagcagagcgctaaaaaacgcgatgctgagttagcgaacggcgccctcggtatcatagagttaaataatgattacacattgaaaaaagtaatgaagccgctgatcacttcaaacacggtaactgatgaaatcgagcgcgcgaatgttttcaaaatgaacggcaaatggtacttgttcactgattcacgcggttcaaaaatgacgatcgatggtattaactcaaacgatatttacatggcttgggaccaccctgtgtattgtggaatgtttagcagcatccatggtctctacctgctagctaccagtagcatccgtttccctgctgacagccgaaaatggctacggacattaccaaatgtgctgcggggtgatactgagacaggtgtctgtgaggtgagccctggaactcgctcctatgagcagaggaaaaatctaagctatagaaaccacaactacagcatggcactggtgtacctcagctgtggaggctgtaagctgcaaactacccaggaagagcttggcttctgctcaaacgctgaggtggggtttgatgatgctgcagctggtgactgggagctgctgccctcctggtggtggaatggcaagatcttcctggaagggagatctatacccctgcccaacactgagcacccaaccaggaacttggcgctaagcaaacagacacccagccgaccatgtcctgaccctgtcgatgctttcagctag

SEQ ID NO: 127382 - DNA, 4165 bp, Homo sapiens
  misc_feature (1)...(4165): n = a,t,c or g
atgatcaaattactccaagctacggaggacattcaaaccaaaggcaaagaagttgaaaactttgaaaaaaatttagaagaatgtataactagaataaccaatacagagaagtgcttaaaggagctgatggagctgaaaaccaaggctcgagaactacgtgaagaatgcagaagcctcaggagccgatgtgatcaactggaagaaagggtatcagcgatggaagatgaaatgaatgaaatgaattggcccagggcttcccggtatcaacagggacaccaggatttatttattctgcgaagtgatcttccgtcacaggtatttattcgcgataagctcatggagcggcgtaaccgtcgcacaggaaggacagagaaagcgcggatctgggaagtgacggacagaacggtcaggacctggattggggaggcggttgccgccgctgctgctgacggtgtgacgttctctgttccggtcacaccacatacgttccgccattcctatgcgatgcacatgctgtatgccggtataccgctgaaagttctgcaaagcctgatgggacataagtccatcagttcaacggaagtctacacgaaggtttttgcgctggatgtggctgccccggcccggatccctaaacagcagcaaaacgaaaaataccaagtgcctcaattcgatcaatcaacgattaaaaatattgagtctgcaaaaggacttgatgtgtgggacagctggccgctgcaaaacgctgacggaacagtagctgaatacaacggctatcacgttgtgtttgctcttgcgggaagcccgaaagacgctgatgacacatcaatctacatgttttatcaaaaggtcggcgacaactcaatcgacagctggaaaaacgcgggccgtgtctttaaagacagcgataagttcgacgccaacgatccgatcctgaaagatcagacgcaagaatggtccggttctgcaacctttacatctgacggaaaaatccgtttattctacactgactattccggtaaacattacggcaaacaaagcctgacaacagcgcaggtaaatgtgtcaaaatctgatgacacactcaaaatcaacggagtggaagatcacaaaacgatttttgacggagacggaaaaacatatcagaacgttcagcagtttatcgatgaaaggcattatacatccggcgacaaccatacgctgagagaccctcactacgttgaagacggagggcataaataccttgtattcgaagccaacacgggaacagaaaacggataccaaggcgaagaatctttatttaacaaagcgtactacggcggcggcacgaacttcttccgtaaagaaagccagaagcttcagcagagcgctaaaaaacgcgatgctgagttagcgaacggcgccctcggtgtcatagagttaaataatgattacgcattgaaaaaagtaatgaagccgctgatcacttcaaacacggtaactgatgaaatcgagcgcgcgattgttttcaaaatgaacgggaaatggtacttgttcactgattcacgcggttcaaaaatgacgatcggatggtgtaaactcaaacgatatttacatgcctgggtatttattcgcgataagctcatggagcggcgtaaccgtcgcacaggaaggacagagaaagcgcggatctgggaagtgacggacagaacggtcaggacctggattggggaggcggttgccgccgctgctgctgacggtgtgacgttctctgttccggtcacaccacatacgttccgccattcctatgcgatgcacatgctgtatgnccgtataccgctgaaagttctgcaaagcctgatgggacataagtccatcagttcaacggaagtctacacgaaggtttttgcgctggatgtggctgccccgcaccgggtgcagtttgcgatgccggagtctgatgccgcgtactacgggggcggcacgaacttcttccgtaaagaaagccagaagcttcagcagagcgctaaaaaacgcgatgctgagttagcgaacggcgccctcggtatcatagagttaaataatgattacacattgaaaaaagtaatgaagccgctgatcacttcaaacacggtaggtggtgaaatcgagcgcgcgaatgttttcaaaatgaacggcaaatgggacttgttcactgattcacgcggttcaaaaatgacgatcgatggtattaactcaaacgatatttacatgcttggttatgtatcaaactctttaaccggcccttacaagccgctgaacaaaacagggcttgtgctgcaaatgggtcttgatccaaacgatgtgacattcacttactctcacttcgcagtgccgcaagccaaaggcaacaatgtggttatcacaagctacatgacaaacagaggcttcttcgaggataaaaaggcaacatttgcgccaagcttcttaatgaacatcaaaggcaataaaacatccgttgtcaaaaacagcatcctggagcaaggacagctgacatggctccaagtagcgaagcgagcaggactgggcggcggccaaagcggtcggacagtgctccgagaacgggtgcgcatagaaattgcatcaacgcatatagcgctagcagcacgccatagtgactggcgatgctgtcggaatggacgatatcccgcaagaggcccggcagtatttattcgcgataagctcatggagcggcgtaaccgtcgcacaggaaggacagagaaagcgcggatctgggaagtgacggacagaacggtcaggacctggattggggaggcggttgccgccgctgctgctgacggtgtgacgttctctgttccggtcacaccacatacgttccgccattcctatgcgatgcacatgctgtatgccggtataccgctgaaagttctgcaaagcctgatgggacataagtccctcagggatcttctggacccaccttacgtgcagcagctccgggaggtggcaggatatgagctgactatgaaaggggctgccaaagggcgctcccgaagaatggagaaactagcatcccagtgtcccagagtccaaggcaagcatcaagaagacatgatgtatacccacctgaaatccataagggagtgcatgtttgggcctgaagacagcaggtcactagagcccgaaagacgctgatgacacatcaatctacatgttttatcaaaaggtcggcgacaactcaatcgacagctggaaaaacgcgggccgtgtctttaaagacagcgataagttcgacgccaacgatccgatcctgaaagatcagacgcaagaatggtccggttctgcaacctttacatctgacggaaaaatccgtttattctacactgactattccggtaaacattacggcaaacaaagcctgacaacagcgcaggtaaatgtgtcaaaatctgatgacacactcaaaatcaacggagtggaagatcacaaaacgatttttgacggagacggaaaaacatatcagaacgttcagcagtttatcgatgaaggcaattatacatccggcgacaaccatacgctgagagaccctcactacgttgaagacaaaggccataaataccttgtattcgaagccaacacgggaacagaaaacggataccaaggcgaagaatctttatttaacaaagcgtactacggcggcggcacgaacttcttccgtaaagaaagccagaagcttcagcagagcgctanaaaacgcgatgctgagttagcgaacggcgccctcggtatcatagagttaaatatgattaccattgaaaaagtatttattcgcgataagctcatggagcggcgtaaccgtcgcacaggaaggacagagaaagcgcggatctgggaagtgacggacagaacggtcaggacctggattggggaggcggttgccgccgctgctgctgacggtgtgacgttctctgttccggtcacaccacatacgttccgccattcctatgcgatgcacatgctgtatgccggtataccgctgaaagttctgcaaagcctgatgggacataagtccatcagttcaacggaagtctacacgaaggtttttgcgctggatgtggctgcccggcaccgggtgcagtttgcgatgccggagtctgatgcggttgcgatgctgaaacaattatcctga

SEQ ID NO: 127383 - DNA, 2941 bp, Homo sapiens
atggagtatctgcgaatgacttgctggatttggctctcccgggacttcctctggcttccaggagtgatgtatacccgggttttctaccggtttggggagcatttattaatggtgctctgctgcttgttcgaggcagttatcaatgggacgggcactcggcttggtgatccgatcgaggcgcaggcgctgatcgccacctacggccgtgatcgtgatcctggccggccgttgtggttggggtcggtcaagtcgaacatcggtcatacgcaagcggcggcgggtgtggctggtgtgatcaagatggtgatggcgatgcggcacgggcagctgccacgcacgttgcacgtggaatcgccgtcgccggaggtggattggtcggcggggacggttcaactccttacggagaacacgccctggcccaggagtggtcgtgttcgtcgggtgggggtgtcgtcgttcgggatcagtggtactaacgcgcacgtcatcctcgaacagcccccgggagtgccgagtcagtctgcggggccgggttcgggttctgtcgtggatgttccggtggtgccgtggatggtgtcgggcaaaacacccgaagcgctatccgcgcaggcaacggcgttgatgacctatctggacgagcgacctgatgtctcctcgctggatgttgggtactcgctggcgttgacacggtcggcgctggatgagcgagcggtggtgctgtggtcggaccgtgaaacgttgttgtgcggcaaggacacaagaagatggctgtctacaagccaggaaaagattctgcaccaggaactggatcaactggcaccttgatcttggacttcccagcctccagaactatgagatgagaaataagtgtctattgtttaagcctcccagtctatggtattttgttatagcaacccaagatgacaaagacaacaagcctaaaatgaaaaatggcaaagtaaccaagatgtccttcaagagagaacaggaagctaaggtgtttatctacctgcttccgcctcccaccagtggagctttgccccccgggactgtccatgtccctgcacttctggggctgcacaggtggaacaagcgctacaaaaagccaaagccctggggcacaaggcagaaagttgaggtgacaccgctctcgttaatatatggaggaagatctcagatgctccactttcccgagttccagggagctgacctgtatgctcttgagcaggggcagggtgtttgtgatctccgcaacctaactacttacagagttgttcataaagtgagccttggaagtctggtttacatgacatcaaacactggcagaaccatgatgcctggggatgtggccggggacggcggtgggttgggggaagctgtgtttctcagcttccgttacagccagggctgccatgacaaggtaccacaatgggagtggataaaaacacagttctggaatgtgaaagtccaagatcaagatgtcatgctccttttgaaggtcttgcttcaagtgacatactcacaagttccacccagtatggagtacagagagctgaaaggaggagaattgggggttgtaccagaaccagagaaagagaggtgtgtggcaactctccaggagacagtgtccctccaagaagagggcttcgtggagaaaagtagtgactttgagtccaaggacacaaccagaccaaggagtgatgccaggcaagccatttcattttacctctgcattcagggacatcgtgttggtagcttgaagacagccatgctgggaatagttacaccatgggaactgccaaacagtacacaacagagaaatgcctccagcatggaaatttccacacaaggactgagctgtagccaggtaggttcttttcaaatgggcaatagatgtccagttgtcaatcttctgaagaggaaaaagggccctagaattgtggaagcagctgggatgaaaaagccacattctgaaactgttcctgactggacagaccctgggaagaacaccactatcaccattatcaccccaatcatcatatataatcgtcatcattcccatcatcaccattttcaccaacattatcatgccatcatcaccatcaacatcaccatcatcctcatcatcaactccattaccatcatccatattctagagaagaattggaaaacaggatttgggatccgtgaatctggtttcaaaatctggctgttttttcttggttggattcccaaatctttgaaaacaacatctctagcatcttcgaagacagaaggcagtgaatatcggtgctgtttaaaggcccatgtgattatgctgctgccaattcgccaatgctgcaaagatcaaatgggcaaatttagggaacatcagctgcacaactacttggcatctgcacttagcattgctttgatacctgatgaccaactctctgaaaagaaggtatttattcgcgataagctcatggagcggcgtaaccgtcgcacaggaaggacagagaaagcgcggatctgggaagtgacggacagaacggtcaggacctggattggggaggcggttgccgccgctgctgctgacggtgtgacgttctctgttccggtcacaccacatacgttccgccattcctatgcgatgcacatgctgtatgccggtataccgctgaaagttctgcaaagcctgatgggacataagtccatcagttcaacggaagtctacacgaaggtttttgcgctggatgtggctgcccggcaccgggacactgaatcttcgtcggtgtacgttaagtggaccggattagtccacatggacagacacctaatgaacacagaccaagatgtggctgtcctttacaccagtaatctcgcgcagttgaccacagggcaacttcgattgaccgaggagcacagggacagccctatatatatgctacaagattcctga

SEQ ID NO: 127384 - DNA, 2070 bp, Homo sapiens
atgtggaagcgactttggagctgggtaacaggcagaggttggaacagtttggaggactcagaagaagacaagaaaatgtgggaaagtttggaacctcctagagacttgttgaatggctttgacaaaaatgctgatagtgatatgaacaataaggtccaggctgaagtagtctcagatgtaggtgaggaacttgttgggaactggagcaaagggactcctgaggattacccacgatttttccatatgcatcctaggacagcagaacttagtctcctggagccagtaaacagagactttcaccagaaatttgatttggttattaaggctgaacaagacaatggtcatcctcttcctgcctttgccggtctacacattgaaatactggatgaaaacaatcaaagtccatattttacaatgcccagttatcaaggctatatcctggaatctgccccagtgggagcaaccatttcggacagtctcaatttgacttcacctttaagaatagtagctctggacaaggacatagaagatacaaaagacccagagcttcacctttttctgaatgactacacctcagtcttcaccgtcacacagactggtattactcgctacctcaccttacttcaaccagtggacagggaagaacagcaaacttacaccttttcgataacagcatttgatggtgtacaagaaagtgagccagtcatcgtcaatattcaagtgatggatgcaaatgataacacgccaaccttccctgaaatatcctatgatgtgtatgtttatacagacatgagacctggggacagtgtcatacagctgctgatggcaacaaaagacactggggactactatggagggagagagggagaagagacaattgaaaaattaactattgtgtactatactcagtatctgggtgacagaatcaatcataccccaaacctcaacatcatgcaatatacccagggggcttccgaggcgatcaagcagtgtcagtcttcagccgctaagccgagaagatctgggaaggagtcagtcagccttgggccagagttccaggggctctgggagtggctgccagtgatcttatttcattatggtgaaagttggaacctcttacgtgccgatcaacgtctcattttcgccaaaagttggcccaggggcttcccggtatcaacagggacaccaggatttatttattctgcgaagtgatcttccgtcacaggtatttattcgcgataagctcatggagcggcgtaaccgtcgcacaggaaggtatttataaagcgcggatttggggaagtggacggacagaacggtcaggaacctggatatgtcgaggcgggttgcccgccgctgctgctgacggtgtgacgttcatctgatcccggtccaccacaatacgttccgccattcatatgcgatgcacatgctgtatgcccggtaataccgctgaaagttcttgcaaagcctgatgggacataagtcccatcctatcaacgggaaggctaccccaaaggtttttgggcctggaatggggcttgcccgggcacccggggggcaggttggcaatggccgaagtctgatgcggttgggaatgcctaaacaattatccttgagaataaatgcccttggcctttatatggaaactgggaaaccggaggggataatgctgttttttggctgttaaaccagagaaagctgggctgttatcccactgagaagcgaacgaaacaggccgggaaaatctccccttattggggaagatccggattatttaatctaaggaccctggggtaccggttataggaaagaatggttctgtcatgatgcctgcatgcggtaacgaaaacgatttgaatatgccttcaggaacaatacaaatctttctgcgggggtaccttgaattggagcggattatgttagcaatgggccgaacaacctaatgaacacaaaaccatgatggggcctgtccttttacagccagtagtgctcgccgcagtccagcgacagggcgaagccctcgagtgagcgagggagcacccaggaacagcacttatatattctggg

SEQ ID NO: 127385 - DNA, 580 bp, Homo sapiens
tggttgccaacgatccagaggcgctgggcgcaatgcgccgccattaccgaagtccgggctgcgcgttggtgccggatatcttcggtagtgggataccgacgatacccgaagacagcttcatgttatatccccgcgctttaaccacccatcaaacaggattttcggcctgctggggcaaaccagcgtggaccgcttgcttgcaactctctcagggccaggcggtgaagggcaatcagctgttgcccgtctcactggtgaaaagaaaaaccacccttggcgcccaatacgcaaaccgcctctccccgcgcgttggcccgattcattaatgcagctggcaccgacaggtttcccgactggaaagcgggcagtgagcgccaacgcaattaatgtgagttagctcactcattaggcaccccaggctttacactttatgcttccggctcagtatgttgtgtggaattgtgagcggataacaatttcacacaggaaacagctatgaccatgattacgccaagctctaatacgactcactatagggaaagctggtacgcctgcaggtaccggtccggaattcccggcc

SEQ ID NO: 127386 - DNA, 509 bp, Homo sapiens
ccgataagctcatggagcggcgtaaccgtcgcacaggaaggacagagaaagcgcggatctgggaagtgacggacagaacggtcaggacctggattggggaggcggttgccgccgctgctgctgacggtgtgacgttctctgttccggtcacaccacatacgttccgccattcctatgcgatgcacatgctgtatgccggtataccgctgaaagttctgcaaagcctgatgggacataagtgcatcaggtcaacgggaaggctaccccaaaggtttttgggcctggaatggggcttgcccgggcacccggggggcaggttggcaatggccgaagtctgatgcggttgggaatgcctaaaacaataaccttgggataaatggccttggcctttatatggaaactgggaaaccggaggggatatgctgtatttgtctgttaaacagagaagctggctgttatcctctgagaagcgaacgaaacagtccccaaaagctcccattattcgaaaa

SEQ ID NO: 127387 - DNA, 413 bp, Homo sapiens
cagtaatgggatggctgggtcaaatggtatttctagttctagattcctgaggaatcaccacactgacttccacaatggttgaactagtttacagtccaaccaacagtgtaaaagtgttcctatttctccacatcctctccagcacctgttgtttcctgactttttaatgattgccattctaactggtgtgagatggtatctcattgtggttttgatttgcatttctctgatggccaaggagaactacaaaccagtgctcaaggaaataaaagaggatacaaacaaatggaagaacatttcatgctcgtgggtaggaagaatcaatatcgtgaaaatggccatactgcccaaggtaatttatagattaaatgccatccccatcaagctaccaatgactttcttcaaagaattgc

SEQ ID NO: 127388 - DNA, 1256 bp, Homo sapiens
atgattgtatatctagaaaaccccatcgtctcagcccaaaatctcctcaaactgataggcagcttcagcaaagtctcaggatacaaaatcaatgtacaaaaatcacaggcattcttatacaccaataacagacaaacagagagccaaatcatgagtgaactcccattcacaattgcttcaaagagaataaaatacctaggaatccaacttacaagggatgtgaaggacctcttcaaggagaactacaaaccactgctcaacgaaataaaagaggatacaaagaaatggaagaacattccatgctcatgggtaggaagaatcaatatcgtgaaaatggccatactgcccaaggtaatttatagattcaatgccgtccccatcaagctaccaatgactttcttcacagaattgaaaaaaactactttaaagttcatatggaaccaaaaaagagcccgcatcgccaagtcaatcctaagccaaaagaacaaagctggaggcatcacgctacctgacttcaaactatactacaaggctacagtcaccaaaacagcatgggactggtaccaaaacagagatatagatcaatgcaacagaacagagccctcagaaataacacctcatatctacaactatctgatctgtgacaaacctgagaaaaacaagcaatggggaaaggtttccctatttaataaatggtgctgggaaaactggctagccatatgtagaaagctgaaactggatcccttccttacaccttatacaaaaattaattcaagatggattaaagacttaaatgttagacctaaagccataaaaaccctagaagaaaacctgggcaataccattcaggacataggcatggacaaggacttcatgtctaaaacaccaaaagcaatggcaacaaaagccaaaattgacaaatgggatctaattaaactaaagagcttctgcacagcaaaagaaactaccatcagagtgaacaggcaacctacacaatgggagaaaatttttgcaacctactcatctgacaaagggctaatatccagaatctacaatgcactcagacaaatttacaagaaaaaaacaaacaaccccatcaaaaaggacatggatgaaaccggaaaccaccattctcagcatactatcgcaaggacaaaaaaccaaacaccgcatgttctcactcatggatgggaactgaacaatgagaacacatggacacaggaaggggaacatcacactctggggactgttgtgtg

SEQ ID NO: 127389 - DNA, 1078 bp, Homo sapiens
atggataaattcctcgacacatacaccctcccaagactaaaccaggaagaagttgaatctctgaatagaccaataacaggctctgaaattgtggcaataatcaatagcttaccaaccaaaaaagatccaggaccagatggattcacagccgaattctaccagagaataaaatacctgggaatccaacttacaagggatgtgaaggacctcttcaaggagaactacaaaccactgctcaaggaaataaaagaggatacaaacaaatggaagaacattccatgctcatgggtaggaagaatcaatatcatgaaaatggccatactgcccaaggtaatttatagattcaatgccatccccatcaagctaccaatgactttcttcacagaattggaaaaaactactttaaagttcatatggaaccaaaaaagagcccgcatcaccaagtcaatcctaagccaaaagaacaaagccggaggcatcacactacctgacttcaaactatactacaaggctacagtaaccaaaacagcatggtactgttaccaaaacagagatatagatcaatggaacagagcagagccctcagaaataatgctgcctatctacaactatctgatctttgacaaacctgacaaaaacaagcaatggggaaaggattccctatttaataaatggtgctgggaaaactggctagccatatgtagaaagctgaaactggatcccttccttacaccttatacaaaaattaattcaagatggattaaagacttacatgttagacctaaaaccataaaaaccctagaagaaaacctgggcaataccattcaggacataggcatgggcaaggactttatgtctaaaacaccaaaagcaatggcaacaaaagccaaaattgacaaatgggatctaattaaactaaagagcttctgcacagcaaaagaaactaccatcagagtgaacaggcaacctacaaaatgggagaaaattttcacaacctactcatctgacaaagggctaatatccagaatctacaatgaactcaaacaaatttacaagaaaaaaacaaccccatcaaaaa

SEQ ID NO: 127390 - DNA, 977 bp, Homo sapiens
atacttcgttatcgacaccagctgccccgatggtggattcgttaattgcgcgcgtaggagtaatggctcgcggtaatgccattactttgcctgtatgtggtcgggatgtgaagtttactcttgaagtgctccggggtgatagtgttgagaagacctctcgggtatggtcaggtaatgaacgtgaccaggagctgcttactgaggacgcactggatgatctcatcccttcttttctactgactggtcaacagacaccggcgttcggtcgaagagtatctggtgtcatagaaattgccgatgggagtcgccgtcgtaaagctgctgcacttaccgaaagtgattatcgtgttctggttggcgagctggatgatgagcagatggctgcattattcagattgggtaacgattatcgcccaacaagtgcttatgaacgtgttgcttcaaagagaataaaatacctaggaatccaacttacaagggacatgaaggacctcttcaaggagaactacaaactactgctcaatgaaataaaagaggatacaaacaaatggaagaccattccatgctcatgggtaggaagaatcaatatcgtgaaaatggccatactgcccaaggtaatttatagattcagtgccatccccctcaagctaccaatgactttcttcacagaattggaaaaaactactttaacgttcatatggaaccaaaaaagagcccgtattgccaagtcaatcctaagccaaaagaacaaagctggaggcatcaggctacctgacttcaaactatactacaagactacagtaaccaaaacagcatggtactggtaccacagcagagatagaggccaatggaacagaacagagccttcagaaataatgctgcgtatctacaaccatctgatctttgacaaacctgacaaaacaagcaattggggaaggattcccctgtttaataatgatgctgggaaaactgactag

SEQ ID NO: 127391 - DNA, 1004 bp, Homo sapiens
atggggaaaaaacagaacagaaaaactggaaactctaaaaagcagagcgcctctcctcctccaaaggaacgcagttcctcaccagcaaaggaacaaagctggatggagaatgactttgaagagctcagagaagaaggcttcagactatcaaattactctgagctacgggaggacattcaaaccaaaggcaaagaagttgaaaactttgaaaaaaatttagcagtatgtataactagaataaccaatacagagaactgcctaaaggagctaatggagctgaaaaccaaggctcgagaactacgtgaagaatgcagaagcctcaggagccgatgcgatcaactggaagaaaggtggttggaagttctggccagggcaattaggcaggagaaggaaataaagggtattcaattaggaaaagaggaagtcaaattgtccctgtttgcagacgacatgattgtatatctagaaaaccccattgtctcagcccaaaatctccttaagctgataagcaacttcagcaaagtctcaggatacaaaatcaatgtacaaaaatcacaagcattcttatacaccaacaacagacaaacagagagccaaatcatgagtgaactcccattcacaattgcttcaaagagaataaaatacctaggaatccaacttacaagggatgtgaaggatctcttcaaggagaactacaaaccactgctcaaggaaataaaagaggatacaaacaaatggaagaacattccatgctcatgggtaggaagaatcaatatcgtgaaaatggccatactgcccaaggtaatttacagattcaatgccatccccatcaagctaccaatgactttcgtcacagaattggaaaaaactactttaaagttcatatggaaccaaaaaagagcccgcattgccaagtcaatcctaagccaaaagaacaaagctggaggcatcacactacctgacttcaaagtatactacaaggcttcagtaaccaaaacagcatg

SEQ ID NO: 127392 - DNA, 291 bp, Homo sapiens
atggaggaagatctacgaagcaaatggaaagaaaagaaagcagaggttgcaatcctagtctctgatgaaacagactttaaaccaacaaagatcaaaagagacaaagaaggccagtgcataatgagaataaaatacctaggaatccaacttacaagggacgtgaaggacctcttcaaggagaactacaaaccactgctcaatgaaataaaagaggatacaaacaaatggaagaacattccatgctcatgggtaggaagaatcaatatcgtgaaaatggccataccgcccaag

SEQ ID NO: 127393 - DNA, 2025 bp, Homo sapiens; identical to SEQ ID NO: 119515

SEQ ID NO: 127394 - DNA, 2265 bp, Homo sapiens; identical to SEQ ID NO: 116371

SEQ ID NO: 127395 - DNA, 528 bp, Homo sapiens; identical to SEQ ID NO: 119197

SEQ ID NO: 127396 - DNA, 1248 bp, Homo sapiens
atggataaattcctcgacacgtacactctcccaagactaaaccaggaagaagttgaatctctgaatagaccaataacaggagctgaaattgtggcaataatcaatagcttaccaaccaaaaagagtccaggaccagatggattcacagccgaattctaccagaggtacaaggaggaactggtaccattccttctgaaactattccaaccaatagaaaaagagggaatcctccctaactcattttatgagaccagcatcatcctgataccaaagccgggcagagacacaaccaaaaaagagaattttagaccaatatccttgatgaacattgatgcaaaaatcctcaataaaatactagcaaaccgaatccagcagcacatcaaaaagcttatccaccatgatcaaagaataaaatacctaggaatccaacttaaaagggacgtgaaggacctcttcaaggagaactacaaaccactgctcaatgaaataaaagaggatacaaacaaatggaagaacattccatgctcatggctaggaagaatcaatatcatgaaaatggccatactgcccaaggtaatttatagattcaatgccatccccatcaagctaccaatgactttcttcacagaattggaaaaaactactttaaagttcatatggaaccaaaaaagagcccacatcgccaagtcaatcctaagccaaaagaacaaagctggaggcatcacactacctgacttcagactatactccaaggctacagtaaccaaaacagcatggtactggtaccaaaacagagatatagatcaatggaacagaacagagccctcagaaataacgccacatatctacaactatctgatctttgacaaacctgagaaaaacaagcaatggggaaaggattccctatttaataaatggtgctgggaaaactggctagccatatgtagaaagctgaaactggatcccttccttacaccttatacaaaaattaattcaagatggattaaagacttaaacgttatacctaaaaccataaaaaccctagaagaaaacctaggcattaccattcaggacataggcatgggcaaggacttcatgtctaaaacaccaaaagcaatggaaacaaaagccaaaattgacaaatgggatctaattaaactaaagagcttctgcatagcaaaagaaactaccatcagagaacaggcaacccataaaatgggagaaaattttcgcaacctactcatctga

SEQ ID NO: 127397 - DNA, 1206 bp, Homo sapiens
atggggaaaaaacagagtagaaaaactggaaactctaaaaagcagagcacctctcctcctccaaaggaacgcagttcctcaccagcaatggaacaaagctggatggagaatgactttgatgagttgagagaagaaggcttcagaagatcaaactactccgagctacaggaggaaattcaaaccaaaggcaaagaagatgaaaactttgaaaaaaatttagatgaatgtataactagaataaccaatacagagaattgcttaaaggaactgatggagctgaaagccaagactcgagaaatacatgaagaatgcagaagcctcaggaggcgatgcgatcaactggaagaaagggtatcagtgatggaagatgaaatgaatgaaatgaagatcaacaaaattgatagaccactagcaagactagtaaagaagaaaagagagaagaatcaaatagatgcaataaaaaatgataaaggggatatcaccaccgatcccacagaaatacaaactaccatcagaaaatactacaaacacctctatgcaaataaactagaaaatctagaagaaatggataaattcctcgacacatacaccctcccaagactaaaccaggaagaagttgactctctgaatagaccaataacaggctctgaaattgtggcaatagtcaatagcttaccaaccaaaaagagtccaggaccagatggattcacagccaaattctaccagaggtacaaggaggaactgctgataagcaacttcagcaaagtctcaggatacaaaatcaatgtacaaaaatcacaagcattcttatacactgataatagacaaacagagagccaaatcatgagtgaactcacattcacaattgcttcaaagagaataaaatacctaggaatccaacttacaagggacgtgaaggacctcttcaaggagaactacaaactgctgctcaatgaaataaaagaggatacaaacaaatggaagaacattccatgctcatgggtaggaagaatcaatatcatgaaaatggccatactgcccaaggtaatttatagattcaatgccatccccatcaagctaccaatgactttcttcatagaattggaaaaaaactactttaaagttcatatggaaccaaaaaagagcccgcatagccaagtcaatcctaagccaaaagaacaaagctggaggcatcacactacctga

SEQ ID NO: 127398 - DNA, 690 bp, Homo sapiens; identical to SEQ ID NO: 119505

SEQ ID NO: 127399 - DNA, 1371 bp, Homo sapiens; identical to SEQ ID NO: 119198

SEQ ID NO: 127400 - DNA, 2244 bp, Homo sapiens; identical to SEQ ID NO: 119518

SEQ ID NO: 127401 - DNA, 1530 bp, Homo sapiens
cttaagaaatgtataaaaactccagaaatcccttctaaacatgttaggaactgggtccccaaagtcttggaacagcgacgacaaggcttggaaacatacttacaggtagccagcattaccctgataccaaaggcagacgaagacacccccaaaaagaaaactacagacaaaaattcctggacaggcactgatgcaaaagtcttcaataaaatactggaaatcaaattcagcagcatattaaaaagactatattggccagtgttggaagttctggccagggcaatgaggcaggagaaggaaataaagggtattcaattaggaaaagaggaagtcaaattgtcccggtttgcagatgacatgattgtatatctagaaaaccccattgtctcagcccaaaatctccttaagctcataagcaacttcagcaaagtctcaggatacaaaatcaatgtacaaaaatcacaagcattcttatacaccaataacagacaaaaccgagagccaaatcagaataaaatacctaggaatccaacttacaagggacgtgaaggacctcttcaaggagaactacaaaccactgctcaaggaaataaaagaggatacaaacaaatggaagaacattccatgctcatgggtaggaagaatcaatatcgtgaaaatggccatactgcccaagagataccctttctgccagttgtgtcaccaatcagcgatctcaaccacaaaaggcgttttcacgtctatcttgccactgttgatgatcgagcagctggtgagtggacggtcatgcccatcagttgcttggagctctatggagtgcaccactgtctgaagacagatggattttggagaatgacagtgtattcgcataagcttagccaagtggtaactccaactgcagctgctgtaccagatgtggtttcattgcctgagcaaattaacacatttcctggtacctgcgtacaacaactctcgattttgtgtcataatcttgttcacagagattttgatccattttcccttccacaaggtatcacactggtccataacactgataacattatgctgactggatcctataagcaagcagtagcaagcacactggacttattgagatacccgtttcgagccaacacgggaacagaaaacggataccaaggcgaagaatctttatttaacaaagcgtactacggcggcggcacgaacttcttccgtaaagaaagccagaagcttcagcagagcgctaaaaaacgcgatgctgagttagcgaacggcgccctcggtatcatagagttaaataatgattacacattgaaaaaagtaatgaagccgctgatcacttcaaacacggctggtcacctcggactaccgacccgggacaagaagtccaagcagactgcggcggagggggaagttgcagccccggcgctctcggtcaccttggccgtcaccgaagggcctcgcttgcggaagccctcggcccccgaagaaacacaagtgcgccgagccccacgcaagcacgaaaagtag

SEQ ID NO: 127402 - DNA, 1317 bp, Homo sapiens
atggatcaattcctcgacacatacactctcccaagactaaaccaggaagaagttgaatctctgaatagaccaatagcaggatctgaaattgtggaaataatgaatagcttaccaaccaaaaagagtccaggaccagatgggctcacagccgaattctaccagaggtacaaggaggaactggtaccattccttctgaaactcttccaatcaatagaaaaagagggaatcctccctaactcattttatgagaccagcatcatcctgataccaaagcctggcagagacataacaaaaaaagagaattttagaccaatatccttgatgaacattgatgcaaaaatcctcaataaaatactggcaaaccgaatccagcagcacatcaaaaagcttatccaccatgaccaactgataagcaacttcagcaaagtctcaggatacaaaatcaatgtacaaaaatcacaagcattcttatacaccaataacagacaaacagagagccaaatcatgagtgaactcccattcacaattgcttcaaagagaataaaatacctaggaatccaacttacaagggaagtgaaggacctcttcaaggagaactacaaaccactgctcaatgaaataaaagaggatacaaagaaatggaagaatattccatgctcatgggtaggaagaatcaagatcatgaaaatggccatactggccaaggcctgccttacaagagctcctgaaggacgcactaaacatgaaaaggaacaaccagttccagccactgcaaaaacatgccaaattgtaaagaccattgatgctaggaagaaactgcatgagctattgagcaaaataactgcaccacatcacacttattccaaaattgaccgcatagttggaagtaaagcactcctcagcaaatgtaaaagaacagaaattataacaaactgtctctcagaccacagtgcaatcaaactagaactcaggattaagaaactcactcaaaaccactcaactacatggaaactgaacaacctgctcttgaatgactactggttacataaggaaatgaaggcagaaataaagatgttctttgaaaccaatgagaacaaagacacaacataccagaatctctgggatgcatttaaagcagtgtgtagagggaaatttatagcactaaatgcccacaagagaaagcagaaaagatctaaaattgacaccctaacatcacaattaaaagaactagagaagcaagagcaaacacattcaaaagctagcagaaggcaagaaataactaagatcagagcagaactgaaggagatagagacatga

SEQ ID NO: 127403 - DNA, 846 bp, Homo sapiens; identical to SEQ ID NO: 127162

SEQ ID NO: 127404 - DNA, 1011 bp, Homo sapiens
atgagtgaactcccattcacaattgcttcaaagagaataaaatacctaggaatccaccttacaagggacgtgaaggacctcttcaaggagaactacaaaccactgctcaaggaaataaaagaggataaaaacaaatggaagaacattccatgctcatgggtaggaagaatcaatatcatgaaaatggccatactgtccaaggtaatttatagattcaatgccatccccatcaagctaccaatgactttcttcacagaattggaaaaaactactttaaagttcatatggaaccaaaaaagagcccgcatcgccaagtcaatcctaagccaaaagaacaaagctggaggcatcatgctacctgacttcaaactatgctacaaggctacagtaaccaaaacagcatggtactggtaccaaaacagagatatagatcaatggaacagaacagagccctcagaaataacgccgcatatctacaactatctgatctttgacaaacctgacaaaaacaagcaatggggaaaggattccctatttaataaatggtgctgggaaaactggctagccatatgtagaaagctgaaactggatcccttccttacaccttatacaaaaatcaattcaagatggattaaagacttaaacgttaaacctaaaaccataaaaaccctaaaagaaaacctaggcattaccattcaggacataggcacgggcaaggacttcatgtctaaaacaccaaaagcaatggcaacaaaagccaaaattgacaaatgggatctaattaaactaaagagcttctgcacagcaaaagaaactaccatcagagtgaacaggcaacccacaaaatgggagaaagtttttgcaacatactcatctgacaaaggactaatatccagaatctgcaatgaactcaaacaaatttacaagaaaaaaacaaacaaccccatcaaaaagtgggtgaaggacatgaacagacacaggaacacttttacactgttggtgggactgtaa

SEQ ID NO: 127405 - DNA, 419 bp, Homo sapiens
agaataaaatacctaggaatccaacttacaagggatgtgaaggacctcttcaaggagaactacaaaccactgctcaaggaaataaaagaggatacaaacaaatggaagaacattccatgctcatgggtaggaagaatcaatatcgtgaaaatggccatactgcccaaggagtgaagctgcagacattcgtggtgagtgttacagctcataaagacagtgtggacccaaagagtgagcagcagcaagatttattgcaaaaagtgaaagaaaaatgcttccacagtgtggaaggggacatgagtgggttgcagctgctggctctggcagcctgcctttattccctcatctggcctcacgcacatcctgctgattggtccattttacagagagctgattggtccattttgacagggtgctga

SEQ ID NO: 127406 - DNA, 323 bp, Homo sapiens
agaataaaatacctaggaatccaacttacaagggacgtgaaggacctcttcaaggagaactacaaaccactgctcaaggaaataaaagaggatacaaacaaatggaagaacattccatgctcatgggtaggaagaatcaatatcgtgaaaatggccatactgcccaagagataccctttctgccagttgtgtcaccaatcagcgatctcaaccacaaaaggcgttttcacgtctatcttgccactgttgatgatcgagcagctggtgagtggacggtcatgcccatcagttgcttggagctctatggagtgcaccactgtctg

SEQ ID NO: 127407 - DNA, 2021 bp, Homo sapiens
taagcttgtcccttgggctggcctcagtagaacacactgaatgcccctccgcatttgatctgcgtgactccctgttcattgggctgttttggaaactttatggtgatgttccttttatagaagaaagacacagacatcggttcgaggtaaaccctaacctgatcaaacaatttgagcagaatgacttaagttttgtaggtcaggatgttgatggagacaggatggaaatcattgaactggcaaagttgtttttaagagcaaacagaacagaaataaaggcatcagaattgaggaagaacaccgaagttgttgttagtaaccaggctggaacaccctgcactgactttcaaactgtgctctcggagctggagtctgggctgctgcgggagcaggccatgggggctctgggctccttcctgcttcagctgagcagctccactttatctggctcatgtgccatggttctgcaagagagatttcatctgaagaagagcttcctgtgttctgagactgcacagcttatgccactgattggacatcctaatgtggtcccatgtcagatgtgggctgtgaccctttgcagccgttttacaattcccgttattttagattctcacactgaaaggaaggataaaatgcacacaaatccatatggaacagcttgcagttccctgaactccccagagggttttgcctgttgtgtcttgatacacattcctgacctgcttagtgagaggggaatagggatctatatcctattagaatggttgttcacggactcgttaggtgaacaaggtgaatcggaggtgacaaggtggcgaatcggaggtgaattattaggtgaattgcagcttttgaatgtgtttgctcttgcttttctagttcttttaattgtgatgttagggtgtcagttttggatctttcctgctttctcagcccaaaatctccttaagctgataagcaacttcagcaaagtctcaggatacaaaatcaatgtacaaaaatcacaagcattcttatacaccaataacagacaaacagagagccaaatcatgagtgaactcccattcacaattgcttcaaagagaataaaatacctaggaatccaccttacaagggacgtgaaggacctcttcaaggagaactacaaaccactgctcaatgaaataaaagaggatacaaacaaatggaagaacattccatgctcatgggtaggaagaatcaatatcgtgaaaatggccatactgcccaaggtaatttatagattcaatgccatcccaatcaagctaccaatgactttcttcacagaattggaaaaaactactttaaagttcatatggaaccaaaaaagagccctcattgccaagtcaatcctaagccaaaagaacaaagctggaggcatcacactacctgacttcaaactatactgcaaggctacagtaaccaaaacaacatggtactggtaccaaaacagagatatagatcaatggaacagaacagagccctcagaaataacaccgcatatctgcaactatctgatctttgacaaacctgagaaaaacaaggaatggggaaaggattccctatttaataaatggtgctgggaaaactggctagccatatgtaaaaggctgaaactggatcccttccttacaccttataccaaaatcaattcaagatggattaaagacttaaacgttagacctaaaaccataaaaaccctagaagaaaacctaggcattaccattcaggacataggcatgggcaaggacttcatgtgtaaaacaccgaaagcaatggcaacaaaagccaaaattgacaaatgggatctaattaaactaaagagcttctgcacagcaaaagaaactaccattagagtgaacaggcaacccacaaaatgggagaaaattttcgcaacctactcatctgacaaagggctaatatccagaatctacaatgaactcaaacaaatttacaagaaaaaacaaacaaccccatcaaaaagtgggcgaaggacatga

SEQ ID NO: 127408 - DNA, 1476 bp, Homo sapiens
atgcatgtattgattcaacaatattctctgggtgactgctataggcctgcaaactgttgtaggcactggaaactaaaagggcaagcttatggccttacagaagctgacattctagtggaaagtggaacaagattgtacctggttgagagcgtcttgctcctgtgggaaagagaaggtagcagggcagggacagttcggctgacagtttttctatcagctgacctaagtgagtcaattcctatttttatgatactgttgtctgactggctgagcaaagaagattgtttttgtgaggatggagaggtgatctgcatgaggggcaactttaaacttcaagaatgtatcagtcaggacacagataagaaagggaatccatcccaggtggttcagacgaaggggtctcaatgcaagggttacctgcagagtccaatgggactggttcttgttggcagtcttcttccacatgctccatcagggacccaggcttttgttccactctcctctgtccgcagagaactatctattcaactggcatgtgaggagaaagagaaagctaagatcagtcaggggaattttctggaccattccaagaagtcaatgttggaagttctggccagggcaatcaggcaggagaaggaaataaagggcattcaattaggaaaagaggaagtcaaattgtccctgtttgcagatgacatgattgtatatctagaaaaccccattgtctcagcccaaaatctccttaagctgataagcaacttctgcaaagtctcaggatacaaaatcaatgtacaaaaatcacaagcattcttatacaccaataacagacaaacagagagccaaatcctgagtgaactcccattcacaattgattcaaagagaataaaatacctaggaatccaacttacaagggacgtgaaggacctcttcaaggagaactacaaaccactgctcaatgaaataaaagaggatacaaacaaatggaagaacattctatgctcatgggtaggaagaatcaatatcgtgaaaatggccatactgcccaaggtaatttatagattcaatgccatcctcatcaagctaccaatgactttcttcacagaattggaaaaaactactttaaagttcatatggaatgaaaaaagagcccacattgctaagtcaatcctaagccaaaagaacaaagctggaggcgtcatgctacctgacttcaaactatactacaaggctacagtaacccaaacagcatgctactggtaccaaaacagacatatagaccaatggaacagaacagagccctcagaaataatgccgcatatctacaactatctgatcttcgacaaacctgacaaaaacaagcaatggggaaaggattccctatttaataaatggtgctgggaaaactggctagccatatgtagaaagctgaaactggatcccttccttacaccttatacaaaaattaattcaagatag

SEQ ID NO: 127409 - DNA, 831 bp, Homo sapiens
atgattatctcagtagatgcagaaaaggccttcgacaaaattcaacagcccttcatgctaaaacctctcaataaactaggtattgatggaacatattgcaaaataataagagctatttatgacaaacccacagccaatatcatactgaatgggcaaaaactggaagcattccctttgaaaactggcacaagacagggatgtcctctctcaccactcctattcaacatagtgttggaagttctggccagggcaatcaggaaagagaaagaaataaagtgtattcaattaggaaaagaggaagtgaaattgtccctgtttgcagatgacatgattgtatatttagaaaaccacatcgtctcagcccaaaatctcctaaacctgataagcaacttcagcaaagtctcaggataccaaatcaatgtgcaaaaatcacaagcattcctaaacaccaatagcagacaaacaaagagccaaatcatgagtgaactcccattcacagttgctacaaagagaataaaatacctaggaatccaacttacaagggatgtgaaggacctcttcaaggagaactacaaaccactgctcaaggaaataaaagaggatacaaacaaatggaagaacattccatgctcatgggtaggaagaatcaatatcatgaaaatggccatactgctcaaggggatacgttgtaagatccccagtggatgcctgaaaccaaggatagtactgaaactgactgccgtcaatcagaacacatttctgtttatgtctcccatccacaaattcaatgccttttccatcttaacaaagcacttactatgggctgtggct

SEQ ID NO: 127410 - DNA, 480 bp, Homo sapiens
atgagtgaattctctttcataattgcttcaaagagaataaaatacctaggaatccaacttacaagggatgtgaaggacctcttcaaggagaactacaaaccactgctcaatgaaataaaagaggatacaaagaaatggaagaacattccatgctcatgggtaggaagaatcaatatcgtgaaaatggccatactgcccaaggtaagttcaggccctggggaagctggtgccaaagctggggccttcattggccacatagggactgcagctgtcagcacagagagagagagggaaagagagagaaatagagtttggaaattgttcagcaagagctgggaaatgcagtcacacagaagaatgactggtccatcatcaaatcctaatgaaattacctccaaatatctcggtgcctttcagcttctgttagtggagctggacaaatctgatttgagacaagtaattttaagcgtgttcttaaag

SEQ ID NO: 127411 - DNA, 619 bp, Homo sapiens
atgattgtttatctagaaaaccccatcgtctcagcccaaaatctccttaagctgataagcaacttcagcaaagtctcaggatacaaaatcaatgtacaaaaatcacaagcattcttatacaccaacaacagacaaacagagagccaaatcatgggtgaactcccattcacaattgcttcaaagagaataaaatacctaggaatccaacttacaagggatgtgaaggacctcttcaaggagaactacaaaccactgctcaaggaaataaaagaggacacaaacaaatggaagaacattccatgctcatgggtaggaagaatcaatatcgtgaaaatggccatactgcccaaggtcttaaagatggtgtgtccggagtttgttctttctgatgttcggatgtgttcagagtttcttccttctggtgggttcgtggtcttgctggcttcaggagtgaaggtgcagaccttcgtggtgagtgttacagctcttaagctggcatgtttggagttgttcgttcttccagtccggagttgtccattcttcctgtccggagttgttcattcttcccggtgggctcctggtctcgctggcctcaggagtgaacctgcagacctttgcg

SEQ ID NO: 127412 - DNA, 1296 bp, Homo sapiens; identical to SEQ ID NO: 119528

SEQ ID NO: 127413 - DNA, 1041 bp, Homo sapiens; identical to SEQ ID NO: 119529

SEQ ID NO: 127414 - DNA, 718 bp, Homo sapiens; identical to SEQ ID NO: 127169

SEQ ID NO: 127415 - DNA, 1227 bp, Homo sapiens; identical to SEQ ID NO: 124513
  misc_feature (1)...(1227): n = a,t,c or g

SEQ ID NO: 127416 - DNA, 992 bp, Homo sapiens; identical to SEQ ID NO: 124187

SEQ ID NO: 127417 - DNA, 1239 bp, Homo sapiens
atggataaattcctcgacacatacactctcccaagactaaaccaggaagaagttgaatctctgactagaccaataacaggatctgaaattgtggcaataatcaatagcttaccaaccaaaaagagtccaggaccagatggattcacagccgatttctaccagagatgcagaaaaggccttgacaaaattcaacaaccctttatgctaaaaactctcaataaattaggtattgatgggatgtatttcaaaataataagagctatctatgacaaacccacagccaatatcatactgaatgggcaaaaactggaagcattccctttgaaaactggcacaagacagggatgccctctctcaccactcctatttaacatagtgttggaagttctggccagggcaatcaggcaggagaaggaaataaagggtattcaattaggaaaagaggaagtcaaattgtccctgtttgcagacgacatgattgtatatctagaaaaccccattgtctcagcccaaaatctccttaagctgataagcaacttcagcaaagtctcaggatacaaaatcaatgtacaaaaatcacaagcattcttatacaccaacagacaaacagagagccaaatcatgagtgaactcccattcacaattgcttcaaagagaataaaatacttaggaatccaacttacaagggatgtgaaggacctcttcaaggagaactacaaaccactgctcaatgaaataaaagaggatacaaacaaatggaagaacattccatgttcatgggtaggaagaatcaatatcatgaaaatgtccatactgcccaaggtaatttatagattcaatgccatccccatcaagctaccaatgactttcttcacagaattggaaaaaactactttaaagttcatatggaaccaaaaaagagcccgcatcgccaagtcaatcctaagccaaaagaagaaagctggaggcgtcacgctacctgacttcaaactatactacaaggctacagtaaccaaaacagcatggagctatttgttcaggggaaaaaatggaaagtggaaagatgaagtcagttttctcgtgatgttttcaaggatgaatacttgtgaaggacaagcacgcaatctcttcttagaaaaagtcaatccagagaacctagaaggtccttcggagtggcaaatagaagatcgcaacttgaaggaaaacaaaagtaagaaaatcggaagactcaacccctga

SEQ ID NO: 127418 - DNA, 1074 bp, Homo sapiens; identical to SEQ ID NO: 119536

SEQ ID NO: 127419 - DNA, 1397 bp, Homo sapiens
atgtggttggcaaaatcagtacctgttatgggagtatctgttgcattaggaacaatcgaggaagtttgttcttttttccatcgatcaccacaactgcttttagaacttgacaacaaaacggcggcggaaggagaaaggctccccgcaatccaatcactcggcagcacgtggccgggagtgaagtttattctgcaagtgttccggggtgatagtgttgagaagacctttcgggtatggtcaggtaatgaacgtgaccagcagctgctcactgaggacgcactggatgatctcatcccttcttttctactgactggtcaacagacaccggcgttcggtcgaagagtatctggtgtcatagaaattgccgatgggagtcgccgtcgtaaagctgctgcacttaccgaaagtgattatcgtgttctggttggcgagctggatgatgagcagatggctgcattatccagattgggtaacgattatcgcccaacaagtgcttatgaacgtggtcagcgttatgcaagccgattgcagaatgaatttgctggaaatatttctgcgctggctgatgcggaaaatatttcacgtaagattattacccgctgtatcaacaccgccaaattgcctaaatcagttgttgctcttttttctcaccccggtgaactatctgcccggtcaggtgatgcacttcaaaaagcctttacagataaagaggaattacttaagcagcaggcatctaaccttcatgagcagaaaaaagctgggcaaagtctcaggatcacaaaatccatgtgcaaaaatcgccaagcatttttatccgccaatagcggacagacagagagccaaatcatgagtgaactcccattcacaatggcttcaaagagaataaaatacctaggaatccaacttacaagggacgtgaaggacctcttcaaggagaagtacaaatcactgctcaatgaaataaaagaggatacaaacaaatggaagaacaatccatgctcatgggtaggaagaatcaatatcatgaaaatggccatactgcccaaggtaatttatagattcaatgccatccccatcaagctaccaatgactttcttcacagaattggaaaaaactacttttaagttcatatggaaccaaaaaagagcccacatcgccaagtcaaacctaagccaaaagaacaaagctggaggcatcacactacctgacttcaaactatactacaaggctacagtaaccaaaacaacatgatactggtaccaaaacagagatatagaccaatggaacagaacagaggcctcagaaataatgccacacatctacaacaatctgatctttgacaaacctgagaaaaacaagcaatggggaaaggattccctatttaataaatggtgctg

SEQ ID NO: 127420 - DNA, 2134 bp, Homo sapiens
ttatttaattagatcccatttgtcaattttggcttttgttgccattgcttttggtgttttagacatgaagtccttgcccatgcctatgtcctgaatggtattgcctaggttttcttctagggtttttatggttttaggtctaacatgtaagtctttaatccatcttgaattaatttttgtataaggtgtaaggaagggatccagtttcagctttctacatatggctagacagttttcccagcaccagttattaaatagggaatcatttccccatttcttgtttttgtcaggtttgcaaaagatcagattcttgtagatatggggcattatttctgagggctctgttctgttccgttggtctatatctctgttttggtaccagtaccatgctgttttggttactgtagcactgtaggatagtttgaagtcaggtagtgtgatgcctccagctttgttctttttgcttaggattgacttggcaatgcaggctcttttttgattccatatgaactttaaagtaattttttccaattctgtgaagaaagtcattggtagcttgatggggatggcattgaatctataaattaccttgggcagcatggccattttcatgatattgattcttcctacccatgagcatggaatgttcttccatttgtttgtatcctcttttatttcattgagcagtggtttgtagttctccttgaagaggtccttcacgtcccttgtaagttggattcctaggtattttattctctttgaagcaattgtgaatgggagttcactcatgatttggctctctgtttgtctgttatttgtgtataagaatacttgtgatttttgcacattgattttgtatcctgagactttgctgaagttgcccaacatgaacgctacgtcttgtgcactctcccagttgtagtcacaggcagagggccccccggggtctttctccccaaaagccccccaaattttccggggggccagcccaaaacaaaacccgttttccggggggggcggggggcaaagctttttccccgagcataaaattttggggatggccgggtactcctctgagacaaaacttccagaggaacgatcaggcagcagcatttgtggttcaccaatatccactgttgtgcagccaccgctgctgacacccagccaaacagggtctggagtggacctccagtaaactccaacagacctgcatctgagggtcctgactgttagaaggaaaactaacaaacagaaaggacatccacaccaaaaccccatctgtacatcaccatcatcaaagaccaaagtgttggaagttctggccagggcaatcaggcaagagaaggaaataaagggtattcaagtaggaaaagaggaagtcaaattgtccctgtttgcagatgacatgattgtatatctagaaaaccccatcgtctcagcccaaaatctccttaagctgataagcaacttcagcaaagtgtcaggatacaaaatcaatgtgcaaaaatcacaagcattcttatacaccaataacagacaaacagagagccaaatcacgagtgaactcccattcacaattgcttcaaagagaataaaatacctaggaatccaacttacaaggggcgtgaaggacctcttcaaggagaactacaaaccactgctcaatgaaataaaagaggatacaaacaaatggaagaacattccatgctcatgggtaggaataatcaatatcgtgaaaatggccatactgcccaaggtaatttatagattcaatgccatccccatcaagctaccaatgactttcttcacagaattggaaacaactactttaaagttcatatggaaccaaaagagagcccgcattgccaagtcaatcctaagccaaaagaacaaagctggaggcatcacgctacctgacttcaaactatactacaaggctacagtaaccaaaacagcatggtactggtaccaaaacagagatatagaccaatggaacagaatagagccctcagaaataatgccgcatatctacaaaaaagtccaaatagccaaagcaactctaaacaaaatgaacaaacctggaggcatcacattacctgactttaaaatatattacaaggatatagtaacctaa

SEQ ID NO: 127421 - DNA, 2271 bp, Homo sapiens
gtactgctgtcctttggcacacctctagtgctgaccactgaccttctccaggctctctcctctttgcctttcatggaatcagggctttttcaaggtgaaggagatgaaatacaaattaccagcatagaatactataaacacctctacgcaaataaactagaaaatctagaagaaatggataaactcctcgacacatacaccctcccaagactaaaccaggaaggagttgaatctctgaatagaccaataacaggatctgaaattgaggcaataattaatagcttaccaaccaaaaaaggtccaggaccagatggattcacagccaaattctgccagaggtacaaggaggagctgcacatcaaaaagcttatccaccatgatcaagtgggcttcatccctgggatgcaaggctggttcaacatacgcaaatcaataaacgtaatcgagcatataaacagaaccaaggacaaaaaccacatgattatcttaatagatgcagaaaaggcctttgacaaaattcaacaacccttcatgctaaaaactctcaataaattaggtattgatgggacgtatctcaaaataataagagctatctatggcaaacccacagtcaatatcatactgaataggcaaaaactggaagcattccctttgaaaactggcacaagacagggatgccctctctcaccactcctattcaacatagtgttggaagttctggccaaggcaattaggcaggagaaggaaataaagggtattcaattaggaaaagaggaagtcaaattgtccctgtttgcggacgacatgattgtatatctagaaaaccccatcatctcagcccaaaatctccttaagctgacaggcaacttcagcaaagtctcaggatacaaaatcaatgtgcaaaaatcacaagcattcttatacaccaataacagacaaacagagagccaaatcatgagtgaactcccattcacaattgcttcaaagagaataaaatacctaggaatccaacttacaagggatgtgaaggacctcgtaaaggagaactacaaaccactgctcaaggaaataaaagaggatacaaacaaatggaagaacattccatgctcatgggtaggaagaatcaatatcctgaaaatggccatactgcccaaggtaatttatagattcaatgccatccccatcaagctaccaatgactttcttcacagaattggaaaaaactactttaaagttcatatggaaccaaaaaagagcctgcattgccaagtcaatcctaagccaaaagaacaaagctggaggcatcacgctacctgacttcaagcgatgctacaaggctacagtaaccaaaacagcatggtactggtaccagaacagaggtatagatcaagggaacagaacagagccctcagaaataatgccacatatctacaaccatgtgatctttgacaaacctgacaaaaacaagcaatggggaaacgattccctagttaataaatggtgctgggaaaactggctagccatgtgtagaaagctgaaactggatcccttccttacaccttatacaaaaattaattcaagatggattaaagacttacatgttagacctaaaaccataaaaaccctagaagaaaacctaggcaatatcattcaggacataggcatgggcaaggacttcatatctaaagcaccaaaagcaacagcaacaaaagccaatattgacaaatgggatctaattaaactaaagagcttctgcacagcaaaagcaactaccatcagagtgaacaggcaacctacagaatgggagaaaatttttgcaatctactcatctgacaaagggctaatatccagaatctacaatgaactcaaacaaatttacaagaaaaaaacaaacaaccccatcaaaaagtgggcaaaggatatgaacagacacttctcaaaagaagatatttatgcagccaaaagacacatgaaaaaatgctcatcatcactggccatcagagaaatgcaaattgaaaccacaatgagataccatctcacaccagttagaatggcgatcattaaaaagtcaggaaacaacaggaatatccagactgtgctcctactcaggatcccattccagggcctggttccttcccccagcgggcagacacatccagtaggcgaccagccagcagcgcatgtagacagcatcgacgccgataccaggctcagaggacagaaccatattccagaggagctggggagaggcgttgtctccaatccagttgag

SEQ ID NO: 127422 - DNA, 3417 bp, Homo sapiens
cagggcaatcaggcaggagaaggaaataaaaggcattcaattaggaaaagaggaagtcaaattgtccccgtttgcagatgacatgattgtatatctagaaaaccccatcgtctcagcccaaaatctccttaagctgataagcaacttcagcaaagtctcaggatacaaaatcaatgtgcaaaaatcacaagcattcttatacagcaataaaagacaaacagagaaccaaatcatgagtgaactcccattcacaattgcttcaaagagaataaaatacctaggaatccaacttacaagggatgtgaaggacctcttcaaggagaactacaaaccactgctcaatgaaataaaagaggataaaaacaaatggaagaacattccatgctcacgggtaggaagaatcaatatcgtgaaaatggccatactgcccaaggtaatttatagattcaagtttccattgacaacagatcaagaaaatgtggtcagattaacgagacagaaagttaacaagggtatccaggaattgaactcagctctgccccgagtggacctaatagacatctacagaactctccagcccaaatcaacagaatatacattcttttcagtaccacaccacaactattccaaaattgaccacatagttggaagtaaagcactcctcagcaaatgtaaaagaacagaaattataacaaactgtctctcagaccacagtgcaatcaaactagaactcaggattaagaagcacactcaaaaccgctcaactacatggaaactgaacaacctgctcctgaatgactactgggtacataacaaaatgaaggcagaaataaagatgttctttgaaaccaatgagaacaaagacacaacataccaaaatctctgggacacattcaaagcagtatgtagagggaaatttatagcactaaatgcccacaagagaaagcaggaaagatctaaaattgacaccctaacatcacaattaaaagaactagaaaagcaagagcaaacacattcaaaagctagcagaaggcaacaaataactaagatcagagcagaactgaaggaaatagagacacaaaaaaacccttcaaaaaatcaatgaatccaggagctggttttttgaaaggatcaacaaaattgatagaccactagcaagactaataaagaaaaaaagagagaagaatcaaatagacacaataaaaaatgataaaggggatatcaccactgatcccacagaaatacaaactaccatcagagaatactacaaacacctctacgcaaataaactagaaaatctagacgaaatggataaattcctccacacatacactctcccaagactaaaccaggaagaagttgaatctctgaatggaccaataacaggagctgaaattgtggcaataatcgatagtttaccaaccaaaaagagtccaggaccagatggattcacagctgaattctaccagaggtacaaggaggaactggtaccattccttctgaaactattccaatcaatagaaaaagagggaatcctccctaactcattttatgaggccagcatcattctgataccaaagctgggcagagacacaaccaaaaaagagaattttagaccactatccttgatgaacattgatgcaaaaatcctcaataaaatactggcaaaacgaatccagcagcacatcaaaaagcttatccaccatgatcaagtgggcttcatccctgggatgcaaggctggttcaatatacgcaaatcaataaatgtaatccagcatataaacagaggcaaagacaaaaaccacatgattatctcaatagatgcagaaaaagcctttgacaaaattcaacaacccttcatgctaaaaactctcaataaattaggtattgatgggacgtatttcaaaataataagagctatctatgacaaacccacagccaatatcatactgaatgggcaaaaactggaagcattccctttgaaaactggcacaagacagggatgccctctctcaccactcctattcaacatagtgttggaagttctggccagggcaattaggcaggagaaggaaataaagctgataagcaacttcagcaaagtctcaggatacaaaatcaatgtacaaaaatcacaagcattcttatacaccaacaacagacaaacagagagccaaatcatgagtcaactcccattcacaattgcttcaaagagaataaaatacctaggaatccaacttacaagggatgtgaaggacctcttcaaggagaactacaaaccactgctcaaggaaataaaagaggatacaaacaaatggaagaacattccatgctcatgggtaggaagaatcaatatcatgaaaatggccatactgcccaaggtaatttacagattcaatgccatccccatcaagctaccaatgactttcttcacagaattggaaaaaactactttcaagttcatatggaaccaaaaaagagcccgcatcaccaagtcaatcctaagccaaaagaacaaagctggaggcatcacgctacctgacttcaaactatactacaaggctacagtaaccaaaacagcatggtactggtaccaaaacagagatatagatcaatggaacagaacagagccctcagaaataatgctgcatatctacaactatctgatctttgacaaacctgagaaaaacaagcaatggggaaaggattccctatttaataaatggtgctgggaaaactggctagccatatgtagaaagctgaaactggatcccttccttacaccttatacaaaaatcaattcaagatggattaaagatttaaacgttagacctaaaaccataaaaaccctagaagaaaacctaggcattaccattcaggacataggcataggcaaggacttcatgtccaaaacaccaaaagcaatggcaacaaaagccaaaattgacaaatgggatctaattaaactaaagagcttctgcacagcaaaagaaactaccatcagagtgaacagaaaacctacagagaggggagaaaattttcgcaacctactcatctgacaaagggctaatatccagaatctacaatgaactcaaacaaatttacaagaaaaaaacaaacaaccccatcaaaaagtgggcaaaggacatgaacagacacttctcaaaagaagacatttatgcagccaaaaatcacacgaaaaaatgctcatcatcactggccatcagagaaatgccaatcaaaaccacaatgagataccatctcacaccagttataatcagcccctacctggctttgcccctcaacaggccctggcagcttaacacaaaagacagaaacttttgggacctctctggccccacccattgcctgaaacaccagaaaacctccccgggtaacataaggcaagcacagatc

SEQ ID NO: 127423 - DNA, 2117 bp, Homo sapiens
atggagctgaaaaccaaggctcgagaactacgtgaagaatgcagaagcctcaggagccgatgcgatcaactggaagaaagggtatcagcaatggaagatgaaatgaatgaaatgaagcgagaagggaagtttagagaaaaaagaataaaaagaaatgagcaaagcctccaagaaatatgggactatgtgaaaagaccaaatctacgtctgattggtgtacctgaaagtgatggggagaatggaaccaagttggaaaacactctgcaggatattatccaggagaacttccccaatctagcaaggcaggccaaccatataaacagagccaaagacaaaacccacatgattatctcaatagatgcagaaaaagcctttgacaaaattcaacaactcttcatgctaaaaactctcaataaattaggtattgatgggacgtatttcaaaataataagagctatctatgacaaacccacagccaatatcatactgaatgggcaaaaactggaagcattccctttgaaaactggcacaagacagggatgccctctctcaccgctcctattcaacatagtgttggaagttctggccagggcaatcaggcaggagaaggaaataaagggtattcaattagcaaaagaggaagtcaaattgtccctgtttgcagacgacatgattgtttatctagaaaaccccatcgtctcagcccaaaatctccttaagctgataagcaacttcggcaaagtctcaggatacaaaatcaatgtacaaaaatcacaagcattcttatacaccaacaccagacaaacagagagccaaatcatgagtgaactcccattcacaattgcttcaaagagaataaaatacctaggaatccaacttacaagggatgtgaaggacctcttcaaggagaactacaaaccactgctcaaggaaataaaagaggacacaaacaaatggaagaacattccatgctcatgggtaggaagaatcaatatcgtgaaaatggccatactgcccaaggtaatttacagattcaatgccatccccatcaagctaccaatgactttcttcacagaattggaaaaaactactttaaagttcatatggaaccaaaaaagagcccgcatcgccaagtcaatcctaagccaaaagaacaaagctggaggcatcacgctacctgacttcaaactatactacaaggctacagtaaccaaaacagcatggtactggtaccaaaacaaagatatagaccaatggaacagaacagagccctcagaaataatgtcacatatctacaactatccgatctttgacaaacctgacaaaaacaagaaatggggaaacaattccctatttaataaatggtgctgggaaaactggctagccatatgtagaaagctgaaactagatcccttccttacaccttatactaaaattaattcaagatggattaaagacttacatgttagacctaaaaccataaaaaccctagaagaaaacctaagcaataccattcaggacataggcatgggcaaggacttcatgtctaaaacaccaaaagcaatggcaacaaaagccaaaattgaccaatgggatctaattaaactaaagagcttctgcacagcaaaggaaactaccatcagagtgaacaggcaacctacagaatgggagaaaatttttgcaacccactcatctgacaaagggctactgtccagaatctacaatgaactcaaacaaatttacaagaaaaaaacagacaaccccatcaacaagtgggcgaaggacatgaacagacacttctcaaaagaagacatttatgcagccaaaagacacatgaaaaaatgctcatcatcactggccatcagagaaatgcaaatcaaaaccacaatgagataccatctcacaccagttagaatggcaatcattaaaaagtcaggaaacaacaggtggaatatatcagaggacccaggtttggctctgtcctgtatcaaggaggcctccatcactgtgccaagcttgcgatgtgctgtgtccattatccagggcatattgagcaactgggtacaaaagatcacaggctcagggtctatgagagcctctgttttcagagaagcctg

SEQ ID NO: 127424 - DNA, 1942 bp, Homo sapiens
atggcgtccccaggacctgcacccacagccagtcccaaaatccactctgagctgttaacagcaaccagagaagctcagagacatcatcctgtgccccgtggtcaagacctagtgacctcagaatcattctcgctctccttctgcttctcagctgccatcttcatttttgaacttttgggttcaaactcagaaggagtcacagatcttagactgtggctatgccagccagcgcccaggtgcggggagtggacctacaaccccttggagcagtgctgtgatgacggtgtcatcctagacttgaaccagacccggctctgcggctccagctgcaccttctggccctgcttccagcactgctgcctggagtctttgggctctcagaaccagacagttgtgaggttcaaggtcccaggcatgaagccagattgcaagtcctcccctatcaccaggatctgtgcccaggctggagtgcaaataagcaacttcagcaaagtctcaggatacaaaatcaatgtacaaaaatcacaagcattcttatacaccaacaacagacaaacagagagccaaatcatgagtgaactcccattcacaattgcttcacagagaataaaatacctaggaatccaacttacaagggatgtgaaggacctcttcaaggagaactacaaaccactgctcaaggaaataaaagaggatacaaacaaatggaagaacattccatgctcatgggtaggaagaatcaatatcgtgaaaatggccatactgcccaaggtaatttacagattcaatgccatccccatcaagctaccaatgactttcttcacagaattggaaaaaactactttaaagttcatatggaaccaaaaaagagccctcatcgccaagtcaatcctaagccaaaagaacaaagctggaggcatcacactacctgacttcaaactatactataaggctacagtaaccaaaacagcatggtactggtaccaaaacagagatatagatcaatggaacagaacagagccctcagaaataacgccgcatatctacaactatctgatctttgacaaacctgagaaaaacaagcaatggggaaaggattccctatttaataaatggtgctgggaaaactggctagccatatgtagaaagctgaaactggatcccttccttacaccttatacaaaaatcaattcaagatggattaaagacttaaacgttagacctaaaaccataaaaaccctagaagaaaacctaggcattaccattcaggacataggcatgagcaaggacttcatgtctaaaacaccaaaagcaatggcaacaaaagacaaaattgacaaatgggatctaattaaactaaagagcttctgcacagcaaaagaaactaccatcagagttgaacaggcaacctacaaaatgggagaaaatttttgcaacctactcatctgacaaagggctaatatccagaatctacagtgaactcaaacaaatttacaagaaagaaacaaacaaccccatcaaaaagtgggcaaaggacatgaacagacacttctcaaaagaagacatttatgcagccaaaaaacacatgaaaaaatgctcgtcatcactggccatcagagaaatgcaaatcaaaaccacaatgagataccatctcacaccagttagaatggcaatcattaaaaagtcaggaaacaacagactctgcagggaactgaggataaaagcggctgcaggggagcaagacctggagcgtcatcgagagattgcaaaaacaattcactgccaacagactgtcccagcagggtcccagtgctatggtcgtggccctgattggcatgctgcccctcggatgcccaatcagatggaaccggaagaaatcgaatacagagtcagtccactttatctctgtataaccacccaaatgaacagcatgggaaattga

SEQ ID NO: 127425 - DNA, 1669 bp, Homo sapiens
atggagtcttttcagtgtgccctaaaggaggtgggccttgatgagccactgagacttgctggcttcaggggagactcagcacattaccagctctggtggctacagggcaaaagtaaagaggcaaaagcagaggcaaaagtaaaggcgactttgtcttgcaccttaggtaccaaaaccgccacagtgttggaagttctggccagggcaatcaggcaggagaaggaaataaagggtattcaattaggaaaagaggaagtcaaattgtccctgtttgcagacgacatgattgtttatctagaaaaccccatcgtctcagcccaaaatctccttaagctgataagcaacttcagcaaagtctcaggatacaaaatcaatgtacaaaaatcacaagcattcttatacaccaacaacagacaaacagagagccaaatcatgagtgaactcccattcacaattgcttcaaagagaataaaatacctaggaatccaacttacaagggatgtgaaggacctcttcaaggagaactacaaaccactgctcaaggaaataaaagaggatacaaacaaatggaagaacattccatgctcatgggtaggaagaatcaatatcgtgaaaatggccatactgcccaagggaatttacagattcaatgccatccccatcaagctaccaatgattttcttcacagaattggaaaaaactactttaaagttcatatggaaccaaaaaagagcccgcatcgccaagtcaatcctaagccaaaagaacaaatctggaggcatcacactacctgacttcaaactatactacaaggctacagtaaccaaaacagcatggtactggtcccaaaacagagatatagatcaatggaacagaacagagccctcagaaataacgccgcgtatctacaactatctgatctttgacaaacctgagaaaaacaagcaatggggaaaggattccctatttaataaatggtgctgggaaaactggctagccatatgtagaaagctgaaactggatcccttccttacaccttatacaaaaatcaattcaagatggattaaagatttaaacgttagacctaaaaccataaaaaccctagaagaaaacctaggcattaccattcaggacataggcgtgggcaaggacttcatgtccaaaacaccaaaagcaatggcaacaaaagccaaaattgacaaatgggatctaattaaactaaagagcttctgcacagcaaaagaaactaccatcagagtgaacaggcaacctacaacatgggagaaaattttcgcaacctactcatctgacaaagggctaatatccagaatctacaatgaactcaaacaaatttacaagaaaaaaacaaacaaccccatcaaaaagtgggcgaaggacatgaacagacacttctcaaaagaagacatttatgcagccaaaaaacacatgaaaaaatgctcatcatcactggccatcagaaaaattctttttaaaaaaataagttctacctttattttagattctggggttacattgcagcgtttggatttcaacattctcttgaatcttgttgatcttctttgtcaccctgattctgaattttatgtctgtcatttcagacatttcaatctggttaggatccaccagggagctaatgcaatttttgcag

SEQ ID NO: 127426 - DNA, 2826 bp, Homo sapiens
atggccaggacaagttacgggcagcacttcttcccaaccctcatttccatgaatatagacagtggtaggcagaataatggcatccccaaattgtccacatcctactcactgaaacctatgaatacattatgttacctggtaaaaagggacttggaaggtgtgcttaagttaaggatcttgacatgggagagtagcctggattatccaggtgggcctagtgtaatcacaaaggtccttataagacagaaggagggccagagtcagagaacgagatatgacaatggaagcagaggttggagtgatgccatcgctgtaaaaaggccacaagccaaggaatgtgggtggccactagaggctggaaaaggcaaggaatggattcttagaaaggaatgcatccctgccaacaccttgatgttagcccagtgcccacccacactcagggtgggtggaagtgtctgcagtgcctggaggatgattcagaactcagatggggagaggaggaaaaggaacagaatccagcttcaggcagtaagactctcaaaagttatacatgatacttttagaaactttccaaggtttgttcattccagagagctatcaaagggagctgagaaaagctcctctttgaagaagggtttggagcaagtcattatctggacaaaatgtagacaatgtggagaaagcaggtgtacaaagaaagtggaggaacggaaagtacttcataacaccttcatcagtaccagcaccactataaccactctaggacagaagcatcaatttgctgtgaagaaatatgccagaattaccacctacctcacatcttctagggaaaatcaagggaaaggtttatgtcctcagctaaacaaaatcgctgcctctttcaccaaggggccaatcagcactgaccctgggatagcagagccctgtgcaggggtggcagatggagtgagacccctggaaaccaccatttcattctttggttctgtaaattttgagcacttttctatgcctcagatcccagaacagagtcagccagacttgtacctaccagacaggtcactgaaaatcttccacaaggaaatacaatcaaccaaagagaaaacaaaaaagaaaatggtcgaatctatcagggaaaagaaatggaaaacaaggtggttttgcacaggattaaagaattatctggccagggcaattaggcaggagaaggaaataaagggtattcaattaggaaaagaggaagtcaaattgtccctgtttgcagatgacatgattgtatatctagaaaaccccattgtctcagcccaaaatctccttaagctgataagcaacttcagcaaagtctcaggatacaaaatcaatgtacgaaaatcacaagcattcttatacaccaataacagacaaacagagagccaaatcatgagtgaactcccattcacaattgcttcaaagagaataaaatacctaggaatccaacttacaagggatgtgaaggacctcttcaaggagaactacaaaccactgctcaatgaaataaaagaggatacaaacaaatggaagaacattccatgctcatgggtaggaagaatcaatatcatgaaaatggccatactgcccaaggtaatttatagattcaatgccatccccatcaagctaccaatgactttcttcacagaattggaaaaaactactttaaagttcatatggaaccaaaaaagagcccgcattgccaagtcaatcctaagccaaaagaacaaagctggaggcatcacactacctgacttcaaactatactacaaggctacagtaaccaaaacagcatggtactggtaccaaaacagagatacagaccaatggaacagaacagagccctcagaaataatgccgcttatctacaactatctgatctttgacaaacctgacaaaaacaagcaatggggaaaggattccctatttaataagtggtgctgggaaaactggctagccatatgtagaaaactgaaactggatcccttccttacatcttatacaaaaattaattcaagatggattaaagacttaaatgttagacctaaaaccataaaaaccctagaagaaaacctaggcattaccattcaggacataggcatgggcaaggacttcatgtctaaaacaccaaaagcaatggcaacaaaagccaaaattgacaaatgggatctaattaaactaaagagcttctgcgcagcaaaagaaactaccatcagagtgaacaggcaacctacgcaatgggagaaaatttttgcaacctactcatctgacaaagggctgatacccagaatctacaatgaactcaaacaaatttacaaggaaaaaacaaacaaccccatcaaaaagtgggcaaagaatatgaacagacacttctcaaaagaagacatttatgcagccaacagacacatgaaaaaatgctcatcatcactggctatcagagaaatgcaaatcaaaaccacaatgagataccatctcacaccagttagaatggcaatcattaaaaagtcaggaaacaacagtcttattctagtgcccctattaaaaaaagaagaacgtgctttgcagagtgacaccactacaaagccaagtagaaccagtgtccaaaggtcaccaattcaagataagcccagatttggcattcatctgaagagtccagtaaagatccagaggacatcgtgtcagttcaagtgtggcaggccaggtctcactaacacaggcctccgtaacaactgtttccatactgaccgagtggttaagttaaatattgaaagtcaaagcccttatacaaagcctgggatataa

SEQ ID NO: 127427 - DNA, 2540 bp, Homo sapiens
atgatcctatgtttagaaaaccccatcatctcaactcaaaagctccttaagctgataagcagcatcggcaaagtctcaggatacaaaatcaatgtgcaaaagacacaatcatttctacacaccaacaatagacaagcagagagccaaatcatgtatgaactcccattcacaattgctacaaagaataaaatacctaggaattcagctaacaaggaacatgaaggacctcttcaagaactacaaaccattgctcaaggaaataagagaggacacaaacaaatggaaaagcaatccatgctcttggataggaagaatcgatatcatgaaaatggccctactgcccaagatgcagaaaaggccattgacaaaattcaacaacgcttcatgctaaaagccctcaataaattaggtattgatgggatgtatctcaaaatactaagagctttttatgacaaacccacagccaatatcatactgaatgggcaaaaactggaagcattccctttgaaaactggcacaagacagggatgccctctctcaccactcctattcaacatagtgttggaagttctggccagggcaatcaggcaggagaaggaaataaagggtattcatttaggaaaagaagaagtcaaattgtccctatttgcagatgacatgattgtatgtctagaaaaccccattgtctcagcccaaaatctccttaagctgataggcaacttcagcaaagcctcaggatacaaaatcaatgtgcaaaaatcacaagcattcttatacagcaataacagacaaacagagagccaaatcatgagtgaattcccattcacaattgcttcaaaaagaataaaatacctaggaatccaacttacaagggacgtgaaggacctcttcaaggagaactacaaaccactgctcaatgaaataaaagaagatacaaacaaatggaagaacattccatgctcatgggtaggaagaatcaatattgtgaaaatggccatactgcccaaggcagaggcgcctcaccccagggccaccaccatgacagtcccatgggaagtaccaccaggctacgaccaatgttcccttaaggcccaagaactcttcagtcagcttgtggtgaatgctgccaagactgggactcacccttcagggcaatggcctctcctctgactcaggagttttgccccagagccaccatatctgttaatgcactgagcctcacctggagccagcccatctcagagactgaccaagaccctcaatgtagtacctgggtattgctgctggttatgcagggccgaagagctcttcagttagcagacgataaaagctggcaggaatgggtcctttccttcaaggcagcaggttcccttctggcccaggtgttggaagttctggccaaggcaatcaggcaggagaaggaaataaagggtattcaattaggaaaagaggaagccaaattgtccctgtttgcagatgacatgactgtgtatctagaataccccatcgtctcagcccaaaatctccttaagctgataggcaacttcagcaaagtctcgggatacaaaatcaatgtgcaaaaatcacaagcattcttatacaccaataacagacaaacagagagccaaatcatgagtgaactcccattcacaattgcttcaaagagaataaaatacctaggaatccaacttacaagggatgtgaaggacctcttcaaggagaactacaaaccactgctcaatgaagtaaaagaggatacaaacaaatggaagaactttccatgctcatgggtaggaagaatcaatatcgtgaaaatggccatactgcccaaggtaatttacagattcaatgccatctccatcaagctaccaatgactttcttcacagaattggaaaaaactactttaaagttcatttggaaccaaaaaagagcctgcattgccaagtcaatcctcagccaaaagaacaaagctggaggcatcacactacctgacttcaaactatactacaaggctacagtaaccaaaacagcatggtattggtaccaaaacagagatatagacccatggaacagaacagagccctcagaaataatgccacacatctacaaccatctgatctttgacaaacctgacaaaaacaagcaatggggaaaggattccctgtttaataaatggtgctgggaaaactggctagccatatgtagaaagctgaaactggatcccttccttacaccttatacaaaaattaattcaagatggattaaagacttaaatgttagacctaaaaccatgaaaaccctagaagaaaacctaggcaataccattcaggacataggcatgggcaaggacttcatgtctaaaacaccaaaagcaatggcaacaaaagccaaaattgacatatgggatctaattaaactaaagaacttctgcacagcaaaagaaactactatcagagtgaacaggcagcctacagaatgggagaaaatttttgcaatctactcatctgacaaagggctaatctccagaatctacaaataa

SEQ ID NO: 127428 - DNA, 1787 bp, Homo sapiens
atggcttatcctggacatgaaaatgtgctaatgagatctgttatttcagggagcatgattgacttctatacactgcatctaccctacctctgtgccatagccccacttactgtaggatgctcccagtcagtaactaagacaggatcctcagctgcaggtctgttggagtttgctagaggtccacttcagaccctgtttgcctgggtatcagcagcagtggctacagaacagcggattttggtgaaccgcaaatgctgctgcctgatcgttcctctggaagttttgtctcagaggagtacccagctgtgcgcccaaacacattcaaaagctagcagaaggcaagaaataactaaaatcagagcagaactgaaggaaatagagacacaaaaaacccttcaaaaaattaatgaatccaggagctggtttcttggaaagatcaacaaaattgatagaccactaacaaggctaataaagaagaaaagagagaagaatcaaatagatgcaataaaaaatcataaaggggatatcaccaccgatcccacagaaatacaaactaccatcagagaatactatgaacacctctatgcaaataaactagaaaatctagaagaaatggataaattcctcaatacatacatcctcccaagactaaaccaggaagaagttgaatctctgaatagaccaataacaggctctgaaattgaggcaataatcaatagcttaccaaccaaaaaaagtccaggaccagatggattcatagccaagttctaccagaggtacaaagaggagctggtaccattccttctgaaactattccaatcaatagaaaaagagggaatcctccctaactcattttatgaggccagtatcatcatgataccaaagcctggcaaagacacaaccaaaaaagagaattttagaccaatatccttgatgaacatcaatgcaaaaatcctcaataaaatactggcaaaccaaatccagcagcacatcaaaaagcctatccactatgatcaagtgggcttcatccctgggatgcaaggctggttcaacaaatgcaaatcaataaatgtaatccagcatataaacagaaccaaagacaaagacaacatgattatctcaatagatgcagaaaaggcctttgacaaaattcaacaacgcttcatgctaaaaactctcaataaattagtgttggaagttctggccagggcaatcaggcaggagaaggaaataaagggtattcaattaggaaaagaggaagtcaaattgtccctgtttgcagatgacatgattgtatatctagaaaaccccatcatctcagcccaaaatctccttaagctgataagcaacttcagcaaagtctcaggatacaaaatcaatgtacaaaaatcacaagcattcttatataccaataacagacaaaccgagagccaaatcatgagtgaactcccatttgcaattgcttcaaagagaataaaatacctaggaatccaacttacaagggacgtgaaggacctcttcaaggagaactacaaaccactgctcaatgaaataaaagaggatacaaataaatggaagaacattccatgctcatgggtaggaagaatcaacatcatgaaaatggccatactgcccaaggaacgcagctcctcaccagcaacggaacaaagctggatggagaatgactttgatgagttgagagaagaaggcttcagacgatcaaacttctccgagctaaaggagaaagttcgaacccatcacaaacaagataaaaaccttgaaaaaag

SEQ ID NO: 127429 - DNA, 4178 bp, Homo sapiens
cagggggtacatgaagcagagtgaggtggtgccagccaggccacccaaggccgggtggccagcgaagcacctccagaactgcatgcgcttgtctgcacccccaggaagaactgcttgtacttatccttgaaggcaaagttaagggcttgcatgggaagtaatggatggcactggcaaggttgcccttccaggaagacagccccatgctccttggagatgcagaggacgcagtccatccaccacacttcgtgctgcttgtgggctgcaatctgctactggcatgttgcccctgcagcagcagcagcttgacctgctggatctgagccacggccatgatgtgtggtattatttctgagggctctgttctgttccatcatggtggcaggcaggacaatggagtgtggagagcatgctgttttggttactgtagccttgtagtatagtttgaagtcaggtagtgtgattcctccagatttgttcttttggcttaggattgacttggcaatgcgggctcttttttggttccatatgaactttaaagtagttttttccaattctgtgaagaaagtcattggtagtttgatggggatggcattgaatctgtaaattaccttgggcagtatggccattttcacgatattgattcttcctacccatgagcatggaatattcttccatttgtttgtatcctcttttatttccttgagcagtggtttgtagttctccttgaagaggtccttcacatcccttgtaagttggattcctaggtattttattctctttgaagcaattgtgaatgggagttcactcatgatttggctctctgtttgtctgttgttggtatataagaatgcttgtgatttttgtacattgattttgtatcctgagactttgctgaagttgcttatcagcttaaggagattttgggctgagacaatggggttttctagatatacaatcatgtcgtctgcaaacagggacaatttgacttcctcttttcctaattgaataccctttatttccttctcctgcctaattgccctggccagaacttccaacactatgttgaataggagtggtgagagagggcatccctgtcttgtgccagttttcaaagggaatgcttccagtttttgctgcatggtcccatatttcttggaggctttttcatttctttttactcttttttctctaaacttgtcttctcacttcatttcattaatttgatcttcaatcactgataccctttcttccacttgattaaattggctattgaagcttctgcatgtgtcatgaagttcttgtgctgtgcttttcagctccatcaggacatttatgttcttctctacactgattattccagttagcaattcctctaatcttttttcaaggttcttagcttccttgcattggcttagaacatgctcctttagctcagaggagtttgttattacccaccttctgaagcctacttctgaaaattcatcaaaccaattctctgtccagttttgttcccttgctggcaaggagttttgatcctttggaggagaagaagtgttctggtttttggaattttcagcctttttgcactggtttttcctcatcttcatggatttatctacctttgatctttgatgttggtgaccttcagatgggtttcctctactgcaggtctgctggagttcgctggaggaccactccagatcctgttgccgggtatcaccggcggaggctgcagaacagcaaagattgttgcctgttccttcctctggaagatttgtcccagaggggcacccacctaatgccagctggagctctcctgtatgaggtgtctgttgacccctgctgagaggtgtctcctcatcaggagccaggggggtcagggacccccttgaggaagcagtctgtccctcagcagagctcaagtactgtgctgggagatctgctgctctcttcagacgtggcgttatttctgagggctctgttctgttccattgatctatatctctgttttggtaccagtaccatgctgttttggttactgtagccttgtagtatagtttgaagtcaggtagtgtgatgcctccagctttgttcttttggcttaggattgacttggcaatgtgggctcttttttggttccatatgaacttgaaagtagttttttccaattctgtgaagaaagtcattggtagcttgatggggatggcattgaatctgtaaattaccttgggcagtatggccattttcatgatattgattcttcctacccatgagcatggaatgttcttccatttgtttgtatcctcttttatttcattgagcagtggtttgtagttctccttgaagaggtccttcccgtcccttgtaagttggattcctaggtattttattctttttgaagcaattgtgaatggcagttcactcatgatttggctctctgtttgtctgttattggtgtataagaatgcttgtgatttttgtacattgattttgtatcctgagactttgctgaagttgcttatcagcttgagattttgggctgagacaatggggttttctagatatacaatcatgtcatctgcaaacagggacaatttgacttcctcttttcctaattgaataccctttatttccttgtcgtgcctaattgccctggccagaacttccatcactatgttgaataggagtggtgagagagggcatccctgtcttgtgccagtcttcaaagggaatgcttccagtttttgcccattcagtatgatattggctgtgggtttgtcatagatagctcttattattttgagatatgtcccatcaatacctaatttattgagagtttttagcatgaagggttgttgaattttgtcaaagggccttttctgcatcagttcctccttgtacctctggtagaattcggctgtgaatccatctggtcctggactcttttttgttggtaagctattgattattgccacaatttcagagcctgttattggtgtattcagagattcaacttcttcctggtttagtcttgggagggtgtatgtgtcgaggaatttatccatttcttctagattttttagtttatttgtgtagaggtgtttgtagtattctctgatggtagtttgtatttctgtgggatcagtggtgatatcccctttatcattttttattgtgtctatttgcttcttttctcttttcttctttattagtcttgctagcggtctgtcaattttgttgatcctttcaaaaaaccagctcctggattcattaatgttttgaagggttttttgtgtctctatttccttcagttctgctctgattttagttatttcttgccttctgctagcttttgaatgtgtttgctcttgcttttctagttcttttaattgtgatgttagggtgtcaattttggatgtctcctgctttctcttgtgggcatttagtgctataaatatccctctacacactgctttgaatgtgtcccagagattctggtatgttgtgtctttgttctcgttggtttcaaagaacatctttatttctgccttcatttcgttatgtacccagtagttattcaggagcaggttgttcagtttccacgtagttgagtggttttgagtgagtttcttaatcctgaggtctagtttgattgcactgtggtctgagagacagtttgttataatttctgatcttttacatttgctgaggagagctttactttgaactatgtggtcaattttggaataggtgtggtatggtgctgaaaaaaatgtatattctgttgatttggggtggagagttctgtagatgtctattaggtccgcttggtgcagagctgagttgaattcttgggtatccttgttaactttctgtctcattgatctgtctaatgttgacagtggggtgttaaagtctcccattattatggtgtgggagtctaagtctctttgtaggtcactcaggacttgcttaatgaatctgggtgctcctgtattgggtgcatatatattcaggatagttagctcttcttggtgaattgatccctttaccattatgtaatggccttctttgtctcttttgatctttgttggtttaaagtctgttttatcagagactaggattgcaacccctgccttttttgttttccatttgcttggtagatcttcctccat

SEQ ID NO: 127430 - DNA, 3211 bp, Homo sapiens
atggaagatgaaatgaatgaaatgaagcaagaagagaagtttagagaaaaaagaataaaaagaaatgagcaaaccctccaagaaatatgggactatgtgaaaagaccaaatctacatctgattggtgtacctgaaagtgatggggagaatggaaccaagttggaaaacactctgcaggatattatccaggagaacttccccaatctagcaaggcaggccaacgttcagattcaggaaatacagagaatgccacaaagatactcctcgagaagagcaactccaagacacataattgtcagattcaccaaagttgaaatgaaggaaaaaatgttaagggcagccagagagaaagacagatcaatgagacaaaaagtcaacaaggatacccaggaattgaactcagctctgcaccaagcggacctaatagacatctacagaactctccaccccaaatcaacagaatatacatttttttcagcaccacaccacacctataccaaaattgaccacatacttggaagtaaagctctcctccgcaaatgtaaaagaacagagattataacaaactatctctcagaccacagtgcaatcaaactagaactcaggattaagaatctcactcaaaaccgctcaactacatggaaactgaacaacctgcttctgaatgactactgggtacataacaaaatgaaggcagaaataaagatgttctttgaaaccaacgagaacaaagacacaacataccagaatctctgggacgcattcaaagcaaaatacaaactaccatcaaggaatactacaaacacctctatgcaaataaactcgaaaatctggaagaaatggataaattcctggacacataacactctcccaagactaaaccaggaagaagttgaatctctgaatagaccaataacaggagctgaaattgtggcaataatcaatagtttaccaaccaaaaagagtccaggaccagatggattcacagccgaattctaccagaggtacaaggaggaactggtaccattccttctgaaactattccaatcaatagaaaaacagggaatcctccctaactcattttatgaggccagcaccattctgataccaaagccgggcagagacacaaccgaaaaagagaattttagaccaatatccttgatgaacattgatgcaaaaatcctcaataaaatactggcaaaacgaatccagcagcacatcaaaaagcttatccaccatgatcaagtgggcttcatccctgggatgcaaggctggttcaatatacacaaatcaataaatgtaatccagcatataaacagagccaaagacaaaaaccacatgattatctcaatagatgcagaaaaagcctttgacaaaattcaacaacgcttcatgctaaaaactctcaataaattaggtattgatgggacgtatttcaaaataataagagctatctatgacaaacccacagccaatatcatactgaatgggcaaaaactggaagcaatccctttgaaagctggcacaagacagggatgtcctctctcaccactcctattcaacatagtgttggaagttctggccagggtaattaggcaggagaaggaaataaagggtattcaattaggaaaagaggaagtcaaattgtccctgtttgcagatgacatgattgtatatctagaaaaccccattgtcacagcccaaaatctccttaagctgataagcaacttcagcaaagtctcaggatacaaaaaaaaaatcaatgtacaaaaatcacaagcattcttatacaccaataacagacaaacagagagccaaatcatgagtaaactcccattcacaattgcttcaaagagaataaaatacctaggaatccaacttacaagggacgtgaaggacctcttcaaggagaactacaaaccactgctcaaggaaataaaagaggatacaaacaaatggaagaacattccatgctcatgggtaggaagaatcaatatcgtgaaaatggccatactgcccaaggtaatttatagattcaatgccatccccatcaagctaccagtgactttcttcacagaattggaaaaaactactttaaagttcatatggaaccaaaaaagagcccgcatagccaagtcaatcctaagccaaaagaacaaagctggaggcatcacactacctgacttcaaactatactacaaggctacagtaaccaaaacagcatgttcccagtcagctcccatggaattaggcttcaggccaatccctgtggactcagggactaggaccatccctgaaccaggcctgaccccatggacccaggcttcaggatggacaccaaagacatgtgcttcaggcttcttcctacagatccagttgacaagtccactctggtggactccagtactaggcttgcaccacaaacccaggattcaggtctacacagaaggcccaagccccaggccagcgcctttagactcagatgccagctctacccacctgctgactcaggcatcagaaagaagaatcaaaactatgaataatcacaccgtgaatagaaaatctaagagagaacattgctgtacaaaagggtttcctgggtcaggcctagggtcccgttgctctgtgcagcctcggcacagggtgtcctctgtcccagctgctcaagcttttgcattgcctaaaaggggacaaggtacagctcaggcagttgctttagagggtgaaagccccaagccttcctagatttcagagtatgtatgaaaatgcctggatgtctaggcagaagtctgctgcaggggtggaatcttcatggagaaccttcattatggcaatgcagaggagaaatgtggggttggagccccacacagagtcctcactggggcactgcttaatggagctgcaagaagagggccatggtcctccagaccccagaatggtagatatactggcagtttgcactctgtgcctgaaaaagccacaagcactcaatgccagcctgtgaaagcagccatgggagctgtacccttcagagccacgggagcagagctgcctacacaatgatagatccactgacaacttgcatcatgtgcctagaaaagccacagacaacaccagcccgtgaaagcttcagggaggcaggctgtacccaccaaaaccacagaggcaaagctatccaaaaccatgggaacccacctcttgcatcagcaag

SEQ ID NO: 127431 - DNA, 3023 bp, Homo sapiens
atggttatctcaatagatgcagaaaaggcctctggcaaaattcaacaacccttcatgctaaaaattgtcaataaattaggtattgatgggacgtatctcaaaataataagagctatctatgacaaacccacagccaatatcatactgaatgggcaaaaactggaagcattccctttgaaaactggcacgagacagggatgccctctctcaccactcctattcaacatagtgttggaagttctagccagagcaatcaggcaggagaaggaaataaagggtattcaattaggaaaagaggaagtcaaattgtccctgtttgcagatgacatgactgtatatctagaaaaccccattgtctcagcccaaaatctccttaagctggtaagcaacttcagcaaagtctcaggatacaaaatcaatgtgcaaaaatcacaagcattcttatacaccaataacagaacagagagccaaatcatgagtgaaatcccattcacaattgcttcaaagagaataaaatacctaggaatccaacttacaagggatgtgaaggacctcttcaaggagaactacaaaccactgctcaatgaaataaaagaggatacaaacaaatggaagaacattccatgctcatgggtaggaagaatcaatatcatgaaaatggccacactgcccaaggtaatttatagattcaatgtcattcccattaagctaccaatgactttcttcacagaattggaaaaaactactttaaagttcatacggaaccaaaaaagagcccgcattgccaagtcaatcctaagccaaaagaacaaagccggaggcatcatgctacctgacttcaagccatactacaaggctacagtaaccgaaacagcatggaccccaaatagctgctatatcaccagcattttttcaccttccacggaggaagagtggaaaggacaaagagcagtgatgacccctcacaacccatcagtcagaatactgccacttggccccaccaagaacaacaaggttattttatcgggggacatgggctggtgtggaacaaatgggacacaggagcttctgcaagctatatacctgaacgaatatggcaacatgaccaaagcactgacccagatcttcacagacaaaacgggtgatggccttaagctattgatggcagcggcggcccatctggagtggctgctgccaagatgccagctgcagtggggtgggaggtgcagccagggctgcatgctcccagtagccggcaggagctgggaacaggtggaagccccaaccccttccaagttggaggggcaggaatccggccctcttgggtgcagctgcagccggccacctagccatggctgcagacccaggcatctctgcactctcagtgggccggggaagcccccacgtccgtgcaggctgggaactcccattggctggcctctccctgctcacagcgcacaatccgatttcagaccaaagttgtggccaagcccaggtgctgtcaagaccctggcaggtgtgcttgactcagggcacgcggacaagcagcccctgctgtctcagcacgaaaaccgaaaggaagcaggggggcgagaaatacaaactaccatcagagaatactacaaacacctctatgcaaataaactagaaaatctagaagaaatggataaattcctcgacacatacactctcccaagactaaaccaggaagaagttgaatctctgaatagaccaataacaggagctgaaattgtggcaataatcaatagcttaccaaccaaaaagagtccaggaccagatggattcacagccaaattctaccagaggtacaaggaggaactggtaccatttcttctgaaactatgccaatcaacagaaaaagagggaatcctccctaactcattttatgagaccagcatcatcctgataccaaagccgggcagagacacaatgaaaaaagagaattttagaccaatatcctggatgaacattgatgcaaaaatcctcaataaagatactggcaaatcgaatccagcagcacatcaaaaagcttatccaccatgatcaagtgggcttcatccctgggatgcaaggctggttcaatatatgcaaatcaataaatgtaatccagcatataaacagaaccaaagacaaaagccacatgattatctccatagatgcagaaaaggcctttgacaaaattaaacaacacttcatgctaaaaactgtcaataaattaggtattgatgggatgtatttcaaaataataagagctatctatgacaaacccacagacaatatcatactgaatgggcaaaaactggaagcattccctttgaaaactggcacaagacatgggatgccctctctcaccactcctattcaacatagtgttggaagttctggccagtgcaattaggcaggagaaggaaataaagggtattcaattaggaaaagaggaagtcaaattgtccctgtttgcagacgacatgattgtatatctagaaaaccccattgtctcagcccaaaatctccttaagctgataagcaacttcagcaaagtctcaggatacaaaatcaatgtacaaaaatcacaagcattcttatacaccaacaacagacaaacagagagccaaatcatgagtgaactcccattcacaattgcttcaaagagaataaaatacttaggaatccaacttacaagggatgtgaaggacctcttcaaggagaactacaaaccactgctcaatgaaataaaagaggatacaaacaaatggaagaatattccatgctcatgggtaggaagaatcaatatcgtgaaaatggccatactgcccaaggtatttccagaaaacactgagggcaggagacaagagagccttctcaagggcacaggcagaaatgctgagaatcaagatacacgaggcttgaccaaaccgggagtggacaaagacaacaaagatggagaagagttgaacaaagtgaccttccggacccccaactatgagcctagattcaagtaa

SEQ ID NO: 127432 - DNA, 4380 bp, Homo sapiens
atggataaattcttcgacacatacaccctcccaagactaaaccaggaagaagttgaatctctgaatagaccaataacaggctctgaaattgaggcaataattaatagtgtaacaaccaaaaaaagtccaggaccagatggattcacagccgaattctaccagaggtacgaggaggagctgaaaaagagggaatcctccctaactcattttatgaggagcatcatcctgataccaaagcccggcagagacataacaaaaaaagagaattttagaccaatatccctgatgaacatcgatgcaaaaatcctcaataaaatactggcaaaccaaatccagcagtacatcaaaaagcttatccaccatgatcaagtgggcttcatccctgggatgcaaggctggttcaacatacgcaaatcaataaaggtaacccagcatataaacagaaccaaagacaaaaaccacatgattatctcaatagatgcagtaaaggcctttgacaaaattcaacagcgcttcatgctaaaaactctcaataaattaggtattgatgggacatatctcaaaataataagagctatctatgacaaacccacagccaatatcatactgaatgggcaaaaactggaagcattccctttgaaaactggcacaagacagggatgccctctctcaccactcctattcaacatagcgttggaagttctgtccagggcaatcaggcaggagaaggaaataaaggatattcaattaggaaaagaggaagtcaaattctccctgtttgcagatgacatgattgtatatctagaaaaccccatcgtctcagcccaaaatctccttaagctgataggcaacttcagcaaagtctcaggatacaaaatcaatgcgcaaaaatcacaagcattcttatacaccaataacagacaaacagagagccaaatcatgagtgaactcccattcacaattgcttcaaagagaataaaatatctaggaatccaacttacaatggacgtgaaggacttcttcaaggagaactacaaaccaatgctcaatgaaataaaagaggatacaaacaaatggaagaacattccatgctcatgggtaggaagaatcaatatcgtgaaaatggccatactgcccaagatccactccagagtgacagttctgctgcgctcagatactgtgctgcatattgtgaagcttgcagtgaaaattcctacaattgtcctgcttctggaggggagccccagggccttgaggaaacacaggcagaagccagggagtggttccagcaggcctcgagtgagacccagtgctgtgctggcatcaggtctgagtcaatgcagtcatagtggtggtggcaacaggggtgcttatgtcactccaccccaagctttagcagaaaaggcctttgacaaaattcaacaacccttcatgctaaaaactctcaataaattaggtattgatgggacatatctcaaaataataagagctatctatgacaaacccacagccaatatcatactgaatgggcaaaaactggaagcattccctttgaaaactggcacaagacagggatgccctctctcaccactcctattcaacatagccttggaagttctggccagggcaatcaggcaggagaaggaaataaagggtattcaattcggaaaagaggaagtcaaattgtccctgtttgcagatgacatgattgtatatctagaaaaccccattgtctcagcccaaattctccttaagctgataagcaacttcagcaaagtctcaggatacaaaatcaatgtacaaaaaccacaagcattcttacacaccaataacagacaaacagagaaccaaatcatgagtgaactcccattcacgattgcttcaaagagaataaaatacctaggaatccaacttacaagggacgtgaaggacctcttcaaggagaactacaaaccactgctcaaggaaataaaagaggatacaaacaaatggaagaacattccatgctcatgggtaggaagaatcaatatcgtgaaaatggccatactgcccaaggtaatttatagattcaatgccatccccagcaagctaccaatgactttcttcacagaattggaaaaaaatactttaaagttcatatggaaccaaaaaagagcccgcatcgccaagtcaatcctaagccaaaagaacaaagctggaggcatcacgctacctgacttcaaactatactacaaggctacagtaaccaaaacagcatggtactggtaccaaaacagagatatagatcaatggaacagaacagagccctcagaaataacgccgcatatctacaactatctgatctttgacaaacctgagaaaaacaagcaatggggaacggattccctatttaataaatggtgctgggaaaactggctagccatatgtagaaagctgaaactggatcccttccttacaccttatacaaaaattaattcaagatggattaaagacttaaactttcgacctaaaaccataaaaactctggaagaaaacctaggcattaccattcaggacataggcatgggcaaggacttcatgtctaaaacaccaaaagcaatggcaacaacagacaaaattgacaaatgggatctaattcaactaaagagcttctgcacagcaaaagaaactaccatcagagtgaacaggcaacctacaaaatgggagaaaattttcgcaacctactcatctgacaaagggctaatatccagaatctacaatgaactcaaacaaatttacaagaaaaaaacaaacaaccccatcaaaaagtgggcgaaggacatgaacagacacttctcaaaagaagacatttatgcagccaaaaaacacatgaaaaaatgctcaccatcactggccatcagagaaatgcaaatcaaaaccacaatgagatatcatctcacaccagttagaatggcgatcattaaaaagtcaggaaacaacagtacgtttgactttggacaacatgagtttgaactacacaggtccacttatacgcggattgttttcagtaaaattacaccaatattggaagttctggccagggcaattaggcaggagaaggaaataaagggtattcaattaggaaaagaggaagtcaaattgtccctgtttgcagatgacatgattgtatatctagaaaaccccattgtctcagcccaaaatctcctcaagctgataggcaacttcagcaaagtctcaggatacaaaatcaatgtacaaaaatcacaagcattcttatacaccaataacagacaaacagagagccaaatcatgagtgaactcccattcacaattgcttcaaagagaataaaatacctaggaatccaacttacaagggacgtgaaggacctcttcaaggagaactacaaaccactgctcaatgaaataaaagaggatacaaacaaatggaagaacattccatgctcatgggtaggaagaatcaatattgtgaaaatggccatactgcccaaggtaatttatagattcaatgccatccccatcaagctacccatgactttcttcacagaattggaaaaaactactttaaagttcatatggaaccaaaaaagagcctgcatcgccaaggcaatcctaagccaaaagaacaaagctggaggcatcacactacctgacttcaaactgtactacaaggctacagtaacgaaaacagcatgtttgttaaacagaagggctctccccctggcaaaccggggaagaaaaaaccctgtttttggggggcccccaaaaacggtgccgatatccccagccaaagttggcggccatccggaaacccgggaacaaccccccctctcccgaaaccccccagttttttccctggggcccccagaatggggcaatcccaagcttggggccacaaaggcttttggttcaaaaagggcaagccaaccgaaccccccggaaaaaaggcccgggttaaaaagccccccgggggccaatcccccaaggccattggacccacccgtggcccgggaaaaccaccaaaacccgatatgcgggcccccaagccccccacagattccggtcaccaaacccagaagccctcatgaccggcagacagcgctttcacaccgcacatcaacgtttcacggtccgaccccagaaccaccgctcgctcatccagcgccgaccgtgtcaacgccagcgagtacccaacatccagcgaggagacatcaggtcgctcgtccagataggtcatcaacgccgttgcctgcgcggatagcgcttcgggtgttttgcccgacaccatccacggcaccaccggaacatccacgacagaacccgaacccggccccgcagactgactcggcactcccgggggct

SEQ ID NO: 127433 - DNA, 3349 bp, Homo sapiens
atgggagactttaacatcccactgtcaacattagacagatcaacgagacagaaagtcaacaaggatacccaggaattgaactcagctctgcaccaagcggacctcatagatagctacagaactctccaccccaaatcaacagaatatacatttttttcagcaccacaccacacctattccaaaattgaccacatacttggaagtaaagctctcctcagcaaatgtaaaagaacagaaattataacaaactatctctcagaccacagtgcaatcaaactagaactcaggattaagaatctcactcaaaactgctcaactacatggaaactgaacaacctgctcctgaatgactactgggtacataacgaaatgaaggcagaaataaagatgttctttgaaaccaatgagaacaaagacacaacataccacaatctctgggatgcattcaaagcagtgtgtagagggaaatttatagcactaaatgcccacaagagaaagcaggaaagatccaaaattgacaccctaacatcacaattaaaagaactagaaaagcaagagcaaacacattcaaaagctagcagaaggcaagaaataactaaaatcagagcagaactgaaggaaatagagacacaaaaaacccttcaaaaaattaacgaatccaggagctgggtttttgaaaggatcaacaaaattgatagaccgctagcaagactaacaaagaaaaaaagcgagaagaatcaaatagatgcaataaaaaatgataaaggggatatcaccaccgatcctacagaaatacaaactaccatcagagaatactacaaacacctctacgcaaataaactagaaaatctagaagaaacggataaattcctcgacacatacactctcccaagacgaaaccaggaagaagttgaatctctgaatagaccaataacaggagctgaaattgtggcaataatcaataacttaccaaccaaaaagagtccaggatcagatggattcacagccgaattctaccagaggtacaaggaggaactggtaccattccttctgaaactattccaatcaatagaaaaagagggaatcctccctaactcattttatgaggccagcatcatcctgataccaaagccgggcagagacacaaccaaaaaagagaattttagaccaatatccttgatgaacattgatgcaaaaatcctcaataaaatactggcaaaccaaatccagcagcacatcaaaaagcttatccaccatgatcaagtgggcttcatccctgggatgcaaggctggttcaatatatgcaaatcaataaatgtaatccagcatataaacagaaccaaagacaaaaaccacatgattatctcaatagatgcagaaaaggcctttgacaaaattcaacaacccttcatgctaaaaactctcaataaattaggtattgatgggacttatctcaaaataataagagctatctatgacgaacccacagccaatatcatactgaatgggcaaaaactggaagcattccctttgaaaactggcacaagacagggatgccctctctcaccactcctattcaacatagtgttggaagttctggccagggcaattaggcaggagagggaaataaagggtattcaattaggaaaagaggaagtcaaattgtccctgtttgcagatgacatgattgtatatctagaaaaccccattgtctcagcccaaaatctccttaagctgataagcaacttcggcaaagtctcaggatacaaaatcaatgtacaaaaatcacaagcattcttaaacaccaacaacagacaaacagagagccaaatcatgagtgaactcccattcacaattgcttcaaagagaataaaatacctaggaatccaacttacaagggatgtgaaggacctcttcaaggagaactacaaaccactgctcaaggaaataaaagaggatacaaacaaatggaagaacattccatgctcatgggtaggaagaatcaatatcatgaaaatggccatactgcccaaggtaatttacagattcaatgccatccccatcaagctaaccaatgactttcttcacagaattggaaaaaactactttaaagttcatacggaaccaaaaaagagcctgcgtcgccaagtcaatcctaagccaaaagaacaaagctggaagcatcacactacctgacctcaaactatactacaaggctacagtaaccaaaacagcatggtactggtaccaaaacagagatatagatcaatggaacagaacagagccctcagaaataacgctgcatatctacaactatctgatctttgacaaacctgagaaaaacaagcaatggggaaaggattccctatttaataaatggtgctgggaaaactggctagccatatgtagaaagctgaaactggatcccttccttacaccttatacaaaaatcaattcaagatggattaaagacttaaacattagacctaaaaccataaaaaccctagaagaaaacctaggcattaccattcaggacataggcatgggcaaggacttcatgtctaaaacaccaaaagcaatggcaaccaaagccaaaattgacaaatgggatctaattaaactaaagagcttctgcacagcaaaagaaactaccatcagagtgaacaggcaacctacaaaatgggggaaaattttcgcaacctactcatctgacaaagggctaatatccagaatctacaatgaactcaaacaaatttacaagaaaaaaacaaacaaccccatcaaaaagtttgcaaaggatatgaacagacacttctcaaaaaaagacatctatgcagccaaaaaacacatgaaaaaatgctcaccatcactggccatcagagaaatgcaaatcaaaaccacaatgagataccatctcacaccagttagaatggcaatcattaaaaagtcaggaaacaacagaactggccgtggtttacatccaggaagggattggtcagtcacctgtgccaggtccccgggggatcctgagcccagcggtataaagggtggctgtgggagtggcacaccctctcccagccccagcaagcaaaccgtcaggcggccgtggactcagatcccggagatgaagcccctgctcctggccgtcagcctcggcctcattgctgccctgcaggcccaccacctcctggcctcagacgaggagattcaggatgtgtcagggacgtggtatctgaaggccatgacggtggacagggagttccctgagatgaatctggaatcggtgacacccatgaccctcacgaccctggaagggggcaacctggaagccaaggtcaccatgctgtga

SEQ ID NO: 127434 - DNA, 2526 bp, Homo sapiens
atggtcaaatccaaaacactgacaacatcagattctggtgaggatgtggggcaacaggaactctcattcattgctggtcagcctctcgccatctttattcaaaccagaggagttcacgcccctggatccaacccaggagcccatttttcccccagagttgctgaccagtgtcatcctgcaagcactaaagccagccttactaggcatccccttatgacaaactccatccttccttccttgggggggggtcctacagtcaacacccctagggagagagcagcagagactgagcacaggcgagaaggtgtggaaacaagagaggaactgaaacacgaaaacggggcccttgactcaccaccaacccacaggggaaaccacagagcacagcagcccagcgccgactgcacctccccggaaaagttcctggaggttcaagaatggctcctctatgttgactccctgtctcatctcagacacccagtaagcctcatattccagaatcgctctctgcatcatgctgtcactgctggatatggggaaggggtggcattggtgattcagtactgcttttcctacctcttcgatacctctttcagtgatgcaaagttaaaaccagatgctatgagtgctcacctgtgttttgattctcatgaacgtacttctttggagaatatcttcttccaattagaaaaaaacaaacagattcttaaggttaagtcacgtagcttcttgcctggtgcccacatgagagcttctacggactcattgttggaagttctggccagggcaatttggccggagaaggaaataaagggtattcaattaggaaaaaaggaagtcatattgtccctgtttgcagatgacatgattgtatatctagaaaaccccattgtctcagcccaaaatctccttaagctgataagcaacttcagcaaagtctcaggatacaaaatcaatgtacaaaaatcacaagcattcttatacaccaataacagacaaacagagagccaaatcatgagtgaactcccattcacaattgtttcaaagagaataaaatacctaggaatccaacttacaagggacgtgaaggacctcttcaaggagaactacaaaccactgctcaaggaaataaaagaggatacaaacaaatggaagaacattccatgctcatgggtaggaagaatcaatatcgtgaaaatggccatactgcccaaggtaatgtatagattcaatgccatccccatcaagctaccaatgcctttcttcacagaattggaaaaaactactttaaagttcatatggaaccaaaaaagagcccgcatcgccaagtcaatcctaagccaaaagaacaaagctggaggcatcacgctacctgacttcaaactatactgcaaggctacagtaaccaaaacagcatggtactggtaccaaaacagagatatagatcaatgcaacagaacagagccctcagaaatgaggccgcatatctacaactatctgatctttgacaaacctgacaaaaacaagcaatggggaaaggattccctatttaataaatggtgctgggaaaactggctagccatatgtagaaagctgaaactggatcccttccttacaccttatacaaaaattaattcaagatggattaaagacttaaacgttagacctaaaaccataaaaaccctaggagaaaacctaggcattaccattcaggacataggcatgggcaaggacttcctgtctaaaacaccaaaagcaatggcaacagaagccaaaattgacaaatgggatctaattaaactaaagagcttctgcacaccaaaagaaactaccatcagagtgaacaggcaacctacaaaatgggagaaaattttcgcaacctattcatctgacaaagggctaatattcagaatctacaatgaacttaaacaaatttacaagaaaaagacaaacaaccccatcaaaaagtgggcgaaggacatgaacagacccttctcaaaagaagacatttatgcagccaaaaaatacatgaaaaaatgctcaccatcactggccatcagagaaatgcaaatcaaaaccacaatgagataccatctcacaccagttagaatggcgatcattaaaaagtcaggaaataacagacaaacagagagccaaatcatgagtgaactcccaatcacaattgcttcaaagagaataaaatacctaggaatccaacttacaaaggatgtgaaggacctcttcaaggagaactacaaaccactgctcaatgaaataaaagaggacacaaacaaatggaagaacattccatgctcatggataggaagaatcaatattgtgaaaaatggccatactgcccaagattactgactcagcaatggagatgttatcggcaaaatgccattacctgcacattttggatatctctggttgtgtcttgcttactgaccaaatccttgaggaccttcagataggctgcaaacaactccggatccttaagatgcaatactgcacaaatatttccaa

SEQ ID NO: 127435 - DNA, 2562 bp, Homo sapiens
atgagtgaactcccattcacaattgcttcaaagagaataaaatacctaggaatccaacttacaagggacgtgaaggacctcttcaaggagaactacaaaccactgctcagtgaaataaaagaggatacaaagaaatggaagaacattccatgctcatgggtaggaagaatcaatatcatgaaaatggccatactgcccaaggtgctagagaaaaacgtattaggaagagatatggaaactatgaaaaaggtccaaatcaaacttctagagataagcactataatgaaaaatgagatgaaaaatgtactggatggaattaactgtgcattagacagtgaacaaatgaaggttttcaacacatactccaatgaagactatgacaggagaaatgacgaagttgaccctgtggctgcttcagctgagtatgaacttgaaaaacgtgtagaaaagctggaacttttcccagtggagctagagaaaggaatgtatggagaggaagacagggtgcagctgggttctcgatgggtcagccacaggaataataagtggcctttaaggatgaggttccagacttcactcagagaaagctatgaggatggtcttggtataagtattattggaatgggtgttggagcagatgctggacttgaaaagctgggaatattcgtcaagacagtaacagaaggtggtgctgctcaacgggatggcagaaaaagtggggtattgctgaaaagacacctgaaaatgtggaagcgactttggaactggacaacaggcagaggttggaacagtttggagggctcagaagaagacaggaaaatgtgggaaaatttggaacttcctagagacttgttgaatggctttgaccaaaatgctgatagtgatatgaacaataaggtccaggctgaggtgtcctcagatggagaagaggaacttgttgggaactgcagtaaaggtcactcttgctatgtaaagagactggcagcattttgccactgccagaatgatatggtttggctgtgtccccacacaaatctcatcttgaattgtagctctcatatttcccacatgcttgggcagtatggccattttcacgatattgattcttcctacccatgagcatggaatgttcttccatttgtttgtatcctcttttatttcattgagcagtggcttgtagttctccttgaagaggtccttcacgtcccttgtaagttggatttctaagtattttattctatcaggctcgaaccctttaagatcaacgttcttgagcagatcacgaagcatatcgaaaaactgcagtgcggaggtgtagtcaaacaactcagcaggcgtgggaacaatcagcacatcagcagcacatacgacattaatcgtgccgatacccaggttaggcgcgctgtcaataactatgacatcatagtcatgagcaacagtttcaatggccagtcggagcatcaggtgtggatcggtgggcagtttaccttcatcaaatttgcccattaactcagtttcaatacggtgcagagccagacaggaaggaataatgtcaagccccggccagcaagtgggctttattgcataagtgacatcgtccttttccccaagatagaaaggcaggagagtgtcttctgcatgaatatgaagatctggtacccatccgtgatacattgaggctgttccctcggggtcgttaccttccacgagcaaaacacgtagccccttcagagccagatccggtggaaatacgtcttcagcacgtcgcaatcgcgtaccaaacacatcacgcatatgattaatttgttcaattgtataaccaacacgttgctcaacccgtcctcgaatttgcatatccgggttcggtagtcgccctgctttctcggcatctctgatagcctgagcatgaaccccaattatatccgctgcttcacgcggctggtcaacgtcggtgcctttgatcagcgcgacatggtaagccagcagctgcagcggaacggtgtagaagatcggtgcaatcacctcttccacatgcggcatctcgatgatgtgcatgttatcgctacttacaaaacccgcatcctgatcggcgaagacatacaactgaccgccacgcgcgcgaacttcttcaatgttgaatttcagtttttccagcaattcgttgttcggtgcaacaacaataaccggcatatcggcatcaattagcgccagcggaccgtgtttcagttcgccagcagcgtaggcttcagcgtgaatgtaagagatctctttcaacttcaatgcgccttccagcgcgattgggtactgatcgccacggcccaggaacagcgcgtgatgtttgtcagagaaatcttcagccagcgcttcaatgcgtttgtcctgagacagcatctgctcaatacggctcggcagcgcctgcagaccatgcacgatgtcatgttcaatggaggcatccagacctttcaggcgagacagcttcgccaccagcatcaacagcacagttaactgagtggtgaatgctttagtggatgccacgccgatttctgtacccgcgttggacat

SEQ ID NO: 127436 - DNA, 1710 bp, Homo sapiens
atggacaaattcctggaaaaatacatttcttctagtttaaatcaggaagcattagatacccttaacagaccaataacaaacagcgaggttgataaattaccaacaaaaaaaagtccaggaccagatggattcacagcagaattctaccagacattcaaagaaccaatccttttgacactattccacaacatagagaaagaaggaaccttccctaattcattctacaaagccagcatcaccctaataccaaaaccaggaaaggacataaccaaaaaagaaaactacagactgatatccttgacgaacatagatgtaccggaagtcctagctggagcaatcagaccagagaaagaaataaagggcattcacatcgataaagaggaagtcaaactgtccctgtttgctgacaatacgattgtttaccttgaaaaccctaaggactcctccagaaagttcctaaaactgatcaaagaattcagcaaagtttctggatacaagattaatagagcgacctggcagctctgcagcactagtaaagggaaccccactacagcaagtggactggcatgggaaacctatttgaccctgtgggctgaggactcttttccccaacttgggaaaaccaggaagccccgactttggaagctctttctgtctcctcagcaaatcctggttcaaacagaaactgcgacctaccagggctgtcagctgaagacgttgcaagcttaccttgtacatgctttgagtctcaccaagctcctgtgcattagaataaaatacctaggaatccaacttacaagggatgtgaaggagctcttcaaggagaactacaaaccactgctcaatgaaataaaagaggatacaaacaaatggaagaacattccatgctcatgggtaggaagaatcaatatcgtgaaaatggccatactgcccaaggtaatttatagattcaatgccatccccatcaacctaccaatgactttcttcacagaattggaaaaaaactactttaaagttcatatggaaccaaaaaagagcccgcatagccaagtcaatcctaagccaaaagaacaaagctggaggcatcacactacctgacttcaaactatactacaaggctacagtaaccaaaacaggatggtactggtaccaaaacagagatatagatcaatggaacggaacagagccctctgaaataatgccgcatatctacaactatctgatctttgacaaacctgagaaaaacaagcaatggggaaaggattccctatttaataaatggtgctgggaaaactggctagccatatgtagaaagctgaaactggatcccttccttacaccttatacaaaaattaattcaagatggattaaagacttaaatgttagacctaaaaccataaaaaccctagaagaaaacctaggcaataccattcaggacataggcatgggcaaggacttcatgtctttgcccaaacaccagaagcaatggcaacaaaagccaaaattgacaaatgggatctaattaaactaaggagcttctgcacagcagaagaaattaccatcagagatcatgaagacgccagatcctgctggcttgcattctcagaggagggaataccaggtggaattgtggccatgcggcattgtcatgaagaatatgagatttgcagctgtcatggcaaggaaaccctggagcttcagagattttag

SEQ ID NO: 127437 - DNA, 2807 bp, Homo sapiens
aaaagcaagagcaaacacattcaaaagctagcagaaggcaagaaataactaaaatcagagcagaactgaaggaaatagagacacaaaaaacccttcaaaaaattaatgaatccaggagctggttttttgaaaggatcaacaaaattgatagaccgctagcaagactaataaagaagaaaagagagaagaatcaaatagacgcaataaaaaatgataaaggggatatcactaccagtcccacagaaatacaaacaaccatcagagaatactacaaacacctctacgcaaataaactagaagatctagaagaactggataaattcctcgaaacatacaccctcccaagactaaaccaggaagaaggtgactctctgaatagaccaataacaggatctgaaattgtggcaataatcaatagcttgccaaccaaaaagagtccaggaccagatggattcacagccgaattctaccagaggtacaaggaggaactggtaccattccttctgaaacgattccaatcaatagaaaaagagggaatcctccctaactcattttatgaggccaacatcatcctgataccaaagtcggccagagacacaaccaaaaaagataattttaggccaatatccttgatgaaccttgatgcaaaaatcctcaataaaatactgacaaaccgaatccagcagcacatcaaaaagcttatccaccatgatcaagtgggcttcatccctgggatggcaaggctggttcaatatacgcaaatcaataaatgtaatccagcatataaagggtattcaaagacaaaaaccacatgattatctcaatagatgcagaaaaagcctttgacaaaattcaacaacccttcatgctaaaaactctcaataaattagcccaaaatctccttaagctgataagcaacttcaacaaagtctcaggatacaaaatcaatgtacaaaaatcacaagcattcttatacaccagcaacagacaaacagagagccaaatcatgagtgaactcccattcacaattgcttcaaagagaataaaatacctaggaatccaacttacaagggatgtgaaggacctcttcaaggagaactacaaaccactgctcaaggaaataaaagaggatacaaacaaatggaagaacattccatgctcatgggtaggaagaatcaatatcgtgaaaatggccatactgcccaaggtaatttacagattcaatgccatccccatcaagctaccaatgactttcttcacagaattggaaaaaactactttaaagttcatatggaaccaaaaaagagcccacatcgccaagtcaatcctaagccaaaagaacaaagctggaggcatcacactacctgacttcaaactatactacaaggctacagtaaccaaaacagcatggtactggtaccaaaacatgtgctatagatcaatggaacagaacagagccctcagttattatgtcgcatatctacaaccatctgatctttgacaaacctgagaaaaacaagcaatggggaaaggattccctatttaataaatggtgctgtgaaaactggctagccatatatagaaagctgaaactggatcccttctttacaccttatacaaaaatcaattcaagatggactaaagacttaaatgttagacctaaaaccataaaaaccctagaagaaaacctaggcattaccattcaggacataggcatgggcaaggacttcatgtctaaaacaccaaaagcaacggcagcaaaagcccaaattgacaaatgggatctaattaaactaaagagcttctgcacagcaaaagaaactaccatcagagtgaataggcaacctacaaaatgggaggaaattttcgcaacctactcatctgacaaagggctgatatccagaatctacaatgaactcaaacaaatttacaagaaaaaaacaaacaaccccatcaaaaagtgggcaaaggacatgaacagacacttctcaaaacaagacatttatgcagccaaaaaacacatgaaaaaatgctcatcatcactggccatcagagaaatgcaaatcaaaaccacaatgagataccatctcacaccagttagaatggctatcaaaaagtcaggaaacaacaggactccagggctgaacgaggcccaagaatcagaggaccaaatgccgaggcagtctcaggcagctccgacagtccgggacgccaggcccagcagtcctacagttgccctcttgaatcagtcgggtccagagatgagcagcagctgttacctaggctatgtcagggccaggagccaagacttttctgatgtcgctcaaaacccagcaaagagccagctgcctccttacatcctcaccccggccctggaccaagatggcagcaaggatcacatggacccatttcgccagcttaccacatcccaggcccagtggaatcttcaccttccaaggatcttgtctttatcagaattaactctgaaagcagaagagcagccaccaggaactgtgctacatgctttctttacaaacaatgcctcattgaagcttcaccacctggaacaagatgctactgctaccttcttagaaaacaggaaattaagacaaggggacaccaaagttacacagctactagagacagagacagaattcaaacccagttttctcacctgtaaattggagctaacggtatcaaccacgctatggtttgaatatggtttatttggccccatcaagtctcatgttgaaattcgatcccccagtgttgaaagtggggcctggtgggaggtgttcggattgtga

SEQ ID NO: 127438 - DNA, 3131 bp, Homo sapiens
atggataaattccttgacacatacactctcccaaaactaaaccaggaagaagttgaatctctgaatagaccaataacaggatctgaaattgtggcaataatcaatagcttaccaaccaaaaagagtccaggaccagatggattcacagccgaattctaccagaggtacaaggaggaactgctgataagcaacttcagcaaactcctcaggatacaaaatcaatgtacaaaaatcacaagcattcttatacaccaataacagacaaacagagagccaaatcatgagtgaactcccattctgttattgcttcaaagagaataaaatacctaggaatccaacttacaagggatgtgaaggacctcctcaaggagaactacaaaccactgctcaatgaaataaaagaggatacaaacaaacggaagaacattccatgctcgtaggtaggaagaatcaatatcgtgaaaatggccatactgcccaaggacaaaacaagtaaatatattgatgttgatgagaatgagggttctcactgtggaaaaaggaaatacaaatatggaatggagaaagcgttggaaattctggccagggcaatcaggcaggagaaagaaataaagggtattcaattaggaaaagaggaagtcaaattgtccctgtttgcagatgacatgattgtacatttagaaaaccccatcatctcagcccaaaatctccttaagctgataagcaacttcagcaaagtctcaggacacaaaatcaatgtacaaaaatcacaaacattcctatacaccaataacagacaaacagagagccaaatcatgagtggactcccattcaaaattgctacaaagagaataaaatacctaggaatccaacttacaagggatgtgagggatctcttcaaggagaactacaaaccactgctcaatgaaataaaagaggatacaaacaaatggaagaagaacatcctgtcctcatggataggaagaatcaatatcgtgaaaatggccatactgcccaaggtaatttatagattcaatgccatcctcatcaacctaccaatgactttcttcacggaattggaaaaaactactttaaaattcatatggaaccaaaaaagagcctgcattgccaagtcaatcctaagccaaaagaacaaagctggaggcatcacactacctgacttcaaactatactacaaggctacagtaaccaaaacagcatgggacatggatgaagctggaaaccatcattctcagcaaactattgcaaggacaaaaaaccaaacactgcgttttctcagtcatgggtgggaattcaacaatgagaacacatggacacaggaaggggaacatcacacaccagggcctgtcaggggtaccttgggacaactgacatttgcaagacttaacctgagccccatcagttacaagagtttggaggcctcagctgtcacttctgtttccatggaaactcaaatcagattgccaaaaatgaggttttggtatcaggatgatgctggcctcataaaatgtgttggggaggagttgctctttttctattgtttggaaccatttcagaaggaatggtaccagctcctctctgtacctctggtagaatttggctgtgaatccgtctggtcctgggctttttttggctgggacatggatgaagctggaaaccatcattctcagcaaactaacacaccaacagaaaaccgaacagcacatcttctcactcataagtgggaattgaacaatgaaaacacatggacacatggagggaaacatcacacaccagggcctgttgggggatgttcacttatccaagtggaaatcagatggtttatcgaaatggtatgtaagagagaagtttacagatacgaccattcatggtggtggcagttgcagcaacagcagcaggatccccagggcagactgcaggcctctgggggctgggctctcagaagggtgccaggccacagccaaaatgctcaggcagaagcaaggtggctgtactgtgagcctagggaaggcaggtcccccttagcgggaacagtgaaagcaagggtgctcaatgtgcttgctcctttaccctgcagcagcagcagccgtgatacacatttttgggcttcctcaggcatgagccaaatatcagacactctatccctcaaactccaagagaccctcacgttcctcaacatccttctcttccaaagaaagggagaggggaagaacagcatgtcaacaacactctccaaagaattcctgactctcagcttctttgacttcaacctgtttcaaaactcaatgttggaagttctggccagggcaattaggcaggagaaggaaataaagggtattcaattaggaaaagaggaagtcaaattgtccctgtttgcagatgacatgattgtatatctagaaaacccccttgtctcagcccaaaatctccttaagctgataagcaacttcagcaaagtctcagaatacaaaatcaatgtacaaaaatcacaagcattcttacacaccaataacagacaaacagagagccaaatcatgagtgaactccccttcacaattgcttcaaagagaataaaatacctaggaatccaacttacaagggatgtgaaggacctcttcaaggagaactacaaaccactgctcaatgaaataaaagaggatacaaacaaatggaagaacattccatgctcatgggtaggaagaatcaatatcgtgaaaatggccatactgcccaaggtaatttatagattcaatgccatcctcatcaagctaccaatgactttcttcacagaattggaaaaaactactttaaagttcatatggaaccaaaaaagagcccacgtcgccaagtcaatcctaagccaaaagaacaaagctggaggcatcacactacctgacttcaaactatattgcaaggctacagtaaccaaaacagcatgccaggaggtggcggtagtaaccaatggcaaaatcctgagacactgcctctatcagcttctcattgtcctgcggacgcttcctggatctaatctgatgcttatgaaagtgatttccttctttcgaaaacaccaggcccaaacaaaaactaacttcatcctgcagataaaaact

SEQ ID NO: 127439 - DNA, 5688 bp, Homo sapiens
atgggagactttaacaccctactgtcagcattagacagatcaacgagacagaaagttaacaaggatattcaggaattgaactcagctctgcaccaagcagacctaatagacatctacagaactctccaccccaaatcaacagaatatacattcttctcagcaccacaccgcacttattccaaaattgaccacttagttggaagtaaagcactcctcaggaaatgtaaaagaacagaaattataacaaactgtctctcagaccacagtgcaatcaaactagaactcaggattaagaaactcactcaaaaccactcaactacatggcaactgaacaacctgctcttgaatgactactgggtacataacgaaatgaaggcagaaataaagatgttctttgaaaccaatgaaaacaaagacacaacataccagaatctctggtatgtcaaagataccagaatctctggtatgctctggtatgtgaaagcagtgtgtagagggaaatttatagcactaaatgcccacaagagaaagcaggaaagatctaaaattgacaccctaacatcacaattaaaagaactagagaagcaagagcaaacacattcaaaaactagcagaaggcaagaaataactaagatcagagcagaactgaaggaaatagagacacaaaaaacccttcaaaaaatcaatgaatgcaggagctggttttttgaaaagatcaacaaaattgatagaccgctagcaagactaattaagaagaaaagagagaagaatcaaatagatgcaataaaaaatgacaaaggggatatcatcaccgatcccacagaaatacaaactaccatcagagaatactataaacacctctacggaaataaactagaaaatctagaagaaatggataaattcctggacacatacaccctcccaagactaaaccaggaagaagttgaatctctgaatagaccaataacaggctctgaaattgaggcaataattaatagcttaccaaccaaaaaaagtccaggaccagatggattcacagccgaattctaccagaggtacaaggaggagctgagaataaaatacctaggaattcaacttacaagggacgtgaaggaccttttcaaggagaactacaaaccactgctcaatgaaataaaagaggatacaaacaaatggaagaacattccatgctcatgggtaggaagaatcaatatcatgaaaatggccatactgcccaaggtaatttatagattcaatgccatccccatcaagctaccaatgactttcttcacagaattggaaaaaactactttaaagttcatatggaaccaaaaaagagcccgcatcgccaagtcaatcctaagccaaaagaacaaagctggaggcatcacgctacctgacttcaaactatactacaaggctacagtaaccaaaacagcatggtactggtaccaaaacagagatacagatcaatggaacagaacagagccctcagaaataatgctgcatatctacaaccatctgatctttgacaaacctgacaaaaacaagcaatggggaaaggattccctatttaataaatggtgctgggaaaactggctagccatatgtagaaagctgaaactggatcccttccttataccttatacaaaaattaattcaagatggattaaagacttaaacgttagacctaaaaccataaaatccctagaagaagacctaggcaataccattcaggacataggcatgggcaaggacttcatgtctaaaacaccaaaagcaatggcaacaaaagccaaaattgacaaatgggatctaattaaactaaagagcttctgcacagcaaaagaaactaccatcagagtgaacaggcaacctacagaatgggagaaattttttgcaatctactcttctgacaaagggctcatatccagaaggtacaatgaactcaaacaaatttacaagaaaaaaaacaaacaaccccatcaaaaagtgggcgaaggatatgaacagatacttctcaaaagaagacatttatgtagccaacagacacatgaaaaaatgctcatcatcactggccatcagagaaatgcaaatcaaaaccacaataagataccatctcaccccagttagaatggcgatcattaaaaagtcaggaaacaacaggtgctggagaggatgtggagaaataggaacacttttacactgttgggtggactgttctattattgtcaaggtcccatcttcacttcaagctcatttacagttatcagggaaagaggttgatgtgaactcagaagtccatgttcaggaaatggctgaagttcgtaaagatgatgttgtaacagtgactgaattctaccagacattcaaagaagaattggtaccaatcctattgacactattccgcaagacagagaaagaaggaacactccctaattcatcctatgaagctagcatcaccctaataccaaaaccaggaaaggatacaaccaaaaaagaaaactacaggctgatatccctgatgaacacagacgctaaaattcttaacaaaatactagctaaccgaatccaacaacatatcaaaaagacaatccaccatgatcaagtgggttccataccagggatggagggatggtttaacatatgcaagtcaataaatgtgatacaccacataaacagaattaaaaacaaaaatcacatgatcatctcaatagatgcagaaaaagcattagacaaaatccagcatctctttatgattaaaactctcagcaaaatcggcatacaagggacatacctcaatgtaataaaagccatctatgacaaacccacagctaacataatactgaatggggaaaagttgaaagcattccctctgagaaatgaaacaagacaaggatgccctctctcaccactcctcttcaacacagtactgaaagtcctagccagagcagtcagacaagagaaggaaataaagggtatccaaattggtaaagaggaagtcatactgtcactgtttgctgatgatatgattgtttacctcaaaaaccctaaagactcctctagaaagctcctagaactgataaaaggattcaacaaagtttccagatacaaaattaatgtacacaaatcagtagctcttctaaacaccaacagcaaccaagcagagaatcaaatcaataactcaaccccttttacaatagctgcaaaaaaaaatgaagtacttaggaatatacctagccaaggaggtgaaagacctctacaaggaaaactacaaaccactgctcaacgaaataaaagaggatacaaacaaaatggaagaacattccatgctcatgcgtaggaagaatcaatatcatgaaaatggccatactgcccaagaattggaaaaaaactactttaaagttcatatggaaccaaaaaagagcctgcatcgccaagtcaatcctaagccaaaagaacaaagctggaggcatcacactacctgacttcaaactatactacaaggctacagtaaccaaaacagcatggtactggtaccaaaacagagatatagatcaatggaacagaacagagccctcagaaataatgccacctatctacaactatctgatctttgacaaacctgagaaaaacaagcaatggggaaaggattccctatttaataaatggtgctgggaaaactggctagccatatgtagaaagctgaaactggatcccttccttacaccttatacaaaaatcaattcaagatggattaaagacttaaatgttagacctaaaaccataaaaaccctagaagaaaacctaggcattaccattcaggacataggcttgggcaaggacttcatgtctaaaacaccaaaagcaatggcaacaaaagccaaaattgacaaatgggatctaattaaactaaagagcttctgtgcagaaaaagaaactaccatcagagtgaacaggcaacctacaaaatgggagaaaatttttgcaacttactcatctgacaaagggctaatatccagaatctacaatgaactcaaacagatttacaagaaaaaaacaaacaaccccatcaaaaagtgggtgaaggacatgaacagacacttctcaaaagaagacatttatgcagccaaaaaacacatgaaaaaatgctcatcatcactggccatcagagaaatgcaaatcaaaaccacaatgagataccatctcacaccagttagaatggcgatcattaaaaagtcaggagacaacagggacatggatgaaggtggaaaccatcattctcagcaaactattgcaaggacaaaaaaccaaacactgcatgttctcactcatagtgaggaaactgtggctcaggaagatgatgtgcctttgacaaggtcatggttgctgaaagcactcaagccccaagaggttcagagcagagccaagtcccctgatggccagtacaaagaggaggagaaagagaaggacagcagagggtgctctctgctggatttccccagcatgccagcttcccactgtgcagataaagcaaaatctgataggagcggggaggaagtgggctcaggctccaggagtacaagttggtatgcaagcaagtcattccaaacgccgcctccacacaaaccctctgagctgcaaattattaacctgcttaactctattgcagaaacaagcgctgctggggtgttggaagttctggccagggcaattaggcaggagaaggaaataaagggtattcaattaggaaaagaggaattcaaattgtccctgtttgcagatgacatgattgtatatctagaaaaccccattgtctcagcccaaaatctccttaagctgataagcaacttcagcaaagtctcaggatacaaaatcaatgtacaaaaatcacaagcattcttatacaccaataacagacaaacagagagccaaatcatgagtgaactcccattcacaattgcttcaaagagaataaaatacctaggaatccaacttacaagggatctgaaggacctcttcaaggagaactacaaaccactgctcaatgaaataaaagaggatacaaacaaatggaagaacattccatgctcatgggtaggaagaatcaatatcgtgaaaatggccatactgcccaagagggacgtgactgcaaattgtccaggttcttggcgttttgaacaaagaattggacaaaacacgcagcaaagaaagaatgaagcaacaaaagaacgaaagcagctctctcggctttcggctcggaggaggccaaggtgcaactttcttcggtcgtctcgaatccgggttcatccgacaccagccgcctccaccatgccgccgaagttccaccccaatgagatcaaagtcgtatacttcacgtgcactggagttgaagtcggtgccacttctgctctggcccccaagattggccccgcgggtctgtctccaaaagaggttggtgatgacattgccaaggtaacgggtgactggaagggcctgaggattacagtgaaactgaccattcagaacagacaggcccagattgaagtggtaccttctgcctccgccctgatcatcaaaaggaactaccaagagacagaaagaaacagaaaaacattaaacacagggggaatatcactttttatgagatcgtcaacattgctcgacagatgcagcactgatccttag

SEQ ID NO: 127440 - DNA, 6163 bp, Homo sapiens
atgaagaggagagggttccaagatggccgaataggaacagctccagtctacagctctcagcatgagcgacgcagaagacggatgatttctgcatttccaactgaggtaccgggttcatctcactagggagtgccagacagtgggcgcaggccagtgggtgcgcgcaccgtgcggagccgaagcagggcgaggcattgcctcacctgggaagcgcaaggggtcagggagttccctttccgagtcaaagaaaggggtgacggacgcacctggaaaatcgggtcactcccacccgaatattgcgcttttcagaccggcttaaaaaacggcgcaccacgagactatatcccacacctggccttcggagggtcctacgcccacggaatctcgctgattgctagcacagcggtctgagatcaaactgcaaggccgcagcaaggctgggggaggggcgcccgccattgcccaggcttgcttaggtaaacaaagcagccggggaagctcgaactgggtgcagcccaccacagctcaaggaggcctgcctgcctctgtaggctccacctctgggggcagggcacagacaaacaaaaagacagcagtaacctctgcagacttaaatgtccctgtctgacagctttgaagagagcagtggttctcccagcacgcagctggagatctgagaacgggcagactgcctcctcaagtgggtccctgacccctgacccccgagcagcctaactgggaggcaccccccagcaggggcacactgacacctcacacggcagggtattccaacagacctgcagctgagggtcctgtctgttagaaggaaaactaacaaacagaaaggacatccacaccgaaaacgcatctgtacatcaccatcatcaaagaccaaaagtagataaaaccacaaagatggggaaaaaacagaacagaaaaactggaaactctaaaacgcagagcacctctcctcctccaaaggaacgcagttcctcaccagcaacggaccaaagctggatggagaatgattttgacgagctgagagaagaaggcttcagacgctcaaattactctgagctacgggaggacattcaaaccaaaggcaaagaagttgaaaactttgaaaaaaatttagaagaatgtataactagaataaccaatacagagaagtgcttaaaggagctgatggagctgaaaaccaaggctcgagaactacgtgaagaatgcagaagcctcaggagccaatgcgatcaactggaagaaagggtatcagcaatggaagatgaaatgaatgaaatgaagcaagaagggaagtttagagaaaaaagaataaaaagaaacgagcaaagcctccaagaaatatgggactatgtgaaaagaccaaatctacgtctgattggtgtacctgaaagtgatgcggagaatggaaccaagttggaaaacactctgcaggatattatccaggagactttccccaatctagcaaggcaggccaacgttcagattcaggaaatacagagaacgccacaaagatactcctcgagaagagcaactccaagacacataattgtcagattcaccaaagttgaaatgaaggaaaaaatgttaagggcagccagagagaaaggtcgagttaccctcaaagggaagcccatcagactaacagcggatctctcggcagaaaccctacaagccagaagagagtgggggccaatattgaacattcttaaagaaaagaattttcaacccagaatttcatatccagccaaactaagcttcataagtgaaggagaaataaaatactttacagacaagcaaatgctgaccgattttgtcaccagcaggcctgccctaaaagagctcctgaaggaagcgctaaacatggaaaggaacaaccggtaccagccactgcaaaatcatgccaaaatgtaaagaccatcgagactaggaagaaactgcatcaactaacgagcaaaatcaccagctaacatcataatgacaggatcaaattcacacataacaatattaactttaaatgtaaatggactaaattctccaattaaaagacacagactggcaagttggataaagagtcaagacccatcagtgtgctgtattcaggaaacccatctcatgtgcagagacacacataggctcaaaataaaaggatggaggaagatctaccaagcaaatggaaaacaaaaaaaggcaggggttgcaatcctagtctctgataaaacagactttaaaccaacaaagatcaaaagagacaaagaaggccattacatgatggtaaagggatcaattcaacaagaggagctaactatcctaaatatgtatgcacccaatacaggagcacccagattcataaagcaagtcctgagtgacctacaaagagacttagactcccacacattaataatgggagactttaacaccccactgtcaacattagacagatcaacgagacagaaagtcaacaaggatacccaggaattgaactcagctctgcaccaagcagacctaatagacatctacagaactctccaccccaaatcaacagaatatacatttttttcagcaccacaccacagctattccaaaattgaccacatacttggaagtgaagctctcctcagcaaatgtaaaagaacagaaattataacaaactatctctcagaccacagtgcaatcaaactagaactcaggattaagaatctcactcaaagccgctcaactacatggaaactgaacaacctgctcctgaatgactactgggtacataacgaaatgaaggcagaaataaagatgttctttgaaaccaacgagaacaaagacacaacataccagaatctctaggacgcattcaaagcagtgtgtagagggaaatttatagcactaaatgcccacaagagaaagcaggaaagatccaaaattgacaccctaacatcacaattaaaagaactagaaaagcaagagcaaacacattcaaaagctagcagaaggcaagaaataactaaaatcagagcagaactgaaggaaatagagacacaaaaaacccttcaaaaaatcaatgaatccaggagctggtttttttgaaaggatcaacaaaattgatagaccgctagcaagactaacaaagagaaaaagagagaagaatcaaatacacgcaataaaaaatgataaaggggatatcaccaaccgatcccacagaaatacacactaccatcagagaatactataaaaacctctacgcaaagaaactagaaaatctagaagaaatggataaattcctggagacatacaccctcccaagaccaaaccaggaagaagttgaatctctgaatagaccaataacaggatctgaaattgtggcaataatcaatagcttaccaaccaaaaagagtccaggaccagatggattcacagccgaattctaccagaggtacaaggaggaactggtaccattccttctgaaactattccaatcaatagaaaaagaaggaatcctccctaactcattttaatgaggccagcatcattctgataccaaagccgggcagagacacaaccaaaaaagagaattttagaccaatatccttgatgaacattgatgcaaaactcctcaataaaatactggcaaaccgaatccagcagcacatcaaaaagcttatccaccatgatcaagtgggcttcatccctgggatgcaaggctggttcaatatacacaaatcaataaacataatccagcatataaacagaaccaaagacaaacaccacatgattatctcaatagatgcagaaaaggcctttgacaaaattcaacaacgctttcatgctaaaaaatctcaataaattaagtattgatgggatgtatctcaaaataataagagctatctatgacaaacccacagccaatatcatactgaatgggcaaaaactggaagcattccctttgaaaactggcacaagacagggatgccctctctcaccactcctattcaacatagtgttggaagttctggccagggcaattaggcaggagaaggaaataaagggtattcaattaggaaaagaggaagtcaaatttgtccctgttggcagatgacatgatggtatatctaggaaaacccccattgtcctcagccccaaaatcttctttaaggctggttaagcaacttcagcaaaagtcttcaggttacaaaatcaatgtgcaaaaatcaccaagcattcctatacaccaataacacagacaaacaagagagccaaatcatgagtgaactcccatttcacaattgcttccaagagaattaaatacctaggaatccaccttacaagggacgtgaaggacctcttcaaggagaactacaaaccacttgctcaaggaaaataaaagaggatacaaacaaatggaagaacattccatgctcatgggtaggaggaagaatcaatctcgtgaaaaatggccatacttgcccaaggtaatttacagattcaatgccatccccatcaagctaccaatgactttcttcacagaattggaaaaaaactactttaagtaaagttcatatgggaaccaaaaaaggagcctgcattgccaagtcaatcctaagccaaaagaacaaagctgggaggcatcaacgctacctgactttcaaactattacttacaaggctacagtaaccaaaacagtatgttatcagcatggtactggtaccaaaacagcatggtactggtaccaaaacagagatatagatcaatggaacggaacagaacagagccctcagaaataatgccacatatctacaactatctgacatctttgacaaacctgagaaaaacaagcatgggggaaaggcatcccctacttaataaaatggctgctggggaaaactggctagcccatatgtagaaagctcaaactgaaactggatcccttccaagctgaaactggatcccttccttacaccttatacaaaaatcaattcaagatggattaaagatttaaacatcattagacctaaaaccataaaaaccctagaagaatacctaggcattaccattcaggacataggcatgggcaaggacttcatgtctaaaacaccaaaagcaatggcaacaaaagccaaaattgacaaatgggatctaattaaactaaagagtttaattaaactaaagagcacagcaggaaaaaaccaccatcagagtgaacaggcaacctacagaatgggagaaaattttcacaacctactcatctgacaaaaagggctaatatccagaatctacaatgaactcaaacaaattttcaagaaaaaaatcaaacaaccccatccaaaagtgggcgaaggatatgaacagacacttctcaaaagaagacatttatgcagccgaaaaaacacatgaaaaaaatgctcaccatcactggccatgcagagacaatgcaaatcaaaaccacaaatcaaaaccacaatgagataccatctcacaccagttagaatggcaatcattaaaaagtcaggaaacaacaggtgctggagaggatgcggagaaataggaacacttttacactgttggtgggactgtaaactagtccaaccattgtggaagtcagtgtggcgattcctcagggatctagaactagaaataccatttgacccagccatcccatttactgggtatatacccaaatgagtataaatcatgctgctataaagacacatgcacacgtatgtttattgcggcactattcacaatagcaaagacttggaaccaacccaaatgtccaacaatgatagattggattaagaaaatgtggcacatatacaccatggaatactatgcagccataaaaaatgatgagttcatatcctttgtagggacatggatgaaattggaaaccatcattctcagtaaactatcgcaagaacaaaaaaccaaacaccgcatattctcactcataggtgggaattgaacaatgagatcacatggacacaggaaggggaatatcacactctggggactatggtggggaggggggaggggggagggatagcattgggagatatacctaatgctagatgacgagttagtggtgcagtgcaccagcatggcacatgtatacatatgtaactaacctgcacaatgtgcacatgtaccctaaaac

SEQ ID NO: 127441 - DNA, 3633 bp, Homo sapiens
atggatccgccggcgggagccgctcgccgcctgctctgccccgcgctgctgctgctgctgctgctgctgccgccgccgctcctgccgccgccgccgccgcccgcgaacgccaggctcgccgccgccgccgaccccccaggcgggcccctggggcacggagcggagcgcatcctggcggtgcccgtgcgcactgacgcccagggccgcttggtgtcccacgtggtgtcggcagctacgtccagagcaggggtacgagcccgcagggccgccccggtccggaccccgagcttccccggaggcaacgaggaggagcctggcagtcacctcttctacaatgtcacggtctttggccgagacctgcacctgcggctgcggcccaacgcccgcctcgtggcgcccggggccactatggagtggcagggcgagaagggcaccacccgcgtggagcccctgctcgggagctgtctctacgtcggagacgtggccggcctagccgaagcctcctctgtggcgctcagcaactgcgatgggctggctggtctgatccggatggaggaggaggagttcttcatcgaacccttggagaaggggctggcggcgcaggaggctgagcaaggccgtgtgcatgtggtgtatcgccggccacccacgtcccctcctctcggggggccacaggccctggacacaggggcctccctggacagcctggacagcctcagccgcgccctgggcgtcctagaggagcacgccaacagctcgaggcggagggcacgcaggcatgctgcagacgatgactacaacatcgaggtcctgctgggcgtggatgactctgtggtgcagttccacgggaaggagcacgtacagaagtacctgctgacactcatgaacattgtcaatgaaatctaccatgacgagtccttgggtgcccacatcaacgtggtcctggtgcggatcatcctcctgagctatggaaagtccatgagcctcatcgagatcgggaacccctctcagagcctggagaatgtctgccgctgggcctacctccagcagaagccagacacgggccacgatgaataccacgatcacgccatcttcctcacacggcaggactttgggccttccggcatgcaaggctatgctcctgtcaccggcatgtgccatccggtccgcagctgcaccctgaaccatgaggacggcttctcctcagcgtttgtggtggcccatgagactggccacgtgctgggcatggagcacgacgggcagggcaaccgctgtggcgacgaggtgcggctgggcagcatcatggcgcccctggtgcaggccgccttccaccgcttccactggtcccgctgcagccagcaggagctgagccgctacctgcactcctatgactgcctgctggatgaccccttcgcccacgactggccggcgctgccccagctcccgggactgcactactccatgaacgagcaatgccgctttgacttcggcctgggctacatgatgtgcacggcgttccggacctttgacccctgcaagcagctgtggtgcagccatcctgacaacccctacttttgcaagaccaagaaggggccccccttggacgggactatgtgtgcacctggcaagcattgttttaaaggacactgcatctggctgacacctgacatcctcaaacgggacggcagctggggcgcttggagtccgtttggctcctgctcacgtacctgtggcacgggcgtgaagttcaggacccgccagtgtgacaacccacacccggccaacgggggccgcacctgctcgggccttgcctacgacttccagctctgcagccgccaggactgccccgactccctggctgacttccgcgaggagcagtgccgccagtgggacctgtacttcgagcacggcgacgcccagcaccactggctgccccacgagcaccgggatgccaaggagagatgccacctgtactgcgagtccagggagaccggggaggtggtgtccatgaagcgcatggtgcatgatgggacgcgctgctcctacaaggacgccttcagcctctgtgtgcgcggggactgcaggaaggtgggctgtgacggtgtgatcggctccagcaagcaggaagacaagtgtggcgtgtgcggaggggacaacagccactgcaaagtggtcaagggcacgttcacacggtcacccaagaagcatggttacatcaagatgtttgagatccctgcaggagccagacacctgctcattcaggaggtagacgccaccagccaccatctggccgtcaagaacctggagacaggcaagttcatcttaaatgaagagaatgacgtggatgccagttccaaaaccttcattgccatgggcgtggagtgggagtacagagacgaggacggccgggagacgctgcagaccatgggccccctccacggcaccatcaccgttctggtcatcccggtgggagacacccgggtctcactgacgtacaaatacatgatccatgaggactcactgaatgtcgatgacaacaacgtcctggaagaggactctgtggtctacgagtgggccctgaagaagtggtctccgtgctccaagccctgtggcggagggtcccagttcaccaagtatggctgccgccggaggctggaccacaagatggtacaccgtggcttctgtgccgccctctcgaagcccaaagccatccgcagagcgtgcaacccacaggaatgctcccagccagtgtgggtcacaggcgaatgggagccatgtagccagacctgtgggcggacaggcatgcaggtgcgctccgtgcgctgcattcagccgctacacgacaacaccacccgctccgtgcacgccaagcactgcaatgacgcccggcccgagagccgccgggcctgcagccgcgagctctgccctggtcgttggcgagccgggccctggtcccagtgctcagtaacctgtggcaacggcacccaggagcggccagtgccctgccgcaccgcggacgacagcttcggcatctgccaggaggagcgtcctgagacagcgaggacctgcaggcttggcccctgtccccgaaacatctcagatccctccaagaagagctacgtagttcagtggctgtcccgcccggaccccgactcgcccatccggaagatctcgtcaaagggccactgccaaggcgacaagtcaatattctgtaggatggaagtcttgtcccgctattgctccatcccaggctacaacaagctgtcctgcaagtcctgtaacctgtacaacaacctcaccaacgtggagggcaggatagagccaccgcctgggaagcacaacgacattgacgtgttcatgcctaccctcccagtgcccactgtagccatggaggtgcggccatcaccaagcacccccctggaggtccctctcaatgcctccagcaccaatgccacagaggatcacccagaaaccaatgccgtagatgaaccctacaaaatccatggcctggaagatgaagtccagccacccaacctaatccctcgacgaccgagcccctatgaaaagaccagaaaccaaagaatccaagagctcattgatgagatgcggaagaaagagatgctcggaaagttc

SEQ ID NO: 127442 - DNA, 933 bp, Homo sapiens
aaactgcgcgctgaacggatctcaatgatttttcaggacccaatgacttcgttgaatccctatatgcgcgtcggtgagcagttgatggaagtgctgatgctgcataagaacatgagcaaagctgaggcgtttgaagagtcggtgcggatgctcgatgcggtaaaaatgccggaagcgcgtaaacgcatgaaaatgtacccgcacgaattttctggcggcatgcgtcagcgagtcatgattgcgatggccttgttatgtcgacctaagctgctgattgcggatgaaccaacaactgcgctggacgtcaccgtacaggcgcagatcatgacgctattaaatgaactgaagcgggaatttaataccgccatcattatgatcacccacgatcttgtcgtggtggcggggatctgcgacaaagtgctggtaatgtacgccgggcgcacgatggaatatggcaacgcgcgcgatgtcttttatcaacccgttcatccttattctatcggtttgctcaacgcggtgccgcgtctcgatgcggaaggtgaaacaatgttgaccatcccgggtaatccgccaaacctgctgcgattaccgaaaggttgcccgttccagccacgttgtccgcatgcgatggaaatttgtagtagcgcaccgccgctggaagagtttacgcctggccgtctgcgtgcttgctttaaaccggtggaggaactgttatgaatgctgtaactgaaggaagaaaagtcctccttgaaatcgccgatcttaaagtgcactttgaaatcaaagatggcaaacagtggttctggcaaccgccgaaaacgctcaaagccgtcgatggtgtcactcttcgctggccgatccgcgattggcggacggccgctgatgaaagaaggccgggcgtactcagtgtcagggtgatataagatgtgtatt

SEQ ID NO: 127443 - DNA, 458 bp, Homo sapiens
gctcccgtcagggttggatggtgttgaacgggccgaaaaaaccacccaaaggctacatcgaaggtctggaaatgctggcttcaatgcgcctgtgtgctaacaccgcgctaggtggttatcagagcatcagtgaatttattacccctggcggtcgtctttatgaccacggtaaccgcgcgtgggaactgatcaacgatattccgggcgtttcctgcgtgaaacctcgtggtgcgctgtatatgttcccgaaaatcgacgccaaacgctttaacattcacgacgatcagaaaatggtgttggatttcctgttgcaggaaaaagttctgttggtgcaagggacggcattcaacgtggcgtggccggatcacttccgccatttggtactaccgcgtgtcgatgatatcgagctgtctttgagcaagttcgcgcgtttcctttctggttatcatcagctgtaa

SEQ ID NO: 127444 - DNA, 492 bp, Homo sapiens
ggtacccggggatccggctctggaacgcgaacgactgaccggggcgctggaagaagcggcaaacgagtttcgccgctacagcaaacgctttgccgccggtgcacaaaaagaaacggcggctattttcgatctttactcgcacctgctttcggacacccggctgcgtcgcgaattgtttgccgaggttgataaaggctcggtggcagagtgggcggtaaaaacggtcattgaaaaatttgccgaacagtttgccgcgctaagtgataactatctcaaagagcgggctggcgatttacgtgcgctgggtcagcgattgctgtttcatcttgatgacgctaatcaagggccgaacgcctggccggaacgtttcattctggtggcagatgaactgtcagcgacaacgcttgctgagctgccccaggatcgcttattcggtgttgtcgtgcgagatggcgcagccaactcccatgctgcgatcatggtacgtgcgct

SEQ ID NO: 127445 - DNA, 1202 bp, Homo sapiens
aacagttgttagcgcaagcacagcaactttctggttatacattgggagaactggcggcacttgtcgggctggttacgccagagtgggcggtaaaaacggtcattgaaaaatttgccgaacagtttgccgcgctaagtgataactatctcaaagagcgggctggcgatttacgtgcgctggagcttttaatggagattgtggagattgcacgtcagcataatctcattatcttcgccgatgaaatttatgacaaaattctctacgacgacgctgagcatcactcaattgcgccgctggcacctgacctgctgaccattacctttaacggactgtcgaaaacgtaccgcgttgcaggcttccgtcaggggtggatggtgttgaacgggccgaaaaaacacgccaaaggctacatcgaaggtctggaaatgctggcttcaatgcgcctgtgtgctaacgttcctgcgcaacacgccattcagaccgcgctaggtggttatcagagcatcagtgaatttattacccctggcggtcgtctttatgagcagcgtaaccgcgcgtgggaactgatcaacgatattccggggcgtttctgcgtgaaacctcgtggtgcgctgtatatgttcccgaaaatcgacgccaaacgctttaacattcacgacgatcaaaaaatggtgttggatttcctgtggcaggaaaaagttctgttggtgcaagggacggcattcaactggccgtggccggatcacttccgcattgtcacgctaccgcgtgtcgatgatatcgagctgtctttgagcaagttcgcgcgtttcctttctgcaaattccggtcgcaaccgaaacgttcagggaagaaacgcttccagccatcgggatgctgatcaactcatcgcaatgttcacgagtcaggcgacgcataccttcaccttccgcacccatcaccagcgccaggcgtccggtcattttgctctgatagagtgtatgatccgcctcgcctgccgtaccgacgatccagatattctcttcctgcaacatacgcatggtgcgcgcaaggttagtcacccgaatcagcggaacgctttctgccgcgccgcaggctacttttttcgccgtagcgttgagctgtgcggagcgatctttcggcacaatcaccgcatgaacgcctgcggcgtccgcactacgcaggcacgcgccgagagatag

SEQ ID NO: 127446 - DNA, 312 bp, Homo sapiens
atggaagggtcaagaatgaaataccgcatcgctttagctgtttctctctttgctcttagtgccggtagttatgccactaccctgtgtcaggaaaaggagcaaaatatccttaaggagatcagctatgccgaaaaacaccaaaaccagaatcgtattgacggtctgaataaaaccctgagtgaaatccgggccaactgttcagatagccagctgcgtgccgatcatcaaaagaaaaacgcaaagcagaaagatgagggggcggaacgccagcaaaatttagccgaggcgaaacaaaaaggcgatgccgattag

SEQ ID NO: 127447 - DNA, 1073 bp, Homo sapiens
actcaggttgacattaactaatcccgcgtttcccgtgttacacctgactggaattgcaagttctgccgttctggccccaagaggtttatgccctacaacacggaaattggcagcgaagacatcacctaaatcaacttcaattgtctctccggcattgacggaacatgagccaagtgaattgatcgtaccagacagcgtcaccctgaccggctcaatgttggcgattgatgctccggtgatcgccagcggcgcgaccacgccgaataaccgcgtcgcggatgaccagggctttttacgccagtggagcaaggtggcgaaagaacgcaaactgcaacggttttatatcggcgaaccgagcgccgaagccgttgccgcgcaaatgccggatctgattttaattagcgcaaccggcggggattcggcgctggcactgtatgatcagctttccaccatcgccccgacattaatcatcaattacgacgacaaaagctggcagtcgctgttaacgcaacttggcgaaattaccgggcatgagaaacaagcggcagagcggattgcgcagtttgataagcaactggcggcggcgaaagagcaaatcaaattaccgccgcagccgggcgtggttacccgcatttatacctccggcctgcgtggtccactggcggaagagatctcccgtggtctgctggcagaaccggtgcagatccactctcacggcggtcgtgtgcatctggtacagagcggcgaactgaatattgacgtggctttcatcggcgtcccgtcctgtgatgaattcggtaatgccaacggctacaccggtaaagcctgctgcggctccctcggctatgcaatagttgatgccgacaacgcaaaacaggtcgtgatgcttaccgaagaactgctgccttatccgcataatccggcaagcattgagcaagatcaggttgatttgatcgtcaaagttgaccgcgttggcgatgctgcaaaaatcggcgctggcgcgacccgtatgaccactaacccgcgcgaactgcttattgcccgtagcgctgcggatgtgattgtcaactctg

SEQ ID NO: 127448 - DNA, 6987 bp, Homo sapiens
atgcgtgccctgctgattctctatctcaccaatcaactaaaatacagcgatactcacgcctacgagttatttagcgcctactgttcgctggtgtatgtcacgccaatcctcggtggctttttggcgcataaagttctcggcaatcgcatggcggtgatgctgggggcgttgttgatggcgatcggtcatgtggtgctgggtgccagtgagatccatccgtcattcctctgtctgttccgacggttaatcagtggttacggcagcgggcataacatcggtcatatatttccaccaacgttggcaaacatcagtgctggcaaccgcattccagcgttcttcagattcaatctctaccatggcaaacagcagattacgcgctttgtcgagatagatggcgtagttatgcgcaccgtgagatttcagcactgcttccagttctggccagatgggattatgccgacgctgatactcttcgtgggcgtcggggtttacctgcatgacaaaggctttgcggatcatgtttgctccttacagcgccagcgcactggcgagtgcgtaacgccgaaacgcttgccgagcgctatcaactcttcacggctgatggtttcatccagcgtcggtccgctcaagcagacgccgtggaagggccacaacaccagcgaatgtttttgcatctcttgtgcggacctgcaggcgcataatctgggatacgctgaccatgagcaaaatgacgtccgccagacctcaaacgatggcagttttaccgacgccgggttcaccaatcagtaccgggttatttttagtacgacgttgcagcacctgaatggtacggcgaatttcttcatcacgaccaatcaccggatcgagtttgccctgttcggctcgttcgaacgctttaacgatcggctgggtaaccagtttggtgcggctatcacctatttctcatttttgtcgatgataccaattttgatggtgtcgtttgccgcagggggctttgtgctggcctcccatccgatgttgctacaggatatcttcgacaaaattctgcaaaacatcagcgatccgacgctagccgccacgttgaaaaacaccatcaacaccgccgttcagcagcgtacgactgtagggcttgtcggcctggcggtggcactttattccggcatcaactggatgggtaacctgcgtgaagcgattcgtgcccagtcgcgcgatgtctgggaacgctcgccgcaagatcaggagaagttctggcaaatgattattagcgccctgcacctgaacagcattgagtggctgaaaccgacgtggcgattgattggcctggcgatttccatcttcgccaactatctgcttttcttctggatcttgactctagagatccccgatgtgcgaaaccgcctcttcttcccgctcagcaacgcgaaccggtggaatacgcacctcatcacccgcttcgagtttatattcaggcttaatacgttttttgttcacccgcacttcgcctttacgcaaaatacggtaaatcatactttttggtacgcctttcaattggagatccccggtaccgagctggaattcagcgcgctttctaccgatttccgtaacagcgttgacgtgatgaccactgaaacgacctgtttaagctctgtctggcaaaccgatgaagaagtccataacctgctggcgctgcacggtcgcggccaggattactgccagcttaaccctcaaccgatggcgtactacgatggctgcatcagcgttgatttaagcgccatcaaaccaatgattgcgctgccgttccacccgagcaacgtgtatgaaatcgacacactgaaccagaacctgaccgacattctgcgtgagattgaaattgagtccgaacgcgtggcgcacggtaaagccaaactctcgctgctggataaagtggaaaatggtcgcctgaaagtgcagcaggggattatcgcgggctgttctggcggtaactacgaaaacgtcagcgcggcggcgaatgcactgcgcggtcaatcctgtggcaatgacaccttctcgctggcagtttacccgtcatcacagccggtgtttatggatctaacgaaaaaaaggtgtgaagcgtaccggagtacccggattatgaaaatactggtctacggcattaactactcgccggagttaaccggcatcggcaaatacaccggcgagatggtggaatggctggcggcacaaggtgggcgagaactattccgcctggcgctacaaacgagaagagggggccgcacggtgtggcgctgcccgctgtatgtgccaaaacagccgagcaccctgaaacgcctgttgcatctgggcagttttgccgtcagcagtttctttccgctgatggcgcaacgtcgctggaagccggatcgcattattggcgtggtgccaacgctgttttgcgcgccgggaatggccctgctggcgaaactctctggtgcgcgtaccgtgctgcatattcaggattacgaagtggacgccatgctggggctgggccttgccggaaaaggcaaaggcggcaaagtggcacagctggcaacggcgttcgaacgccagtccacctttggcgggaaaactgcaactacctggggctataacggcaatctgctggggccggcggtgaaattacagcgcggcaaagcggtaacggttgatatctacaaccaactgacggaagagacaacgttgcactggcacgggctggaagtaccgggaattatcacgacgccgctgaacgactggctgatctggcatgaagtcggtcataacgccgcagaaacgccgttgactgtaccgggtgcaactgaagtcgctaacaacgtcgtggcgctgtacatgcaggatcgttatctcggcaagatgaaccgtgtcgctgacgatattaccgtcgcaccggaatatctggaggagagcaacaaccaggcatgggcacgcggcggtgcgggtgaccgtctgctgatgtacgcacagctgaaggaatgggcagagaaaaactttgatatcaagaaatggtatccagatggcactcctctgccagagttttacagcgagcgtgaagggatgaaaggctggaacctgttccagttgatgcatcgtaaagcacgcggcgatgaggtcagcaatgacaagtttggcggcaagaattactgtgctgaatccaacgcgcgcgaccacgccgaatacaccgtcgcggatgaccagggctttttacgccagtggagcaaggtggcgaaagaacgcaaactgcaacggctctatatcggcgaaccgagcgccgaagccgttgccgcgcaaatgccggatctgattttaattagcgcaaccggcggggattcggcgctggcactgtatgatcagctttccaccatcgccccgacattaatcatcaattacgacgacaaaagctggcacccccgactgagcttcaataaggcagatgaaattactaccgtcttttgtggttcgaaaaagagtctggcaaatggcatcccgatggcaaacattctgttccccacatcggtgatcgctacccagcaaacgcagcatttccgcttcgtcgatgacttcaatgcccagttcctgcgcttcgccagtttagatcctgcagcttcacccgctatcaccatatcgggaaaggcgactctagagatccccggtaccgagctagtattctatgcggcgctcgagaaaaagctgaacatcaaaccagggcaaacgacatttgatggccgctttacgctgctgccaacttgctgcctggggaactgtgataaagggccaaacatgatgatcgatgaggacactcacgcgcatctgaccccggaagcgatccctgaactgctggagcgcaaaaacggttacgaaggcgcgcgtaaggcgctgaccgggctgtctccggacgaaatcgttaatcaggtaaaagacgctggtctgaaagggcgcggcggcgcgggcttctcgactggcctgaaatggagcctgatgccgaaagacgaatccatgaacatccgttacctgctgtgtaatgccgatgaaatggagccgggcacctataaagaccgcctgttgatggagcaactgccgcacctgctggtggaaggtatgctcatctccgcgtttgcgctgaaagcttaccgtggctacatcttcctgcgtggcgaatatatcgaagcggcagttaatctgcgccgtgccattgccgaagccgactctagagatccccgcgtgaacaaattccaggacgaagtgggcggcaaactgcgctttggcgatccgggcgtgcgtctgtttgaaaccagcgaaaatggtctggattacttcaccagcgtaccggcacgcttccagccgcaggacgggaaatcgcgtatcgcgccgtattaccacctgtttggcagcgatgaattgtcacagcgtgctccggtcttccagagccgtatgccgcagccgtacatcaaactcaacccagcggatgccgcgaagttgggtgtgaacgcaggtacacgcgtctcctttagttacgatggcaacacggtcacgctgccggttgaaatcgccgaaggactgacggcagggcagtgccgacacctcacgttccgcgatcgagcaagatgtggtgttgcactgtcggagcggcggcagttacgacgtgcattacagtattacgccgttaagtactctggacggcagcaatattggttcggttctggtgattcaggacgttaccgaatcacgcaaaatgtgcgccagctgagctacagcgcctcccatgatgcactgacgcatctcgccaaccgcgccagttttgagaaacaactgcgtatcctgctgcaaacgtcaattgatgctatttccagcggcactatcgacatcagcgatggtacggttttgcgcctgaccgggcaggatacttccgtcgcccttaatgcctcactatttaacggcgatgggacgctggtgaatgccaccgatggtgtgacgttgacaggtgagcttaataccaaccttgaaactgacagcctgacttatctttccaacgtgacggttaatggcaatctgaccaatacgtccggtgcggttagcctgcaaaatggcgtcgctggcgatacgctgacggtaaacggtgattataccggcggcggtacgctactgctcgatagcgaattaaacggcgatgactcggtaagcgatcaattggtgatgaacggtaatactgctggcaacacaactgtggtggttaactccattacagggattggtgagccgacatcgacaggcattaaagtggttgatttcgcagctgatcccacgcagtttcaaaacaatgcgcagttcagtctggcaggcagcggctacgtcaatatgggagcgtatgactacacgctggtggaagataacaacgactggtatctgcgatcgcaagaagtaacgccgccatcgccacctgatccagacccgacttttgcggaaagaattccaaaaacaggtacgacatacatgaatcagaatctgctggtgacaaagcgcgacggtagcacagagcgcatcaatctcgacaaaatccatcgcgttctggattgggcggcagaaggactgcataacgtttcgatttcccaggttgaaaagcctacggccagtttgatgccgcctgcgctgtacgaccacgtggtgaaaatggtcgagatgggcaaatacgataatcatctgctggaagactacacggaagaagagttcaagcagatggacacctttatcgatcacgaccgtgatatgaccttctcttatgctgccgaaaagcagctggaaggcaaatatctggtacagaaccgcgtgaccggcgaaatctatgacctgcaggcactgctgcaaaaaggaaaaaccagaattgctggtagtgacttttgcaaaggatttgccgtcagcggggcagcggttctttgctccagtacggtggccgattatctgctgcaattcgcccgccaccttatctacagcaccagtatgccgccgctcaggcgcaggcattacgtgcgtcgctggcggtcattcgcagtgatgagggtgatgcacggcgcgaaaaactggcggcactcattacgcgttttcgtgccggagatatcgaccgtctgctggaggtgctgcatggcaacggttaataaacaagccattgcagcggcatttggtcgggcagccgcacactatgagcaacatgcagatctacagcgccagagcttgacgccttactggcaatgcttccacagcgtaaatacacccacgtactggacgcgggttgtggactctagaggaatccccggcagacgccgcatcggctttgctgttgcccaccatccgctgtttgtaatagtcggtttgcagccagatctacctgcgcctattccacgaggccagttgcataacaaactctttataggcttcgtcccgacactgcaggcgggggccgtcgcgaaaagtgtaattcacgcgcacgtcagcgtttcccctgatggattagacctggtcttttttgtcgtcaaccaatgggctggcgtcgtgttctgcttcgatctcttcagcaggaagcggggcaggttcagcgtctggcgtaacaaaggtttcggtagatactgccagcggctggccaattttcgtgacagacaggctttccagttgctcaaccagattcactttacccggtgcaaacaggttgataacggtggaaccgagtttaaagcgacccatttcctggcctttcagcagtgccacagaaccgtcgttttccccggcaggccaggtccagcgcttgatgataccttcggcggcggcgtaatggtgcccgcccagaccgtctcaatgctgccaacaatcgtcgctccgaccagaatctgcgccattgggccaaattcggtatcgaaaaggcaaatcacgcgttcgttacgggcaaacagattcggcacgttctga

SEQ ID NO: 127449 - DNA, 948 bp, Homo sapiens
aggatccccattcggcgctggcactgtatgatcagctttccaccatcgccccgacattaatcatcaattacgacgacaaaagctggcagtcgctgttaacgcagcttggcgaaattaccgggcatgagaaacaagcggcagagcggattgcgcagtttgataagcaactggcggcggcgaaagagcaaatcaaattaccgccgcagccggtcactgccattgtctatactgccgctgcacacagtgccaatctctggacgccagaatcagcacaagggcagatgctggaacaactcggctttacgctggcgaagttacccgcagggttaaatgccagccaaagtcagggtaaacgccatgacatcattcagcttggtggggaaaatctggctgcagggttaaatggcgagtcactattcctgttcgccggtgatcagaaagatgccgatgctatttatgctaatccgctgctcgcgcacctgcctgcagtacaaaacaagcaggtttatgcgctgggaaccgagacgttccgtctggattactacagcgccatgcaagtgctggataggcttaaggcgctgttttaagcattaactgtcggacgctgtcacctgcggcggcgtctggcgaaaatgtcgcaactccaccagcaccagcaataacaacacgccgataatcaacaaaccaaaaccgctcgcgcttgcggaagcaaccggtgtcatcatcgcgcccaaaccacccagcagcgccgcgcctatggcatcgcccgtcacgttctgcgccgtccacaaaccgttaatccgccctaacatcgcttccggggtttgcgtttgcagcattgtgtattgcagcaacgagctgaccgcactcaaccagccgaacagcgccagacaaaccacgcctaaaatccacatcggcatcaggccaaacagaccaatggcgaggaac

SEQ ID NO: 127450 - DNA, 318 bp, Homo sapiens
atgatccaggaaaaacggccgctaatggcgattaagatcgacaacatgcgcaacatggtgatgaaagtggcatggcaagccgatcagcatcagtcactgcgcaccagcgcggcgctggaaaaactgtactgtgcacgtaccgcaatggaagtcattgatgatgcgattcaaatcatgggcggtatgggctataccgatgaggcgcgcgtctcccgcttttggcgtgatgtccgttgtgaacgtatcggcggcggtacagacgaaattatgatttacgtagcaggtcggcagatcctgaaagactatcagaacaaataa

SEQ ID NO: 127451 - DNA, 1494 bp, Homo sapiens; identical to SEQ ID NO: 121500

SEQ ID NO: 127452 - DNA, 408 bp, Homo sapiens
ctaatcctcatacttggcggtgagatgatcgggcgtgtgcacttttatggcctgcacatgacagtaggaatggctattgcaggttaacaaattggtgcggggcaaccgtttcaggatgttaggaatgacccatttttcacagcaagataatttttcggtgaccagggtgaagtggcaggggctggtcatggtgacaaaggcgggggtcatgtagcgtgccttcaccccatctcgggccatggcgtccaggttgggggtgtccacgtcctgctcgtagttccagcggaactcgtcgaaggacaccaggagcagcttgttccgggagccctgactttgtaccggtgccccggccctgggagccaggagcgtgggcagagcactagtgaggaggacggtcgggcctctcat

SEQ ID NO: 127453 - DNA, 1650 bp, Homo sapiens
atggatgtgaggattatcattgtgctcaccgctggtttgctgataagcctgctgttgattgtccttttctcccgtcgcctgagcgccaatattgatatcatcaccgatggcctctcgactctggcacaaaatattcccactcgattaccacaattgcccggtgaaatggggcaaatcagtcagagtgttaataacctcgcccaggcactgcgtgaaacgcggacacttaacgatctgattattgaaaacgctgccgatggcgtcattgccattgaccgccagggtgatgtaaccaccatgaacccagcagcagaagttatcactggctatcaacgccatgaactggtagggcagccttactccagattgatgcaccgacgccgaaggcgctgctgtccgaaatcgaaaaattgctggcatcgccaccgtaaattgtggccggaccataccatcaacctggcgttggaaatccacggtcaggttgatcctgtgaccggcgtgtcgcaaaccatgccgaaagcgccgtggacaacgccggtggaggtgaaatatctgctggaagagaagctcggcattcgggtgatggtcgataatgactgcgtgatgctggcgctggcggagaaatggcaaaataattcgcaggaacgggatttctgcgtgatcaacgttgattacggcattggctcgtcgttcgtgattaacgagcaaatttatcgcggcagtttgtatgagacgaatcagtttatgtgggaagggatcggcgcaaaacaccgacagcggaatcgccgctacgccgtgctcctgcgtcagcgactagcaaaactcaacatcatccaggatacggatgtagccttggatgtgcccgtgcccaatgaagaggaagagcgcaacatgaaacattacgctgcgttgctaacgggccgcacctcctatttcctcaagggtgaggaaatgaagtccatgtacaccacctacaatccgcagaatgtggtggccaccgcccgtttcctgttccacaagaagaatctatactactccttctacacctcatcgcgaatcggtcgtccgcgtgccattcaattcgttgatgatgcgggtgtaatcctggaggagcatcaactggagaccaccttggcgggcactctcagtgtctatcagaatgccacgggcaagatctgcggtgtctggcgacgagttccacgtgattacacaggcatcctgcgcgacgatcgtctccatgttgtcctcctctggggcaacaaacagcaggccgagttggctctggccggaaagacaagctgtgaccgtctccgggagctgcatgtgtcagaggttttcaccgtcatcaccgaaacgcgcgaggcagctgcggtaaagctcatcagcgtggtcgtgaagcgattcacagatgtctgcctgttcatccgcgaatttaatctttgtagggacatcccggtcaccggtgaaaagaatcctttccgaccagtaaagaagtttgcccagcagcactttgaatgttcgattagaccccggtgcgtagcacgctgtcagcgaatgactttagtgcacccaaagcagtgtttgctcagccgttgctttgctcgccaagtcggcagccaaaacgagagcttagagagactcgcggaatag

SEQ ID NO: 127454 - DNA, 2655 bp, Homo sapiens; identical to SEQ ID NO: 121874

SEQ ID NO: 127455 - DNA, 1494 bp, Homo sapiens
atggtgcaatcgttgtttgccgactttgcgaaaatcttcccgggtcgtttcaccaacgtcaccaacggtgtgacgccgcgtcgctggctggcggtagcgaacccatcgctttcagccgtgctggacgaacacctgggccgtaactggcgcaccgaccttagcctgcttaatgagctgcaacaacactgtgatttcccaatggttaatcacgctgtgcatcaggcgaactcggagaacaaaaagcgtctggcagagtatatcgcccagcagctgaatgtggtggtgaatccaaaggcgttgttcgatgtacaaatcaaacgtattcacgaatacaaacgtcaattgatgaatgtgttgcatgtgattacccgctataaccgcatcaaggccgacccggatgcgaagtgggtaccgcgcgtgaatatttttggcgcgaaagtgatcaacaacgatccgcagattggcgataagctgaaagtcgtgttcatcccgaactacagcgttaccctggcgcagttgatcattccggcggcagatctgtctgaacagatttcgctgggcaggacggaagcttccggcaccagtaacatgaagtttgcgcttaacggtgcgctgactatcggtacgttggaacgtgcgaatgtcgagatgctggatcatgtcggtgctgacaatatcttatttttggttacacagcgggagagtgaagactgcgtcaaaaaaggcatcgaggttccacaaacccagcaaggggacattggcgcgaaagatatcccctcctggcggcggatatgcaaagttttactcaataacgattactggtgtcgggcattatcatttagccccacaaaatcgaagaactatcagcgttataacgaacggataaaaggaaaacgtcaggatttaacgcaatttctcgccagcttgccggaagatgatcgcatcaaagcgattaatgaaatccgcatggcgatccatcaggttagcccctttcgtgaagagccagtggattgcgttctgtgggttaaaaacagccaacttatgcctaatgattacaacccaaacaacgtggcaccacccgaaaaaaaactgctgcaaaaatccattgaaatagatggttttacccaacccattgtggtcacacatacggataaaaatgccatggaaatcgtggatggttttcaccgccatgaaattggtaaaggctcatcatcattaaaattacgcttaaaaggttatttgccggtgacctgtctggaaggtacgcgtaatcaacgcatcgccgcgactattcgtcataatcgcgctcgtggacgccatcaaatcaccgccatgtcggaaatcgtccgtgaacttagccagttgggatgggacgataataaaattggcaaagagctgggaatggacagcgacgaagtgctgcgcctgaagcaaattaacggcctgcaagcagtcgtatgccgaccgtcaatattcccgcgcctggacggttaa

SEQ ID NO: 127456 - DNA, 753 bp, Homo sapiens
atgcaactggcaggtcctggagtttttggccccccacgagatcgccacgtcgctataaccgtgctgcgtgaggcgctggcattgggcgtcaatcatattgataccagcgacttttatggtccgcacgtcaccaatcagattatccgcgaagcgctttatccttactctgacgacctgacaattgtcactaatattggttatttgccggtgacctgtctggaaggtacgcgtaatcaacgcatcgccgcgactattcgtcataatcgcgctcgtggacgccatcaaatcaccgccatgtcggaaatcgtccgtgaacttagccagttgggatgggacgataataaaattggcaaagagctgggaatggacagcgacgaagtgctgcgcctgaagcaaattaacggactgcaagagttgtttgccgaccgtcaatattcccgcgcctggacgctaaagctggcgcaagcgttcagctgctgccagcaacgtcgattccttcttggcaaaacagagactaatcagtttatgtgggaagggatcggcgcaaaacaccgacagcggaatcgccgctacgccgtgctcctgcgtcagccactggcaaaactcaacatcatccagggtttctgggaaaggggacagctcaaggctccactggcctcatccctggctgaagggagcctggaactttcagaggccacctccctggggtccctctgctgccccctgatgtacctgaagccgtcccaggcttga

SEQ ID NO: 127457 - DNA, 516 bp, Homo sapiens
atgacgctgtgccgggaaattcgtcgtttttctgacattccgatcgtgatggtgacggcaaaaatcgaagagatcgatcgcctgctggggctggagattggcgcagatgattatatctgtaagccgtacagcccacgggaagtggtagcgcgcgtcaaaaccattttgcgccgttgcaaaccgcagcggatgttgcagcaacaggatgctgaaagcccgttgattatcgacgaaggtcgttttcaggcttcatggcgcggtaaaatgcttgacctgacgcctgcggaatttcgtctgctgaaaacgctctctcacgaaccaggaaaagtgttctcccgcgagcaattgctcaatcatctttatgacgactaccgcgtagtaaccgaccgcaccatcgacagccacattaaaaacctgcgccgcaagctggaatctctcgacgccgaacagtcatttatccgcgccgtttatggcgtcggttaccgctgggaagccgacgcctgccgcatcgtttag

SEQ ID NO: 127458 - DNA, 2254 bp, Homo sapiens
atgtactggtatctgaaggctgccgctcaggggagcgtcagcgcttacgtcaacatcggttatatgtataaacacggacaaggcgttgagaaagattatcaggctgcctttgaatggtttacgaaagccgctgaatgcaatgacgccactgcctggtataacctggccattatgtatcactacggagaaggaagacctgtcgatctccgacaggctctcgacctgtatcgtaaagttcagtcatccggaaccagagatcgtcagcacttccggtgtgtagatcgggagatggaagtgacatttctcgcagaccagatttcccagcccgaccacttctccgctgtgataaaccccatgatgattgaggtcctggaaaacttcgcgccattcaagctgcgttttatcggtgatgtctgccagctcctgccacaagctttctttaatcacccgcataaagacgctgtcagattcttctttcaggctctcttcatagcgcatgcctacagttgggttggcggcgatcgtccggcggatgttatcgacggcattaaaacgctacgcgaaatcggcttcgataccttcaaactgaacggttgtgaagaactggggctaattgataactcccgcgcggtagatgcggcggttaacaccgtggcacaaattcgtgaagcttttggcaatcagattgagtttggtcttgatttccacggtcgcgtcagcgcgccgatggcgaaagtgctgattaaagaactggagccgtatcgcccgctgtttattgaggagccggtgctggcggaacaagccgaatactacccgaaactggcggcacaaacgcatattccactggcggcgggtgaacgcatgttctcacgcttcgattttaaacgcgtgctggagggaagtggtatttcgattctgcaaccggatctctcccacgcgggcggtattaccgaatgctacaaaatcgccggaatggcagaagcctatgacgtgacccttgcgccgcactgtccgctcggaccgattgcactggccggttggctgcatatcactttgttttctaataacccgaccttcaagaacaaagtatgggaattcattacaaaagcacaattagcagaacaggcgctccgcagcggtcacatagaagcgttaattaacatatgggaaaatgacaactactcacattatcgtccggaaaagagtgtctggaacctgtatttattggcacagttgccgcgtgagatggctttgaccttctggctgcgtatcaatgagaaaaagcatctgttcgcgggtgaggactattttctcagtatcctcggattggatgcgctaccaggtctgctgttggctttttcacatcgtccaaaagaaacatttccgttaattttaaattttggcgcaacagaactggcgctgcctgttgcccacgtctggcgacgtttcgcggcgcagcgtgatctggctcgccagtggattttacaatggctggaacatacggctagtgcacttatccctcttgtctttaccaaacccagcgataatagcgaagccgcattacttgccctgcgtttactgtacgaacagggacatggcgaattgctacaaaccgtggcaaaccgctggcagcgtacagatgtccaatggacatttacccggcacgcatttaaaaccgggcgtctggcactggaaagtttaggtctggggccgtatgaagcgcgagaacgtgccgatgtgttccgccgctttaatattcagatggtggaagagatggcaatggttgagaacgacaccaaagcccgcgcggcggtctataaacgcaccagcgcgatgttaaaattgataaaagatcaactcaatcagtacctgaaaccgttcggctacttttttgcgccggaactttcgaccagcaaccgggcaacgctcggtgggatgatcaataccgatgcatccggtcagggatcgctggtctatggcaaaacgtcagatcacgtacttggcgtacgcgcggtgttgttggggggcgatattctcgatacgcaacctttacccgtcgaattggcggaaacgctgggtaaatccaataccacaatcgggcgaatttataacacggtttatcaacgttgccgtcagcaacgccagttaattatcgacaacttccccaaacttaaccgctttcttaccggttacgatctgcgtcatgtctttaacgatgagatgaccgagttcgacctgacgcgcattctgattg

SEQ ID NO: 127459 - DNA, 917 bp, Homo sapiens
atggcgaatgtgctggagccggagtgggcgaaatcgctgaccctggcggtggcgctgtcgatggcagcaacgccgattctgctggtgatcctcaatcgccttgagcaatcttctactgaggaagcgcgtgaagccgatgagatcgacgaagaacagccgcgcgtgattatcgccggattcggtcgttttgggcagattaccggacgtttactgctctccagcggggtgaaaatggtggtactcgatcacgatccggaccatatcgaaaccttgcgtaaatttggtatgaaagtgttttatggcgatgccacgcggatggatttactggaatctgccggagcggcgaaagcggaagtgctgattaacgccatcgacgatccgcaaaccaacctgcaactgacagagatggcaggcgttgaaaagccggagcgtgaaaccttcgaaggtgcgctgaaaaccgggcgtctggcactggaaagtttaggtctggggccgtatgaagcgcgagaacgtgccgatgtgttccgccgctttaatattcagatggtggaagagatggcaatggttgagaacgacaccaaagcccgcgcggcggtctataaacgcaccagcgcgatgttaagtgagatcattaccgaggaccgcgaacatctgtcattaattcaacgacatggctggcagggaaccgaagaaggtaaacataccggcaacatggcggatgaaccggaaacgaaaccctcatcctaataaagagtgacgtagatcacactttacagctaactgtttggttttgtttccttctaatgcgtggaggcgagggaggagacgtggacctcgcccgagaatataccattttcctggaggatgggggtcagaccagggggcgaggggttacactttctgtctggggggcgacg

SEQ ID NO: 127460 - DNA, 428 bp, Homo sapiens
gtctgggcgatgattttgttcgcgccgccaatatcatcttgcactgtgaaggcaaagtggtggtttcgggaattggcaaatcgggccacattggtaagaaaatcgccgcaacgcttgccagtaccggcactccggctttttttgtccatccggcagaagcgctgcacggcgatctggggatgatcgaaagccgcgatgtgatgctgtttatctcttactccggtggcgcgaaggaactggatctgattattccgcgtctggaagataaatctatcgcgctgcggcaaaccgacgtcaccgctgggcctggcggcaaaagcggtgctggatatctccgtagaacgcgaagcctgcccgatgcaccttgcgccgacctccagcaccgtcaataccctgatgatgggtgacgcgctggcgatggcggtcat

SEQ ID NO: 127461 - DNA, 1434 bp, Homo sapiens
atgactgatgaagaatcgccgattgaaatcaaagataataatccgataagtaatggagagtatctaaccactgaagacgaaagccatgctgtgaaagtggatgacggtgtaactggatatataaataatgccagtgtgatgactagtggtgatggatcttatggtatttctgttgatagtcaaaacaaagtattatatataagcgatagcgatattaagacctctggaagcgtatctgacaaagaaaatggagggataacagccagcgcagtagtcagtgaatttggtggcaccatctttatgaatggtgataattcagtcgagtcggaacgcgagccttgcccgatgcactttgcgccgacctccagcaccgtcaataccctgatgatgggtgacgcgctggcgatggcggtcatgcaggcgcgcggatttaatgaagaagattttgcccgctcccacccagccggggcactgggcgctcgcttgctgaataaagtgcatcatctgatgcgccgtgacgatgccatcccacaggtggcgttaaccgccagcgtgatggatgcgatgctggaactcagccgcaccggtctggggctggtggcggtatgtgacgctcaacaacaggtacaaggcgtctttaccgacggcgatttacgtcgctggctggttggcggcggcgcactcaccacgccagtcaatgaagcgatgacggtcggcggcaccacgttgcaatcgcaaagtcgcgccatcgacgccaaagagatcctgatgaagcgcaaaatcactgccgcaccggtggtggatgaaaacggcaaatgcaccggcgcaataaaactggacctgcaggcatgcatcttgccctcccccccaattatgtcgcctaggttctgggatctgatcgacagtattcgccagcggcagagcaatatgagcgtgctggtcgccaccgcctatatggaagaggccgaacgcttcgactggctggtagcgatgaatgccggagaagtgctggcaactggcagcgccgaagagctacggcagcaaacgcaacaggctacgctggaagaagcatttataaatctgttaccgcaagcgcaacgccaggcgcatcaggcggtagtgatcccaccgtatcaacctgaaaacgcagagattgccatcgaagcgcgcgatctgaccatgcgttttggttccttcgttgccgttgatcacgttaatttccgcattccacgcggggagatttttggttttcttggttcgaacggctgcggtaaatccaccaccatgaaaatgctcaccggactgtgcccgccagcgaaggcaacgacgcgggtacaactgccccgacgacgtcggcgatccttcacccgggatagaaggaacgggcaaatacgaccagcgcgcagagcattgagcgccaacggggaggcttag

SEQ ID NO: 127462 - DNA, 2481 bp, Homo sapiens
ttattttttctcgacgacgggacatgcctgatacccgccgcccagcgatttcatcaactgaatgctttggatcacccggcggctgtccagcatcagtaatgacatctcttcggcaagcactggcaaccgggcttcggtggcctgtaagcggctggttaagccgcgctgataggcggcctcggcagcgcgctgggtaaagcgcgtggcttccacgcgttcagcctgcatttctcgctcgtcgttgagcgtttgcagacgcgtgccgttgacggcaacgtcacgcaccgcgttcagtactgactggttgtaacgttcaatcccgctgaaccgctgaaaatgagctacgttgaaggtctgctttccagcaatcagaaagatgtgctgatggaagagattgtcgccaactaccacgctaacaccaaagacgctgaactgcacagtgagggtacgggacctcccaggtttccccaagctgccgtctgggtggcctgacccctggtgggcagcggtgaccacccagtcctcgctgatgtggtagcccccgcagaagtggaagccagctttgtatttgctatcacggtaagttgcagcctcatagctgcttcgccagcgtaatgattcatcagcaaacagtgacgcgtcggcgtagttttgtatctccagcccgggtaaccagcgtaccggatgcccgagataagcctgaaatgtcgcaattgtccgcgcctgaaagccaataaaaccaatgatttggctaatgatcacacagtcccaggcagtaagaccgacgtcattcagatgctggcgcgatcggttgtcgataatagaaggcgagctagccagttggcgggcatattgcgtgatttgtgccaaccgatgattactttccctggtggaatcaggcccggggagcggcgtaagtcgcgccgaatagtagttacataaccgctggacgccgcaaacctgagcaaccgtcagggccgtcgacaagcgttcataagcggtgaaggtccttttgccggggggctttggtgccctccccaagaggcgtgtgtccatggacggggggacctggtagatgtcatgccccatcccggcaaaaagggggcacctggtaaatatcttgagaaagggcctccaggcccctgggggcacatggtacagatctgtggccgggctgggaaacgggtgatggggtgtctgcttcgagaaggtggatgtctgcttggctgggggagactggaactgagggctgggacccgggacttggtagaggccttgctgagccttgctgggagtgggcaccaggtagacgctgtctggctggggctggtaggtgttggggagcatgggcgtgtactgggaggccggaggcgctggggcatggaggccaggctgaggctgggccggggtggcgggagggccggggccaggccctgctggcttcttatcatacatgcccaccaagatcttgaggcggttcccaggcacgatgccctggcgcccatgcagcgagcagagccaccagccgtccaggccctgcgtgtcctgctccagcgccgtcagaaaacacgatgcagttcgattcgagcggcgattattgccgcaggtccggttgcaaatttcatttttgctatctttgcctactggctggtttttattattggtgtgcctggcgtacgtccggtggttggcgaaatagcagccaattcgataggtcactgggcgtttgagcctgataaagaagatccggtatcttcgctggggattcgtcctcgtgggccgcaaattgaacctgtactggaaaatgtgcagccaaactcggcggcaagcaaggcaggtttgcaagcaggcgacaggatcgttaaagtcgatggtcagcccgctccacttatattccagtttcactggcgcagagaattcgcacagcagcgcaggcaccggctggaagtagacattatcaaagacaaaggtctgttccgcctgagtgacgttcagcacggaattcaccggatgaccgcctttctgcaacgggatcactttgccttcgttatcatacagttcgatggcaaacggaatatgcagcggctgtttttctgcctgatccggcgtggctggcgtgcgctggctgatggtcagggtgtactgctcggtttccggattgtagtcgtctttgacggtcacaatcggtgtaccggactggctgtaccaacggcggaaatgggagagatcgacattcgacgcatcttccatcgcctgcacaaagtcgtcacaggtcgctgcactaccatcatgacgctcgaaataaagctgcatccctttctggaagttttcttcgccaagcagggtgtggatcatgcgaatcacttccgcgcccttctcgtaaacggtcagggtgtagaagttgttcatctcaatgaccatatccgggcggatcgggtgcgccatcgggctggcgtcttctgcaaactgcaatccgcgcat

SEQ ID NO: 127463 - DNA, 783 bp, Homo sapiens
atgcagatgctgagaaagcatctgcatctttcggtggtgttatttgaccagctcaggtgttacctgactcaccgcattggtgtagtaaggcgcaccccagcccggttccggccagaatgcaccatagccgtaatcccacaggttataaagagcgacacacatatctggctaaattctgtgtacgacgacatctcacagagagctccccttagtcgaaaactaagacgcacacattacccggctccaaacgccgtagcaacacgctctggacacatagacttctacaccagcgacaacatcgcgggagcaaatttcgagacccaactggccccagcacaggcagtttcaacagcccctggagatacgccaagcggccgccctacggtgcaaaatcagcgctatccccgtggaaatgcgcaattttcacggttgtctgacgatgatcgaaagcgttcacgggaaaaatttagtcgctatgtgccggaagatatcactaccttgctgccaatgacccacccgtcaaaatgccctggtttccagaagtgggatgtgtcatgtaatgccgtcaacaacatgatgaataacccctctattacctgccccacggtaaaggcgttgctggttgccctacggtccgatgatcaaatcagtgccgagctggtgcagatgcgcttgcttgccccagaacaatggggcatgccgctacatgtaacgttttgttctaaacccctcatccccgccgagcacgatggtccaactggcgacgaataccagaacccatga

SEQ ID NO: 127464 - DNA, 1141 bp, Homo sapiens
tgcgtcccaagcgcgatagtccaataaaattcttcgtgcggaaaaatcccgctagcctgcgcgcccccgatgacggtttgttatgggcttgcgggccaaatatggttattccggggaatgcgccactctcccgttgtctgcagatgatcgaaagcgtgcaagggcagaagtttagtcgctatgtgccggaagatatcactaccttgctgtcaatgacccagccgctcaaactgcgtggtttccagaagtgggatgtgttctgtaatgccgtcaacaacatgatgaataaccctatattacctgcccacggtaaaggcgttctggttgccctacgtccggtaccgggtatccgcgttgaacaagccctgacgctgtgtcgccctaaccgtaccggcgatatcatgaccattggcggtaatcggctggtgctgtttctctcattctgtcggattaacgatctggataccgcgttgaatcatattttcccattgcctactggcgacattttctcaaaccgtatggtctggtttgaagatgatcaaatcagtgccgagctggtgcagatgcgcttgcttgccccagaacaatggggcatgccgctgcctttaacgcaaagttctaaaccggtcatcaatgccgagcacgatggtcgccactggcgacgaataccagaacccatgcgactttggtcgataaaattggcgatgaaagcaccaccattacagtagcgccatttggcagcgaccaacggcgggatgtaaagctcgatttacgtcactgggcgtttgagcctgataaagaagatccggtatcttcgctggggattcgtcctcgtgggccgcaaattgaacctgtactggaaaatgtgcagccaaactcggcggcaagcaaggcaggtttgcaagcaggcgacaggatcgttaaagtcgatggtcagcccttaacgcagtgggtgacctttgtgatgcttgtccgggataacccgggtaaatccttagcgttagaaatcgaaaggcaggggagtcccttgtctttgacattaatcccggagagtaaaccgggtaatggtaaagcgattggttttgtcggtattgagccgaaagtcattcctttgccagatgagtatgacctgcaggactga

SEQ ID NO: 127465 - DNA, 846 bp, Homo sapiens
atgacgcggacgaagaagagaagcggaaaacagagaagccgagcgacgacaccacgaagaggaagccgcacaacaaacaagagcaaaaagaggaggacaggacgacaggagagacgacccgccgacgagaagaggaggaggggcggagcgggagacgggggaggagacccgccgaaaacggatccctccagaatgactaagccaggtctgggggaaatgaacccgatgcaattgcgcgaaaccacgcttgatccgaacactcgccgtctggtgcagttgactatcgatgatgaagacgatcagcgtactgacgcgatgatggatatgctgctggcgaagaaacgctcggaagatcgccgcaactggttgcaagagaaaggcgacatggcggagattgagtgcttcttcctcatgtctatatccccttttcaagcccgacagggcgccaacattggattgtttcgacgagggtcaagggtaccacgcaggcctctgcgcacaaaaagtcacttagtcgagctcacacagttcaaaagggggagccaagagaagcttctggaagggcaaaaaccggttcaaggttccccaattaagacgacttggcatcgactccaaagcgcccccaagtggaggctccaggccaaggtacaggaccctttgctgatgtgtccgtggggacagggactccaggccactgaggagatggcagcaactcccaatgcacagtggaggaaagtcaccactgaagatgtcccctcctgctccctagcccatcacccagtttttggttcattgattaaacatgtcctatgcagggggactgagttacaagccagaatgttgtag

SEQ ID NO: 127466 - DNA, 228 bp, Homo sapiens
gggggcgcaaagaagtcctgaagcatgtgcatcgcctgtggggatttgatgtgatgctcgaacagcaaaacgaagacggcagcatcgagttgctggaacgttgcccgccaagaatgggaaatctgtaaaaacaacaaaaaacccctcgtttgaggggtttgctctttaaacggaagggattatcgcccctgaatggctaaatcacccggcagatttttctgcatccgg

SEQ ID NO: 127467 - DNA, 211 bp, Homo sapiens
atcaaccaacaggcaccgctgattcctatctactatcagccgttaatcaaactgcttaaaccctacgttggcggttttccgctgcataatccccaggattatgtctccagcaaagagttgtatatcaaggcacattgacaactttattaccgtgggagcacgtacggcggcgccattcacgtcgatctacgggtacggacatagaattcgt

SEQ ID NO: 127468 - DNA, 495 bp, Homo sapiens
atgtctcatacaatccgtgataaacagaaactgaaagcgcgtgccagtaagattcagggccaggtcgtggcgctcaagaaaatgctcgacgagccgcacgaatgcgctgcagttttacaacagattgctgctatccgtggcgcggtaaacggtctgatgcgggaagtgattaaaggtcatctgacggaacacatcgttcaccagggggatgagctaaaacgtgaagaagatctggatgtcgttctgaagtcacgtgtaggatctacgtcggtagtcgtcgtccagctggtggttacgaaccccgtaagcaacgtggctatcagaaatgctaagcaccgtgaagatattgcctggaagccgcctgtgtcctggtacgtgctggacctgcaggtggatctggccccaccttccgccttccccgaaagtggttggggacttaacaaggtgttgaagccatttggtgcacccggcacaggaaaccttgcagtgttgtga

SEQ ID NO: 127469 - DNA, 620 bp, Homo sapiens
ccggcatggcggcgtttattccgagcaaagatgaagagcacaataaccaggtgctcacaaaagtaaaagcggataaatcgctggaagccaataacggtctcgatggcacatggatcgctcacccaggccttgcggacacggcaatggcggtattcagcgacattctcggctcccgtaaaaatcagcttgaagtgatgcgcgaacaagacgcgccgattactgccgatcagctgctggcaccttgtgatggtgaacgcaccgaagaaggtatgcgcgccaacattcgcgtggctgtgcagtacatcgaagcgtggatctctggcaacggctgtgtgccgacctatggcctgatggacaatgcgactaaggttgaaatttccagtgcctcgctatgccagtggatccatcatcaaaaaacgttgagcaatggcaaaccggtgaccaaagccttgttccgccagatgctgggcgaagagatgaaagtcattgccagcgaactgggcgaagaacgtttctcccaggggcgttttgacgatgccgcacgcttgatggaacagatcaccacttccgatgagttaattgatttcctgaccctgccaggctaccgcctgttagcgtaa

SEQ ID NO: 127470 - DNA, 1600 bp, Homo sapiens
ggccaagcttgccatgcctccagttcgcctttaaaaggatcaaggggttcaccgcccaattttgaaattctttatggccccattttcgaagattcactggccccagattgaccaaaagtgatcgccgggcaaaattaccctgcgtgatgcggttaccggccccatcagttcccccaatgaagcaggcaaaatttaccagctcaagcccaatccagcggttttgatttgtcgggtacgcggtctgcacttgccggaaaaacatgtcacctggcgtggtgaggcaatccccggcagcctgtttgattttgcgctctatttcttccacaactatcaggcactgttggcaaagggcagtggtccctatttctatctgccgaaaacccagtcctggcaggaagcggcctggtggagcgaagtcttcagctatgcagaagatcgctttaatctgccgcgcggcaccatcaaggcgacgttgctgattgaaacgctgcccgccgtgttccagatggatgaaatccttcacgcgctgcgtgaccatattgttggtctgaactgcggtcgttgggattacatcttcagctatatcaaaacgttgaaaaactatcccgatcgcgtcctgccagacagacaggcagtgacgatggataaaccattcctgaatgcttactcacgcctgttgattaaaacctgccataaacgcggtgcttttgcgatgggcggcatggcggcgtttattccgagcaaagatgaagagcacaataaccaggtgctcaacaaagtaaaagcggataaatcgctggaagccaataacggtcacgatggcacatggatcgctcacccaggccttgcggacacggcaatggcggtattcaacgacattctcggctcccggaaaaatcagcttgaagtgatgcgcgaacaacacgcgccgattactgccgatcagctgctggcaccttgtgatggtgaacgcaccgaaagaaaattcaatgcattaatggaaagtgaaaaaggacagagccagaacttgtggaaatttgccgtttactcaggacttcgtcacggggaactggcagctctggcgtgggaggatgtggatctcgaaaagggaatagtgaatgtcagaagaaacctgacgatacttgatatgttcggtcccccaaaaacaaatgccgggatccgaacagtaacactactgcagcctgctcttgaagcactgaaggagcaatacaaactgaccgggcatcatcgcaaaagcgaaatcaccttttatcatcgggagtacggcagaaccgaaaagcaaaaactgcattttgttttcatgcccagggtgtgtaacggaaaacaaaaaccttattactcggtaagcagtttgggggcaaggtggaatgcagcagtaaaacgtgctggtattcgccgccgtaatccgtaccatacgcggcatacttttgcctgctggctgttgacggcaggagcgaacccggcatttatagccagccaaatggggcatgagactgcgcagatggtgtatgaaatctacgggatgtggattgatgacatgagcgacgaacagatagccatgttgaatgcgcgggttatg

SEQ ID NO: 127471 - DNA, 280 bp, Homo sapiens
agcggctgagcttgggcagtcaatcggtgggatattcccttctgatgaaatagtcaaaggctctattagcggatatgtcttcgagcaatttgaaatcgcctgttacacctcactattagcagcagcaaaaaatgccggtgatacagcttcaattccaaccatcgaagcgattttaaatgaggaaaagcaaatggccgactggctgattcagaatattccgcaaacaactgagaaatttttaattcgctctgaaactgatggcgtagaagcgaagaaataa

SEQ ID NO: 127472 - DNA, 1694 bp, Homo sapiens
aggggcacctctggatccgtatcgacctgagccagtcggcagtgagtcacagtgtgaaggaactggaaaatcatactggtgttcgcctgctggacagaaccacgcgtgaagtggtgcttacagatgcagggcagcagctggctttgcgtcttgagcgactgctggatgaactgaacagcacgttgcgcgataccgggcgtatggggcaacaactgagcggaaaagttcgggtcgctgccagccagaccatttccgcgcatcttattccgcaatgcattgctgaaagccatcgccgctatccagatattcagtttgtcctgcacgatcgtccgcagcagtgggtaatggaaagtattcgccagggagatgtcgattttggcatcgtcatcgatccaggcccagtgggcgatctgcaatgtgaagcgattctttccgagcctttctttctgctttgccatcgcgatagcgctttggccgtggaagattatgtacctggcgctaccattgcctgaaggtagcccactggtggtaaagcgcattacgccggttgttgaacgccagttgatgctggtgcgcaggaagaaccgttcactttccaccgccgctgaagctttatgggacgtggtacgagaccagggcaatgcgctaatggccgctgcataggtagcgtcacggtcaaactcgtactcgttccagttggtaagagtgaatttctcgctgcccagcataaagttgtaacctgcaacccagccggcgacatagccgttgtcgccagtgtaataggtttgatctgtataacgcttagcaaagtacggtttgaagccccaaccgctgccggtgaaaagccagctgcagcggaactctaatcctgggttgcgcgtttgataacgtaaggagaatctctgtctattcgccaaccgcgaaaaccagcattgaatcggtggtactgtagataaggtcgctatgaggaatgaacgtttcccaggtaatgttgtgggtcgcaatatgcacttcagtaattgcaggcgcggtaccgccatcgccacatacaggagtgacataacaaacatggcaatccctgccacagaaccgacgattttcagcgatttcataccgcgtgaagcaacccacataaagaagataaacagcaccagcgttaacccctgtaacgctacgactgaatattctttgattagcgaaccgtcgcctttcatcgcccaaccgagcgcaatcagaattgcctggggtttttgtgccagatagggaatatgcaccacccagtaggtccacgcggcgagataagccagtccgggtcccatcgtgtgtttaatccaggtactgaccccgcccttcccatctttgaaggtcgagcctaactgaccaacaattagcgcataaggtgtgaaatagagtgcaaagataaacacccatgaaaaaacaaccaccagcccctggttggcatagttattaacaacgttgccaaaaccccagacagtgataaaagacatcagcgcaatgttgtaccatcgcaactgtttttcctgaacattcccagccatagacaaatccttcgccaaaattaaaggggcatcggtaaaacgagggattatgcgcggcaaataagaagtgcggaaatgacctgcaaacattgcacataccacagttataaacgccgtcaatacactatttttcat

SEQ ID NO: 127473 - DNA, 646 bp, Homo sapiens
gggcaacaactgagcggaaaaagttcgggtcgctgccagccagaccatttccgcgcatcttattccgcaatgcattgctgaaagccatcgccgctatccagatattcagtttgtcctgcacgatcgtccgcagcagtgggtaatggaaagtattcgccagggagatgtcgattttggcatcgtcatcgatccaggcccagtgggcgatctgcaatgtgaagcgattctttccgagcctttctttctgctttgccatcgcgatagcgctttggccgggggggattatgtaccctggcaggcattacagggagcgaaattggtgttgcaggattacgcgtcaggcagccgaccgctgattgacgcagcgctggcgcgcaatggtattcaggcgaatattgtgcaggagattggacatccggcgacgctgttcccgatggtagccgcaggcatcggcatcagtattcttcccgcactggcgctaccattgcctgaaggtagcccactggtggtaaagcgcattacgccggttgttgaacgccagttgatgctggtgcgcaggaagaaccgttcactttccaccgccgctgaagctttatgggacgtggtacgagaccagggcaatgcgctaatggcttgggcgggaagg

SEQ ID NO: 127474 - DNA, 1071 bp, Homo sapiens
atggtccttcggaatggagatgggggtgaagagagccctcagaatgctgctgcgtaccagatgacagaaaggcttgacgaattttctaaacagaaaaatgaaaaggtgttccaggatgtcctcactcgtcttgtaggcatcaagaccctttgcagcagagatggctggaaccttcttgtttcgctaggaaaggaggacctgcagacacaggtgcacgctctcctgactctgtgccttcctcactcagcagagaatttgaatgaatatgttgaagcattaattaccttgaaacaaaaaattatcaatacagacaagcagtctggggatctgttcccgatggtagccgcaggcatcggcatcagtattcttcccgcactggcgctaccattgcctgaaggtagcccactggtggtaaagcgcattacgccggttgttgaacgccagttgatgctggtgcgcaggaagaaccgttcactttccaccgccgctgaagctttatgggacgtgtgcaactgcgccattcagcccttctttaccgccattacccgctgcataggtagcgtcacggtcaaactcaaaacccagaagtcaccccaagacattgagagagcagtggcgagttgggagcggagactctgggtgacctacagagaaggcagctgtcggacaggacattttcttcacaagacttccaaaggccacacccagaatgacttccacgggaagaagaaactagaagctaaggtgaagaagctgcaagagggaaaatttccagaagcgacattcctgttgcagagaagagatattcacttgaggaccttaatatattgcgtgaccgagggcacgggtcataggagagccacagcacaaaggtgcagtggacacaattttgtaataggagtcgttcaggtacctgtagaggaactggcacaggatgtgcagggaaaggaggaagacagccacacatccaggaagcagcgctggctgatccccagataccatgatcacaccgtcccagaaaatgaatgtgtcaaagctctaaaagctctaaaagaatgcggaatgggatga

SEQ ID NO: 127475 - DNA, 384 bp, Homo sapiens
gatgttgatcgtaaatacagcctggcggaactgatccacacctggtcagatttggcgggcttatcttacgacggttacgatccaacccgttcagtggtgaatccgcagttcaaagaaactacccgctggattggtaacccgtataagaaaaacgcactgatcgattacgacacactgccctatggcgatcagatcgcggcggtaggctggataaggcgtttacgccacatccggcaatacaactgccgcaatgtttacatcgaactcccctcaggccacacttttcaggtggccttttttaataatgccagttactgtgttcccgtctacatacctaagggaataacatgtatcacgacgtcagctatctgcgctcccgcctga

SEQ ID NO: 127476 - DNA, 1922 bp, Homo sapiens
gcatccagaatttgctcctccatccacggggactgagagccattactattgctgtatttggtaagcaaaatacgtacatcaggctcgaaccctttaagatcaacgttcttgagcagatcacgaagcaccatcgaaaaactgcagtgcggagggattttgccgatttcggaaccaccatcaaacaggattttcgcctgctggggcaaaccagcgtggaccgcttgctgcaactctctcagggccaggcggtgaagggcaatcagctgttgcccgtctcactggtgaaaagaaaaaccaccctggcgcccaatacgcaaaccgcctctccccgcgcgttggccgattcattaatgcagctggcacgacaggtttcccgactggaaagcgggcaggattttgccgatttcggaaccaccatcaaacaggattttcgcctgctggggcaaaccagcgtggaccgcttgctgcaactctctcagggccaggcggtgaagggcaatcagctgttgcccgtctcactggtgaaaagaaaaaccaccctggcgcccaatacgcaaaccgcctctccccgcgcgttggccgattcattaatgcagctggcacgacaggtttcccgactggaaagcgggcatgaattctgttccaaactggaccaccattcaccctatctccgggctattcttttgatttataagggattttgccgatttcgtaaccaccatcaaacaggtttttcgcttgctggggcaaaccagcgtggaccgcttgctgcaactctctcagggccaggcggtgaagggcaatcagctgttgcccgtctcactggtgaaaagaaaaaccaccctggcgcccaatacgcaaaccgcctctccccgcgcgttggccgattcattaatgcagctggcacgacaggtttcccgactggaaagcgggcagtgagcgcaacgcaattaatgtgtttggacaaactggtgtttgtttttttcgacctctttgataagggcccattaaaagctggaggatgcattaagaccagggcttcaggttttcttctgttatttaaccggagaaagtggctccaagtagcgaagcgagcaggactgggcggcggccaaagcggtcggacagtgctccgagaacgggtgcgcatagaaattgcatcaacgcatatagcgctagcagcacgccatacccctggcgatgctgtcggaatggcgatatccccaagaggcccggcagtccggcataaccaagcctatgcctcagcatccagggtgacgctatttcagcgcggcgaggacgggggaattgacgaggggttgttgtatcgtgggccgtgtacctggaattggaggcaagggttggaatacgggaataccgggcttcttggggatatggtcagttcggggagcttcaccggtcgatttggggtgtggttagcgatatatgcgttgatgcatatctatgggcacgcgttctgggagcactgtccggcagctttggcggcagcccagtcatgctcggttcggtactggagatattatcggaaacgcgatcatggcgaccacacccgtcctgtggatctacccactagtcaattccccatcacacaggcgttaggtcgaagagtatctggtgtcatagagattgcgtatgggagtcgcggtcgtagagctgctgcacttacagaaagtgattatcgtgttctggttggcgagctggatgatgagcagatggctgcattatccagattgggtaacgattatcgcccaacaagtgcttatgaacgtggtcagcgttatgcaagccgattgcagaatgaatttgctgcaaatatttctgcgctggctgatgcgcaccatatttcacgtgaactatatgcccggtcaggtgaatgcacttcaaaaagcctttacagataa

SEQ ID NO: 127477 - DNA, 1631 bp, Homo sapiens
ggttggaaggtttcagggattttgcaataacgccagaagggaaggcaacaagtcctttcacatggcagcagaagatagaagttcaaagtgaagtggggaaaatccttaataaattatcagatctcctgagaattcactatcataagaacagcagggattttgccgatttcggaaccaccatcaaacaggattttcgcctgctggggcaaaccagcgtggaccgcttgctgcaactctctcagggccaggcggtgaagggcaatcagctgttgcccgtctcactggtgaaaagaaaaaccaccctggcgcccaatacgcaaaccgcctctccccgcgcgttggccgattcattaatgcagctggcacgacaggtttcccgactggaaagcgggcaggattttgccgatttcggaaccaccatcaaacaggattttcgcctgctggggcaaaccagcgtggaccgcttgctgcaactctctcagggccaggcggtgaagggcaatcagctgttgcccgtctcactggtgaaaagaaaaaccaccctggcgcccaatacgcaaaccgcctctccccgcgcgttggccgattcattaatgcagctggcacgacaggtttcccgactggaaagcgggcaggattttgccgatttcggaaccaccatcaaacaggattttcgcctgctggggcaaaccagcgtggaccgcttgctgcaactctctcagggccaggcggtgaagggcaatcagctgttgcccgtctcactggtgaaaagaaaaaccaccctggcgcccaatacgcaaaccgcctctccccgcgcgttggccgattcattaatgcagctggcacgacaggtttcccgactggaaagcgggcactatgaccatgattacgaattcgagctcggtacccgcttccgggctgtcatcattaaactgtgcaatggcgatagccttcgtcatttcatgaccagcgtttatgcactggttaagtgtttccatgagggggatcctctacataagactgggtgtcagcacctaatccctaaacagcagcaaaacgaaaaataccaagtgcctcaattcgatcaatcaacgattaaaaatattgagtctgcaaaaggacttgatgtgtgggacagctggccgctgcaaaacgctgacggaacagtagctgaatacaacggctatcacgttgagatgctcttgcgggaagccggaaaggcgggattttgccgatttcggaaccaccatcaaacaggattttcgcctgctggggcaaaccagcgtggaccgcttgctgcaactctctcagggccaggcggtgaagggcaatcagctgttgcccgtctcactggtgaaaagaaaaaccaccctggcgcccaatacgcaaaccgcctctccccgcgcgttggccgattcattaatgcagctggcacgacaggaaacagctatgaccatgattacgaattcgagctcggtacccatcagcgccttggtgccgtcgcgcggatagtcggcgacgacctgctgaacgagcttcggcgcgatgtcgtcgatgcgcgtgccggtgacgtcgaccagcacgcccatgctgagaaaggcgacttccgggcgcggatggggatcctctag

SEQ ID NO: 127478 - DNA, 1398 bp, Homo sapiens
atgatatcaggacaagagagctctcagagctgtgagacatttttagaaatagcaaacaaaacttggtcccgtttctcctcgcagtttgcagcagttggaaaaaggctttcatggggcagttactacagggattttgccgatttcgacaccaccatcaaacaggattttcgcctgctggggcaaaccagcgtggaccgcttgctgcaactctctcagggccaggcggtgaagggcaatcagctgttgcccgtctcactggtgaaaagaaaaaccaccctggcgcccaatacgcaaaccgcctctccccgcgcgttggccgattcattaatgcagctggcacgacaggtttcccgactggaaagcgggcaagttcttttgattcataagggattttgccgatttcggaaccaccatcaaacaggattttcgcctgctggggcaaaccagcgtggaccgcttgctgcaactctctcagggccaggcggtgaagggcaatcagctgttgcccgtctcactggtgaaaagaaaaaccaccctggcgcccaatacgcaaaccgcctctccccgcgcgttggccgattcattaatgcagctggcacgacaggtttcccgactggaaagcgggcatttaatgatgacagcccggaagcgaggaaaataacccggcgctggagaataggtgaagcagcggatttagttggggtttcttctcaggctatcagagatgccgagaaagcagggcgactaccgcacccggatatggaaattcgaggacgggttgagcaacgtgttggttatacaattgaacaaattaatcatatgcgtgatgtgtttggtacgcgattgcgacgtgctgaagacgtatttccaccggtgatcggggttgctgcccataaaggtggcgtttacaaaacctcagtttctgttcatcttgctcaggatctggctctgaaggggctacgtgttttgctcgtggaaggtaacgacccccagggaacagcctcaatgtatcacggatgggtaccagatcttcatattcatgcagaagacactctcctgcctttctatcttggggaaaaggacgatgtcacttatgcaataaagcccacttgctggccggggcttgacattattccttcctgtctggctctgcaccgtattgaaactgagttaatgggcaaatttgatgaaggtaaactgcccaccgatccacacctgatgctccgactggccattgaaactgttgctcatgactatgatgtcatagttattgacagcgcgcctaacctgggtatcggcacgattaggggatcctctagagtcggaggcaggcatgcccaaacagagagcctaaatcatgagtgtactcccattcacaattgcttccaagagaattaa

SEQ ID NO: 127479 - DNA, 1992 bp, Homo sapiens
atgaattccgtgtatattccgacgtccaaccccgggacgcagaaaaacggttaccctaggcgagagaatcttttatttaactgggcgttaccgtcggcgccgccatggaaacttcctgcggtaaagaacggccagaacgcttcagcagagcgcttagcaatcgggtcggcagagattagcgaacggacgccctcggtacccttgcagttagataatgattccgctgtggagcaggctactggaacccgctgctcacttcacacacgggattttgccgatttcggaaccaccatcaaacaggattttcgcctgctggggcaaaccagcgtggaccgcttgctgcaactctctcagggccaggcggtgaagggcaatcagctgttgcccgtctcactggtgaaaagaaaaaccaccctggcgcccaatacgcaaaccgcctctccccgcgcgttggccgattcattaatgcagctggcacgacaggtttcccgactggaaagcgggcaggattttgccgatttcggaaccaccatcaaacaggattttcgcctgctggggcaaaccagcgtggaccgcttgctgcaactctctcagggccaggcggtgaagggcaatcagctgttgcccgtctcactggtgaaaagaaaaaccaccctggcgcccaatacgcaaaccgcctctccccgcgcgttggccgattcattaatgcagctggcacgacaggtttcccgactggaaagcgggcaggattttgccgatttcggaaccaccatcaaacaggattttcgcctgctgggacaaaccagcgtggaccgcttgctgcaactctctcagggccaggcggtgaagggcaatcagctgttgcccgtctcactggtgaaaagaaaaaccaccctggcgcccaatacgcaaaccgcctctccccgcgcgttggccgattcattaatgcagctggcacgacaggtttcccgactggaaagcgggcaactgaagcacaaagaagttgaatccccaaatagaccaataacaagttctgaaattcaggtgctaataaagagcttgccaatcaaaaaaagcccaggcccagatggatttacagctgaattttacgagaggtacaaagaggagctggtaccatttcttctgaaactatttcaaacaattgaacaggagagactactccctaactcattttatgaggccagcatcatcttgacatcaaaacctagcagagatgcaacaaaaaaagataacttcaggccgacatccctgatgaacatttatgcaaaaatcctcaataaaataggacaaactgaatccagtagcacatcaaaaagcttatttagcacaatcaagtcagtgtcatccccagaatgcaaggctggttcaacatacgcaaatcaggattttgccgatttcggaaccaccatcaaacaggattttcgcctgctggggcaaaccagcgtggaccgcttgctgcaactctctcagggccaggcggtgaagggcaatcagctgttgcccgtctcactggtgaaaagaaaaaccaccctggcgcccaatacgcaaaccgcctctccccgcgcgttggccgattcattaatgcagctggcacgacaggtttcccgactggaaagcgggcaagagactacgccttggtctccgttttctgatcccgtgttggccttcgactacaaggtatttatggcctttgtctacaacgtcgtgagggtctctcagcgtatggttgtcgccggatgtataagtgccttcaacgataaactgctgaacgatctgatatgttttcccgtcgccccggtgtccagtaaacagatttttccgtcagatgtaaaggttgcagaaccggaccattcttgcgtctcatcttacaggatcggatcgatggcgccgaacttaacgctgtctgaaatgccacggcataactattttcccgctggaaacagcgttgaccatgataacgaattcgagctc

SEQ ID NO: 127480 - DNA, 1473 bp, Homo sapiens
atgaacatgaacatcaaaaaaattgtaaaacaagccacagttctgacttttacgactgcacttctggcaggaggagcgactcaagccttcgcgaaagaaaataaccaaaaagcatacaaagaaacgtacggcgtctctcatattacacgccatgatatgctgcagatccctaaacagcagcaaaacgaaaaataccaagtgcctcaattcgatcaatcaacgattaaaaatattgagtctgcaaaaggacttgatgtgtgggacagctggccgctgcaaaacgctgacggaacagtagctgaatacaacggctatcacgttgtgtttgctcttgcgggaagcccgaaagacgctgatgacacatcaatctacatgttttatcaaaaggtcggcgacaactcaatcgacagctggaaaaacgcgggccgtgggggatcctctagagtcgacctgggggcaaaaccagcgtggaccgctgcttgcaactctctcaggccaggcgtgaactcttgttcaaacttggaacaacactcaaccctatctcgggctattcttttgatttataaggatttttgccgatttcggaaccaccatcaaacaggattttcgccggctggggcaaaccagcgtggaccgcttgctgcaactctctcagggccaggcggtgaagggcaatcagctgttgcccgtctcactggtgaaaagaaaaaccaccctggcgcccaatacgcaaaccgcctctccccgcgcgttggccgattcattaatgcagctggcacgacaggtttcccgactggaaagcgggcaacacccgcgttcggtcgaagagtatctggtgtcatagaaattgccgatgggagtcgccgtcgtaaagctgctgcacttaccgaaagtgattatcgtgttctggttggcgagctggatgatgagcagatggctgcattatccagattgggtaacgattatcgcccaacaagtgcttatgaacgtggtcagcgttatgcaagccgattgcagaatgaatttgctggaaatatttctgcgctggctgatgcggaaaatatttcacgtaagattattacccgctgtatcaacaccgccaaattgcctaaatcagttgttgctcttttttctcaccccggtgaactatctgcccggtcaggtgatgcacttcaaaaagcctttacagataaagaggaattacttaagcagcaggcatctaaccttcatgagcagaaaaaagctggggtgatatttgaagctgaagaagttatcactcttttaacttctgtgcttaaaacgtcatctgcatcaagaactagtttaagctcacgacatcagtttgctcctggagcgacagtattgtataagggcgataaaatggtgcttaacctggacaggtctcgtgttccaactgagtgtatagagaaaattgaggccattcttaaggaacttgaaaagccagcaccctga

SEQ ID NO: 127481 - DNA, 1519 bp, Homo sapiens
ggattttgccgatttcggaaccaccatcaaacaggattttcgcctgctggggcaaaccagcgtggaccgcttgctgcaactctctcagggccaggcggtgaagggcaatcagctgttgcccgtctcactggtgaaaagaaaaaccaccctggcgcccaatacgcaaaccgcctctccccgcgcgttggccgattcattaatgcagctggcacgacaggtttcccgactggaaagcgggcaggattgtgccgatttcggaaccaccatcaaacaggattttcgcctgctggggcaaaccagcgtggaccgcttgttgcaactctatcaggtccaggcggtgaagggcaatcagctgttgcctgtctcactggtgaaaagaaaaaccaccctggcgcccaatacgcaaaccgcctctccccgcgcgttggctgattcattaatgcagctggcacgacaggtttcccgactggaaagcgggcaacttcctaggaatccagagacccccaagtggggagcaactggatttagcaattgccggattttgccgatttcggaaccacccatcaaacaggattttcgcctgctggggcaaaccagcgtggaccgcttgctgcaactctctcagggccaggcggtgaagggcaatcagctgttgcccgtctcactggtgaaaagaaaaaccaccctggcgcccaatacgcaaaccgcctctccccgcgcgttggccgattcattaatgcagctggcacgacaggtttcccgactggaaagcgggcaggattttgccgatttcggaaccaccatcaaacaggattttcgcctgctggggcaaaccagcgtggaccgcttgctgcaactctctcagggccaggcggtgaagggcaatcagctgttgcccgtctcactggtgaaaagaaaaaccaccctggcgcccaatacgcaaaccgcctctccccgcgcgttggccgattcattaatgcagctggcacgacaggtttcccgactggaaagcgggcaggattttgccgatttcggaaccaccatcaaacaggattttcgcctgctggggcaaaccagcgtggaccgcttgctgcaactctctcagggccaggcggtgaagggcaatcagctgttgcccgtctcactggtgaaaagaaaaaccaccctggcgcccaatacgcaaaccgcctctccccgcgcgttggccgattcattaatgcagctggcacgacaggtttcccgactggaaagcgggcaggattttgccgatttcggaaccaccatcaaacaggattttcgcctgctggggcaaaccagcgtggaccgcttgctgcaactctctcagggccaggcggtgaagggcaatcagctgttgcccgtctcactggaaacagctatgaccatgattacgaattcgagctcggtacccatccccgagtccttcaatgctatcattccctttgatattggaccatatgcagatttccgagcccctaaatgcgaagtagtgatcagataa

SEQ ID NO: 127482 - DNA, 1233 bp, Homo sapiens; identical to SEQ ID NO: 126468

SEQ ID NO: 127483 - DNA, 1695 bp, Homo sapiens
  misc_feature (1)...(1695): n = a,t,c or g
ggggccatcgccctgatagaaggtttttggccctttggacgttggagtccccgttctttaatagtggactcttgttccaaactggaacaacactcaaccctatctcgggctattcttttgatttataagggattttgccgatttcggaaccaccatcaaacaggattttcgcctgctggggcaaaccagcgtggaccgcttgctgcaactctctcagggccaggcggtgaagggcaatcagctgttgcccgtctcactggtgaaaagaaaaaccaccctggcgcccaatacgcaaaccgcctctccccgcgcgttggccgattcattaatgcagctggcacgacaggtttcccgactggaaagcgggcagtgagcgcaacgcaattaatgggattttgccgatttcggaaccaccatcaaacaggattttcgcctgctggggcaaaccagcgtggaccgcttgctgcaactctctcagggccaggcggtgaagggcaatcagctgttgcccgtctcactggtgaaaagaaaaaccaccctggcgcccaatacgcaaaccgcctctccccgcgcgttggccgattcattaatgcagctggcacgacaggtttcccgactggaaagcgggcagtgagcgcaacgcaattaattgacgcggccgaacctcgtcgctttcgtattgcctctcgtgtgatttcggcagcgttcggtcgcgtttccacctacggtgccgaatgcatgtgtatcagtccgctcaagagaacgggattttgccgatttcggaaccaccatcaaacaggattttcgcctgctggggcaaaccagcgtggaccgcttgctgcaactctctcagggccaggcggtgaagggcaatcagctgttgcccgtctcactggtgaaaagaaaaaccaccctggcgcccaatacgcaaaccgcctctccccgcgcgttggccgattcattaatgcagctggcacgacaggtttcccgactggaaagcgggcagtgagcgcaacgcaattaatgccgaaaacaccggttatcaatcccaagaaagtaaaaaatagcccgcgaatcgtccagtcaaacgacctcactgaggcggcatatagtctctcccgggatcaaaaaggtatgctgtatttgttcgttgaccagatcagaaaatctgatggcaccctacaggaacatgacggtatctgcgagatccatgttgctaaatatgctgaaatattcggattgacctctgcggaagccagtaaggatatacggcaggcattgaagagtttcgcggggaaggaagtggttttttatcgccctgaagaggatgccggcgatgaaaaaggctatgaatcttttccttggtttatcaaacgtgcgcacagtccatccagagggctttacagtgtacatatcaacccatatctcattcccttctttatcggancccggtttacgcagtttcggcttagtgaaacaaaagaaatcaccaatccgtatgccatgcgtttatacgaatccctgtgtcagtatcgtaagccggatggctcaggcatcgtctctctgaaaatcgactggatcatagagcgttaccagctgcctcaaagttaccagcgtatgcctgacttccgccgccgcttcctgcaggtctgtgttaatgagatcaacagcagaactccaatgcgcctctcatag

SEQ ID NO: 127484 - DNA, 1563 bp, Homo sapiens; identical to SEQ ID NO: 119764

SEQ ID NO: 127485 - DNA, 2346 bp, Homo sapiens
ttaaacgtggccaatatggacaacttcttcgcccccgttttcaccatgggcaaatattatacgcaaggcgacaaggtgctgatgccgctggcgattcaggttcatcatgccgtttgtgatggcttccatgtcggcagaatgtgcccgctttccagtcgggaaacctgtcgtgccagctgcattaatgaatcggccaacgcgcggggagaggcggtttgcgtattgggcgccagggtggtttttcttttcaccagtgagacgggcaacagctgattgcccttcaccgcctggccctgagagagttgcagcaagcggtccacgctggtttgccccagcaggcgaaaatcctgtttgatggtggttccgaaatcggcaaaatcccttataaatcaaaagaatagcccgagaatagggttgagtgttgttccagtttggaacaagagtccatacgaaaacttttcggacttgactgccctgtttggtcgactctaggagcatcccctgataaaaagggaaaagctctcccataagagtggagtaaggagaagtgtaaaggcaccaagttatgagaaatctcatccaggcatccactgtgtctggattgcaagaagggaagctggtggtgggatgtaaatgtgtggggtttctttgggggatgctgaaccgtgaggatgctgatgcatcctccaggacaggcttggtgtcccatctggggacaagctggagtggggctggaatggaggccacgaagccagccaggtggccaggggaatattccagaagggaaatggcagagccccaagcaggatggacattaatcgtgccgatacccaggttaggcgcgctgtcaataactatgacatcatagtcatgagcaacagtttcaatggccagtcggagcatcaggtgtggatcggtgggcagtttaccttcatcaaatttgcccattaactcagtttcaatacggtgcagagccagacaggaaggaataatgtcaagccccggccagcaagtgggctttattgcataagtgacatcgtccttttccccaagatagaaaggcaggagagtgtcttctgcatgaatatgaagatctggtacccatccgtgatacattgaggctgttccctgggggtcgttaccttccacgagcaaaacacgtagccccttcagagccagatcctgagcaagatgaacagaaactgaggttttgtaaacgccacctttatgggcagcaaccccgatcaccggtggaaatacgtcttcagcacgtcgcaatcgcgtaccaaacacatcacgcatatgattaatttgttcaattgtataaccaacacgttgctcaacccgtcctcgaatttccatatccgggtgcggtagtcgccctgctttctcggcatctctgatagcctctcctcctcctcttctcttttttcctcttcctcctctttctcttcctttcccccatcctcctcctcttcgtcttcctcttcctccctgtagctctttcttcctttccttctctttcttcttctccatctctttcttcttctgaaactcaagaagcgcgatgtcagaaacccaggccctggatttgggcgaagtgggcggctgcatgcatgggacgctacaggggtccagctgaaccaatggctgcgggaagagttctcggtaaattaattgcgttgcgctcactgcccgctttccagtcgggaaacctgtcgtgccagctgcattaatgaatcggccaacgcgcggggagaggcggtttgcgtattgggcgccagggtggtttttcttttcaccagtgagacgggcaacagctgattgcccttcaccgcctggccctgagagagttgcagcaagcggtccacgctggtttgccccagcaggcgaaaatcctgtttgatggtggttccgaaatcggcaaaatcccttataaatcaaaagaatagcccgagatagggttgagtgttgttccagtttggaacaagagtccacgtctttcattgccatacggaactccggatgagcattcatcaggcgggcaagaatgtgaataaaggccggataaaacttgtgcttatttttctttacggtctttaaaaaggccgtaatatccagctgaacggtctggttataggtacattgagcaactgactgaaatgcctcaaaatgttctggattggggaggcggttgccgccgctgctgctgacggtgtgacgttctctgttccggtcacaccacatacgttccgccattcctatgcgatgcacatgctgtatgccggtataccgctgaaaagtctgcaaagcctttgttatttcatgccctggtgtccacctcat

SEQ ID NO: 127486 - DNA, 1638 bp, Homo sapiens
atggccttggcctgggctgtgaccctgtgttgcctcctggtccctgcctggggaaccatcagctggggtatttttagagccccagtgcaggctttcaagccagggtcaattcatgaagtggttctaggcaatcttgagaaaggttgccggctttccccgtcaagctataatcgggggcttcctttaggtttcgaatttagtgctttacggcacctcgaccccaaaaaattgatttgggattttcgcctgctggggcaaaccagcgtggaccgcttgctgcaactctctcagggccaggcggtgaagggcaatcagctgttgcccgtctcactggtgaaaagaaaaaccaccctggcgcccaatacgcaaaccgcctctccccgcgcgttggccgattcattaatgcagctggcacgacaggtttcccgactggaaagcgggcaggattttgccgatttcggaaccaccatcaaacaggattttcgcctgctggggcaaaccagcgtggaccgcttgctgcaactctctcagggccaggcggtgaagggcaatcagctgttgcccgtctcactggtgaaaagaaaaaccaccctggcgcccaatacgcaaaccgcctctccccgcgcgttggccgattcattaatgcagctggcacgacaggtttcccgactggaaagcgggcagacagtcctcctgcacacagatgaatgcccctgtgagcaaattgcctccccggcctgttcagagtcacctacgctgctggcaaatggtttttcagagcaagcagcctctgacgcaggcctggaatctggggcaaggaccggttttacgcagtttcggcttagtgaacaaaaagaaatcaccaatccgtatgccatgcgtttatacgaatccctgtgtcagtatcgtaagccggatggctcaggcatcgtctctctgaaaatcgactggatcatagagcgttaccagctgcctcaaagttaccagcaaaataatgatagcatagatgaggaagcaaggaaagagttgagagaacaggtttatgactccatgggagaaaaagaagaagccaaaaaaacagaagacaagtctttcgcaaagcctgaaactgataaagaacaggactgtgaaatggagaagggtggaagagaagatatggatataagtgaatctgcagaggagccacaggaaaaagttgacttgactctaggttggttaactgaaatctctgaaggggcaaaaggaggaggagcaccagaaggaccaaatgaagctgaggtcacttctgggaagccagaacaggaagtaccagatgttgaggaagaaaaatcagtttctgaaactgatgtccaagaagagtgcagagaaaaggaggttgggagaagcacagagagggattttgccgatttcggaaccaccatcaaacaggattttcgcctgctggggcaaaccagcgtggaccgcttgctgcaactctctcagggccaggcggtgaagggcaatcagctgttgcccgtctcactggtgaaaagaaaaaccaccctggcgcccaatacgcaaaccgcctctccccgcgcgttggccgattcattaatgcagctggcacgacaggtttcccgactggaaagcgggcagtga

SEQ ID NO: 127487 - DNA, 2433 bp, Homo sapiens
atggacataaatgcaaagattcttagcaaattactagcaagccatatccaacagcacatcagaaagctaatccatcatgttcaagtaggctttatcccaagagagaggggatcctctacagtagactggattcagcccgtaggaatcacgggagtggaagatcacaaaacgatttttgacggagacggaaaaacatatcagaacgttcagcagtttatcgaggaaggcaattatacacccggcgacaaccatacgctgagagaccctcactacgttgaagacaaaggccataaatacattgtattcgaagccaacacgggaacagaaaacggataccaaggcgaagaatctttatttaacaaagcgtactacggcggcggcacgaacttcttccgtaaagaaagccagaagcttcagcagagcgctaaaaaacgcgatgctgagttagcgaacggcgccctcggtatcatagagttaaataatgattacacattgaaaaaagtaatgaagccgctgatcacttcaaacacggtaactgatgaaatcgagcgcgcgaatgttttcaaaatgaacggcaaatggtacttgttcactgattcacgcggttcaaaaatgacgatcgatggtattaactcaaacgatatttacatgcttggttatgtatcaaactctttaaccggcccttacaagccgctgaacaaaacagggcttgtgctgcaaatgggtcttgatccaaacgatgtgacattcacttactctcacttcgcagtgccgcaagccaaaggcaacaatgtggttatcacaagctacatgacaaacagaggcttcttcgaggataaaaaggcaacatttgcgccaagcttcttaatgaacatcaaaggcaatagaggaacagaaggaaaacaagggatacaatattttccacataagcctttgggtgttggaagtccacatatcaggtttgactatcttcttgtaagtatattgccttcgatccgtaatcccacgggaaagtttgtggtcaaagacttggcaaaacgcaagaattatgcacctgtagcaatgcttcaatcagccatgacacgcactcacaatcatcgctcatgtgaagagccagtgaaggatatgctattagcctttcccaatgaccgagctgcaactatcaggtctaaagaccatcataaacatttcagggattttgccgatttcggaaccaccatcaaacaggattttcgcctgctggggcaaaccagcgtggaccgcttgctgcaactctctcagggccaggcggtgaagggcaatcagctgttgcccgtctcactggtgaaaagaaaaaccaccctggcgcccaatacgcaaaccgcctctccccgcgcgttggccgattcattaatgcagctggcacgacaggtttcccgactggaaagcgggcaggattttgccgatttcggaaccaccatcaaacaggattttcgcctgctggggcaaaccagcgtggaccgcttgctgcaactctctcagggccaggcgcacgccatagtgactggcgatgctgtcggaatggacgatatcccgcaagaggcccggcagtaccggcataaccaagcctatgcctacagcatccagggtgacggtgccgaggatgacgatgagcgcattgttagatttcatacacgggtcaccgtcgacagcgacacacttgcatcggatgcagcccggttaacgtgccggcacggcctgggtaaccagggaacagctccaatgtatcacggatgggtaccagatcttcatattcatgcagaagacactctcctgcctttctatcttggggaaaaggacgatgtcacttatgcaataaagcccacttgctggccggggcttgacattattccttcctgtctggctctgcaccgtattgaaactgagttaatgggcaaatttgatgaaggtaaactgcccaccgatccacacctgatgctccgactggccattgaaactgttgctcatgactatgatgtcatagttattgacagcgcgcctaacctgggtatcggcacgattaatgtcgtatgtgctgctgatgtgctgattgttcccacgcctgctgagttgtttgactacacctccgcactgcagtttttcgatatgcttcgtgatctgctcaagaacgttgatcttaaagggttcgagcctgatgtacgtattttgcttaccaaatacagcaatagtaatggctctcagtccccgtggatggaggagcaaattcgggatgcctggggaagcatggttctaaaaaatgttgtacgtgaaacggatgaagttggtaaaggtcagatccggatgagaactgtttttgaacaggccattgatcaacgctcttcaactggtgcctggagtaatgctctttctatcttgggaacctgtctgcaatga

SEQ ID NO: 127488 - DNA, 1397 bp, Homo sapiens
atggatgcaaaaatcctcaataaaatactggcaaaccaaatccagcagcacatcaaaaagcttatccactatgatccagtgggcttaatccctgggatgcaaggctggttcaacattcacaaatcaataaacgtaatccagcatataaacagaaccaaagacaaaaaccacatgattatctcaatagatgcagaaaaggccttcgacaaaattcaacagcctttcatgctaaaaattctcaataaattaggtattgatgggacgtatctcaaaataataagagctatttatgacaaacccacagccaatatcatactgaatgggcaaaaattggaagcattcgctttgaaaaccggcacaagacagggatgccctctctcaccactcctattcaacatagtgttggaagttctggccagggcaatcaggcaggagaaagaaataaagggtattcaattaggaaaagaggaagtcaaattgtccctgtttgcagatgacatgattgtatatttagaaaaccccatcggggattttgccgatttcggaaccaccatcaaacaggattttcgcctgctggggcaaaccagcgtggaccgcttgctgcaactctctcagggccaggcggtgaagggcaatcagctgttgcccgtctcactggtgaaaagaaaaaccaccctggcgcccaatacgcaaaccgcctctccccgcgcgttggccgattcattaatgcagctggcacgacaggtttcccgactggaaagcgggcaaaaaaggttcctaacgcacttgatgtttcaaagccagcatctggcagaaagctttccccatatggtccctcacccattgggcggcctttcatcggaaacgaggactcttctctcctcaaactttgtggaggatccactcagactctcacctgtgcttccagcgggaggaggaagaagcccaagcggccgagagaatcctctggaccatcagattaccaatgaaagaggagaaccaagctgtgataggttaactgatcctcacagagctccttctgacactgggtcccagtcatctccatgggaacaggaccataggatgatgtttcctccaccaggacaatcatatcctgattcagctcttcctccacaaagggaagacagattttattctaattctgatagactgcctggaccatcagaactcagaagttttaatatgccttctttggataaaacggatgggtcaatgccttcagaaatggaatccactagacatgatgccaaagatgatcctggtagtttaaatgagcctgattcatctctccctgctgaaaatgaagcaactggccccggctttattcctctacctcgtgctccaatcagtggtccattgtttccagggacgacaag

SEQ ID NO: 127489 - DNA, 1413 bp, Homo sapiens
atggagaaaaaaatcactggatataccaccgttgatatatcccaatggcatcgtaaagaacattttgaggcatttcagtcagttgctcaatgtacctataaccagaccgttcagctggatattacggcctttttaaagaccgtaaagaaaaataagcacaagttttatccggcctttattcacattcttgcccgcctgatgaatgctcatccggagttccgtatggcaatgaaagacggaaatggggccctttttgaggggttcagttttgggtctctgcttgcgggccaattggggcatccaccagtggccatgggccaagtcaagccttgtgttctcccttttggaattaagacttctaggccagcagaacataatgttgcaggaataggaagcaaaaattgtgctagtggatcactaggggtgatactgaatggtgccacttttccatcccttgattcctggacctgtgaattctggctatgcaagaaacagtaccatgtattagatgccgattcagagcatgcacagccttctggagaactctgccccagccttgccaagtattctcacctagatggcattgtaattgtaacttcaaaaggccattctaccgttctatcaatccagctgcttcaggatgatgaggaacatgtgaactcttgttccaaactggaacaacactcaaccctatctcgggctattcttttgatttataaggaattttgccgatttcggaaccaccatcaaacaggattttcgcctgctggggcaaaccagcgtggaccgcttgctgcaactctctcagggccaggcggtgaagggcaatcagctgttgcccgtctcactggtgaaaagaaaaaccaccctggcgcccaatacgcaaaccgcctctccccgcgcgttggccgattcattaatgcagctggcacgacaggtttcccgactggaaagcgggcagctatcagagatgcgaagaaagcagggcgactaccgcacccggatatggaaattcgaggacgggttgagcaacgtgttggttatacaattgaacaaattaatcatatgcgtgatgtgtttggtacgcgattgcgacgtgctgaagacgtatttccaccggtgatcggggttgctgcccataaaggtggcgtttacaaaacctcagtttctgttcatcttgctcaggatctggctctgaaggggctacgtgttttgctcgtggaaggtaacgacccccagggaacagcctcaatgtatcacggatgggtaccagatcttcatattcatgcagaagacactctcctgcctttctatcttggggaaaaggacgatgtcacttatgcaataaagcccacttgctggccggggcttgacattattccttcctgtctggctctgcaccgtattaaatga

SEQ ID NO: 127490 - DNA, 1380 bp, Homo sapiens
atgcacaccaaaggtcaacaggattttcgcctgctggggcaaaccagcgtggaccgcttgctgcaactctctcagggccaggcggtgaagggcaatcagctgttgcccgtctcactggtgaaaagaaaaaccaccctggcgcccaatacgcaaaccgcctctccccgcgcgttggccgattcattaatgcagctggcacgacaggtttcccgactggaaagcgggcacctgaagctttctaaagcagtggttgatgagtggaacatggatgttgatttggaaagaaactatgtggagagaaaacagcggcagaataaaaaactcggcatggaagctgactgggatttgaggggattttgccgatttcggaaccaccatcaaacaggattttcgcctgctggggcaaaccagcgtggaccgcttgctgcaactctctcagggccaggcggtgaagggcaatcagctgttgcccgtctcactggtgaaaagaaaaaccaccctggcgcccaatacgcaaaccgcctctccccgcgcgttggccgattcattaatgcagctggcacgacaggtttcccgactggaaagcgggcaaaccagcccataccgcacacaatcaggcccacaatggttattgcggaagacatgcgtacatggtcaatggctagttttgaaagtggctggcgatgttcttttttcgtcagcgagttgattgctatgtcgagcagaaacgtcccgacaaaccataatgcgtatatctttaagcccaactccaaatcactcataaatcctcttggccttatcgcggcgaacggaacggttaatacaagacttcaacgcatttattcagtgtttcaatgtcgattcacgcggttcaaaaatgacgatcgattggtattaactcaaaacgatatttacatgcttggttatgtatcaaactctttaaccggcccttacaagccgctgaacaaaacagggcttgtgctgcaaatgggtcttgatccaaacgatgtgacattcacttactctcacttcgcagtgccgcaagccaaaggcaacaatgtggttatcacaagctacatgacaaacagaggcttcttcgaggataaaaaggcaacatttgcgccaagcttcttaatgaacatcaaaggcaataaaacatccgttgtcaaaaacagcatcctggagcaaggacagctgacatggctccaagtagcgaagcgagcaggactgggcggcggccaaagcggtcggacagtgctccgagaacgggtgcgcatagaaattgcatcaacgcatatagcgctagcagcacgccatagtgactggcgatgctgtcggaatggacgatatcccgcaagaggcccggcagtaccggcataa

SEQ ID NO: 127491 - DNA, 2236 bp, Homo sapiens
atgtcaagccctaaggttcctgaaaattcttcttatccagcggtcgtggcaagcccatatgaaccagttgttggaggggattttgccgatttcggaaccaccatcaaacaggattttcgcctgctggggcaaaccagcgtggaccgcttgctgcaactctctcagggccaggcggtgaagggcaatcagctgttgcccgtctcactggtgaaaagaaaaaccaccctggcgcccaatacgcaaaccgcctctccccgcgcgttggccgattcattaatgcagctggcacgacaggtttcccgactggaaagcgggcaggattttgccgatttcggaaccaccatcaaacaggattttcgcctgctggggcaaaccagcgtggaccgcttgctgcaactctctcagggccaggcggatctggctctgaaggggctacgtgttttgctcgtggaaggtaacgacccccagggaacagcctcaatgtatcacggatgggtaccagatcttcatattcatgcagaagacactctcctgcctttctatcttggggaaaaggacgatgtcacttatgcaataaagcccacttgctggccggggcttgacattattccttcctgtctggctctgcaccgtattgaaactgagttaatgggcaaatttgatgaaggtaaactgcccaccgatccacacctgatgctccgactggccattgaaactgttgctcatgactatgatgtcatagttattgacagcgcgcctaacctgggtatcggcacgattaatgtcgtatgtgctgctgatgtgctgattgttcccacgcctgctgagttgtttgactacacctccgcactgcagtttttcgatatgcttcgtgatctgctcaagaacgttgatcttaaagggttcgagcctgatgtacgtattttgcttaccaaatacagcaatagtaatggctctcagtccccgtggatggaggagcaaattcgggatgcctggggaagcatggttctaaaaaatgttgtacgtgaaacggatgaagttggtaaaggattttcgcctgctggggcaaaccagcgtggaccgcttgctgcaactctctcagggccaggcggtgaagggcaatcagctgttgcccgtctcactggtgaaaagaaaaaccaccctggcgcccaatacgcaaaccgcctctccccgcgcgttggccgattcattaatgcagctggcacgacaggtttcccgactggaaagcgggcaatggagttaaaagttatttgccagtcctcagtaactgcagacacaggagacaatgttggaaacaatgttggtgaaatggaagtatcttcccttttgatagctgaagctgggctgtcatatcagaacacaatagtcaacatcagcatgtttctcacaaaggttgaattattcagtctttacacgtgggtcaagacaaaaacagcatatccactcagttccacatttccatataaaggccaaggcatttattctcaggataatggggggtctttagagtcccccacagggcttcaagcacgagttgcacggcccgtaccgcgcataagccggcgggattttgccgatttcggaaccaccatcaaacaggattttcgcctgctggggcaaaccagcgtggaccgcttgctgcaactctctcagggccaggcgtgggccatcgccctgatagacggtttttcgcctttgacgttggagtccacgttctttaatagtggatcttggtccaaactggaacaccactcaaccctatctcgggctattcttttgatttataagggattttgccgatttcggaaccaccatcaaacaggattttcgcctgctggggcaaaccagcgtggaccgcttgctgcaactctctcagggccaggcggtgaagggcaatcagctgttgcccgtctcactggtgaaaagaaaaaccaccctggcgcccaatacgcaaaccgcctctccccgcgcgttggccgattcattaatgcagctggcacgacaggaaacagctatgaccatgattacgaattcgagctcggtacccgtcgactccgagttatttatgacaatggaaccgaatccgacatattgcaacgctctcttcagcgagcgctgcatcgcgatgaagttgccaggttaattagtgaaccgtcagccggaccgtgtttggtgatgcatctgagcctgacgatatcgaaagcggaactattta

SEQ ID NO: 127492 - DNA, 1701 bp, Homo sapiens
atgaaactcatggaaacacttaaccagtgcataaacgctggtcatgaaatgacgaaggctatcgccattgcacagtttaatgatgacagcccggaagcgaggaaaataacccggcgctggagaataggtgaagcagcggatttagttggggtttcttctcaggctatcagagatgccgagaaagcagggcgacttccgcacccggatatggcaattcgaggacgggttgagcaacgtgttggttatacaattgaacaaattagtgtttatcctctacaggattttgccgatttcggaaccaccatcaaacaggattttcgcctgctggggcaaaccagcgtggaccgcttgctgcaactctctcagggccaggcgcgcgtaataaccttctttcccgagatcaatacggtagagcggtggcagtgcgacgtaaacgtgaccgtgtttcaccaacgcgcggaaatgttttacgaacaaagcgcagagcagcgtggcaatgtgcagaccatcagagtccgcatccgcgaggatacagattttgccataacgaagctggctcagatcgtcgctgtcaggatcgataccgatcgctaccgaaatatcgtgcacttcctgcgaagccagcacttcgtcggaagagacttcccaggtgttaaggatcttacctttcagtggcatgatcgcctgatattcgcgatcgcgcgcctgcttggcagatccgcctgcggagtcaccttccacaaggaacagctcggtacggttaaggtcctgcgcggtacaatcagccagtttgccaggcaacgccgggccgctggtcagctttttacgcaccacttttttggccgcacgcatacggcgctgggcgctggaaatcgccatctccgccagcagttcagccgcctgaacgttctggttcagccacaggataaaggcatctttcaccacgccagaaacgaatgccgcgcattgacgcgaagagagacgcccgcgttcttccggatccgagccgtgtttaactcccaactttcacaaacccaacttcacatattttttaccgcgcgccctgctggcctagcctctaaatgccgaaagcctccccaggcttgttatttgtgggattttgccgatttcggaaccaccatcaaacaggattttcgcctgctggggcaaaccagcgtggaccgcttgctgcaactctctcagggccaggcggtgaagggcaatcagctgttgcccgtctcactggtgaaaagaaaaaccaccctggcgcccaatacgcaaaccgcctctccccgcgcgttggccgattcattaatgcagctggcacgacaggtttcccgactggaaagcgggcaaaatattgagtctgcaaaaggacttcatgtgtgggacagctggccgctgcataacgcagacggaacagtagatgaatacaacggctatcacgttgtgtttgctcttgcgggaagcccgaaagacgctgatgacacatcaatctacatgttttatcaaaaggtcggcgacaactcaatcgacagctggaaaaacgcgggccgtgtctttaaagacagcgataagttcgacgccaacgatccgatcttgaaagatcagacgcaagaatggtccggttctgcaacctttacatctgacggaaaaatccgtttattctacactgactattccggtgaacattacggctag

SEQ ID NO: 127493 - DNA, 1116 bp, Homo sapiens
  misc_feature (1)...(1116): n = a,t,c or g
atgatnggattttgccgatttcggaacccccatcaaacaggattttcgcctgctggggcaaaccagcgtggaccgcttgctgcaactctctcagggccaggcggtgaagggcaatcagctgttgcccgtctcactggtgaaaagaaaaaccaccctggcgcccaatacgcaaaccgcctctccccgcgcgttggccgattcattaatgcagctggcacgacaggtttcccgactggaaagcgggcagtgagcgcaacgcaattaatgttacatccagtctctgtttttcatctgacccaacctgataaacagctccacaaccccaatctgggagcaccttttcctcccggctggctgtgtctaggaacaataagaggctcagcccaggaaaagcaagaaaaacctagttttgctttggtcagcagggatggatatgggacagtagagatgagggtctttgaaaaggtagacacggccgacctttctgtaggtctgcctcttcccagtggacacagcttttcccccccggcaaggcagcaagggccctcccattcttgggctccacctcctcactgtccccaaggcaaatggaaagccagggattttgccgatttcggaaccaccatcaaacaggattttcgcctgctggggcaaaccagcgtggaccgcttgctgcaactctctcagggccaggcggtgaagggcaatcagctgttgcccgtctcactggtgaaaagaaaaaccaccctggcgcccaatacgcaaaccgcctctccccgcgcgttggccgattcattaatgcagctggcacgacaggtttcccgactggaaagcgggcaggattttgccgatttcggaaccaccatcaaacaggattttcgcctgctggggcaaaccagcgtggaccgcttgctgcaactctctcagggccaggcgtggctccaagtagcgaagcgagcaggactgggcggcggccaaagcggtcggacagtgctccgagaacgggtgcgcatagaaattgcatcaacgcatatagcgctagcagcacgccatagtgactggcgatgctgtcggaatggacgatatcccgcaagaggcccggcagtaccggcataa

SEQ ID NO: 127494 - DNA, 1637 bp, Homo sapiens
  misc_feature (1)...(1637): n = a,t,c or g
ggatttttgcggatttgggacccaccatcaaacaggattttcgcctgttggggcaaaccagcgtggaccgcttgctgcaactctttcagggccagncgggattttgccgatttcggaaccaccatcaaacaggattttcgcctgctggggcaaaccagcgtggaccgcttgctgcaactctctcagggccaggcggtgaagggcaatcagctgttgcccgtctcactggtgaaaagaaaaaccaccctggcgcccaatacgcaaaccgcctctccccgcgcgttggccgattcattaatgcagctggcacgacaggtttcccgactggaaagcgggcagtgagcgcaacgcaattaattcaatgtgggctagagaaaagtgtggatcccctggggaaggagaaaaacaaaaagtttacaactacttataagctcttcttcatggacctcaccaagtgctccaaatcgaaaaacaacaacaaagacaacaaaacacataggaattttgccgatttcggaaccaccatcaaacaggattttcgcttgctggggcaaaaccagcgtgaaccgcctgctgcaactctctcagggccagccggtgaagggcaatcagctgttgcccgtctcactggtgaaaagaaaaaccaccctggcgcccaatacgcaaaccgcctctccccgcgcgttggccgattcattaatgcagctggcacgacaggtttcccgactggaaagcgggcattaggcataaagaagaaggaagaaccaagagattctaacaagatgtattctagggttcctgggagacaatgcaatttggaggaaaaaggccttaggcatgggattttgccgatttcggaacccaccatcaaacaggattttcgcctgctggggcaaaccagcgtggaccgcttgctgcaactctctcagggccaggcggtgaagggcaatcagctgttgcccgtctcactggtgaaaagaaaaaccaccctggcgcccaatacgcaaaccgcctctccccgcgcgttggccgattcattaatgcagctggcacgacaggtttcccgactggaaagcgggcaatcagaaaatttgatgccaccctacaggaacatgaacggtatttgcgagatccatgttgctaaatatgctgaaatattcgaattgacctctgcgaaagccaaggatgccggcgatgaaaaaggctatgaatcttttccttggtttatcaaacgtgcgcacagtccatccagagggctttacagtgtacatatcaacccatatctcattcccttctttatcgggttacagaaccggtttacgcagtttcggcttagtgaaacaaaagaaatcaccaatccgtatgccatgcgtttatacgaatccctgtgtcagtatcgtaagccggatggctcaggcatcgtctctctgaaaatcgactggatcatagagcgttaccagctgcctcaaagttaccagcgtatgcctgacttccgccgccgcttcctgcaggtctgtgttaatgagatcaacagcagaactccaatgcgcctctcatacattgagaaaaagaaaggccgccagacgactcatatcgtattttccttccgcgatatcacttccatgacgacaggatag

SEQ ID NO: 127495 - DNA, 1299 bp, Homo sapiens
atgaaagccatcgccaaatatgacttcaaagttattgcagagaccgaggtgaggttcaaaaggggggacatcctcaaggtatttattcgcgataagctcatggagcggcgtaaccgtcgcacaggaaggacagagaaagcgcggatctgggaagtgacggacagaacggtcaggacttggattggggaggcggttgccgccgctgctgctgacggtgtgacgttctctgttccggtcacaccacatacgttccgccattcctatgcgatgcacatgctgtatgccggtataccgctgaaagttctgcaaagcctgatgggacataagtccatcagttccacggaagtctacacgaaggtttttgcgctggatgtggctgcccggcaccgggtacagtttgcgatgccggaggattttgccgatttcggaaccaccatcaaacaggattttcgcctgctggggcaaaccagcgtggaccgcttgctgcaactctctcagggccaggcggtgaagggcaatcagctgttgcccgtctcactggtgaaaagaaaaaccaccctggcgcccaatacgcaaaccgcctctccccgcgcgttggccgattcattaatgcagctggcacgacaggtttcccgactggaaagcgggcaaagagtatctggtgtcatagaaattgccgatggaagtcgccgtcgtaaagctgctgcacttaccgaaagtgattatcgtgttctggttggcgagctgaatgatgagcagatgcctgcattatccagattgggtaacgattatcgcccaacaagtgcttatgaacgtggtcagcgttatgcaagccgattgcagaatgaatttgctggaaatatttctgcgctggctgatgcggaaaatatttcacgtaagattattacccgctgtatcaacaccgccaaattgcctaaatcagttgttgctcttttttctcaccccggtgaactatctgcccggtcaggtgatgcacttcaaaaagcctttacagataaagaggaattacttaagcagcaggcatctaaccttcatgagcagaaaaaagctggggtgatatttgaagctgaagaagttatcactcttttaacttctgtgcttaaaccgtcatctgcatcaagaactagtttaagctcacgacatcagtttgctcctggagcgacagtattgtataagggcgataaaatggtgcttaacctggacaggtctcgtgttccaactgagtgtatagagaaaattgaggccattcttaaggaacttggaaagccagcaccctga

SEQ ID NO: 127496 - DNA, 2160 bp, Homo sapiens
atgcaagcggaagtggctcatcgggtcatctcccgctgcctcgccctgctgctcctgcagacctgggaacacagctcctcgccagcaatggaacaaagctggacgaaaaatgactttgacgagttgacagaagcaggcttcagaccactgtttttcgatatgcttcgtgatctgctcaagaacgttgatcttaaagggttcgagcctgatgtacgtattttgcttaccaaatacagcaatagtaatggctctcagtccccgtggatggaggagcaaattcgggatgcctggggaagcatggttctaaaaaatgttgtacgtgaaacggatgaagttggtaaagctgccccgatggtggattcgttaattgcgcgcgtaggagtaatggctcgcggtaatgccattactttgcctgtatgtggtcgggatgtgaagtttactcttgaagtgctccggggtgatagtgttgagaagacctctcgggtatggtcaggtaatgaacgtgaccaggagctgcttactgaggacgcactggatgatctcatcccttcttttctactgactggtcaacagacaccggcgttcggtcgaagagtatctggtgtcatagaaattgccgatgggagtcgccgtcgtaaagggggaggactgcccgctaaagctggggtgcaccagaaggtggccgtgcagggccattcgcttcagctgctatcccagctgtgttctcatggcatggaagcagctttaaaagcattttgggacaatctggtcattcaaggaaacaaaagcccttcaagtaaggattttgccgatttcggaaccaccatcaaacaggattttcgcctgctggggcaaaccagcgtggaccgcttgctgcaactctctcagggccaggcggtgaagggcaatcagctgttgcccgtctcactggtgaaaagaaaaaccaccctggcgcccaatacgcaaaccgcctctccccgcgcgttggccgattcattaatgcagctggcacgacaggtttcccgactggaaagcgggcaggattttgccgatttcggaaccaccatcaaacaggattttcgcctgctggggcaaaccagcgtggaccgcttgctgcaactctctcagggccaggcggtgaagggcaatcagctgttgcccgtctcactggtgaaaagaaaaaccaccctggcgcccaatacgcaaaccgcctctccccgcgcgttggccgattcattaatgcagctggcacgacaggtttcccgactggaaagcgggcaaggactgcccgctaaagctggggtgcaccagaaggtggccgtgcagggccattcgcttcagctgctatcccagctgtgttctcatggcatggaagcagctttaaaagcattttgggacaatctggtcatccaaggaaacaaaagccttcaaagtaaggattttgccgatttcggaaccaccatcaaacaggattttcgcctgctggggcaaaccagcgtggaccgcttgctgcaactctctcagggccaggcggtgaagggcaatcagctgttgcccgtctcactggtgaaaagaaaaaccaccctggcgcccaatacgcaaaccgcctctccccgcgcgttggccgattcattaatgcagctggcacgacaggtttcccgactggaaagcgggcaggattttgccgatttcggaaccaccatcaaacaggattttcgcctgctggggcaaaccagcgtggaccgcttgctgcaactctctcagggccaggcggtgaagggcaatcagctgttgcccgtctcactggtgaaaagaaaaaccaccctggcgcccaatacgcaaaccgcctctccccgcgcgttggccgattcattaatgcagctggcacgacaggtttcccgactggaaagcgggcaggattttgccgatttcggaaccaccatcaaacaggattttcgcctgctggggcaaaccagcgtggaccgcttgctgcaactctctcagggccaggcggtgaagggcaatcagctgttgcccgtctcactggtgaaaagaaaaaccaccctggcgcccaatacgcaaaccgcctctccccgcgcgttggccgattcattaatgcagctggcacgacaggtttcccgactggaaagcgggcagtga

SEQ ID NO: 127497 - DNA, 1284 bp, Homo sapiens; identical to SEQ ID NO: 121239

SEQ ID NO: 127498 - DNA, 1198 bp, Homo sapiens
atgctccgactggccattgaaactgttgctcatgactatgatgtcatagttattgacagcgcgcctaacctgggtatcgggccgattaaatgtcgaatgtgctgctgatgtgctgattgttcccacgcctgctgagttgtttgactacacttccgcactgcagtttttcgatatgtttcgtgatctgctcaagaacgttgatcttaaagggttcgagcctgatgtacgtattttgcttaccaaatacagcaatagtaatggctctcagtccccgtggatggaggagcaaattcgggatgcctggggaagcatggttctaaaaaatgttgtacgtgaaacggatgaagttggtaaaggtcagatccggatgagaactgtttttgaacaggccattgatcaacgctcttcaactgaagaggatgccggcgatgaaaaaggctatgaatcttttcgttggtttatcaaacgtgcgcacagtccatccagagggctttacagtgtacatatcaacccatatctcattcctttctttatcgggttacagaaccggtttacgcagtttcggcttagtgaaacaaaagaaatcaccaatctgtatgccatgcgtttatacgaatccctgtgtcagtatcgtaagccggatggctcaggcatcgtctctctgaaaatcgagtggatcatagagcgttaccagctgcctcagagttaccagtgtatgcgtgacttccgccgccgcttcctgcagctccacacttgttgtctggtgggtaattcatcaccaagctctctgtgcttgattagagaacgcatcctagagtcttatattgttcttgaggagaaggagggcagtggaaaagagagggaaggtatggaaggactcttgtccaaacggaacaacactcaccctatctggggctatctttttatttataagggattttgccgatttcggaacccccatcacacaggattttcgcctgctggggcaaaccagcgtggaccgcttgctgcatctctctcagggccaggcggtaaagggcaatcagctgttgcccgtctcactggtgaaaagaaaaaccaccctggcgcccaatacgcaaaccgcctctccccgcgcgttggccgattcattaatgcagctggcacgacaggtttcccgactggaaagcggacagtgagcgcaacgcaattaatgtga

SEQ ID NO: 127499 - DNA, 2710 bp, Homo sapiens
atgaagcgtgcgcctgttattccaaaacatacgctcaatactcaaccggttgaagatacttcgttatcgacaccagctgccccgatggtggattcgttaattgcgcgcgtaggagtaatggctcgcggtaatgccattactttgcctgtatgtggtcgggatgtgaagtttactcttgaagtgctccggggtgatagtgttgagaagacctctcgggtatggtcaggtaatgaacgtgaccaggagctgcttactgaggacgcactggatgatctcatcccttcttttctactgactggtcaacagacaccggcgttcggtcgaagagtatctggtgtcatagaaattgccgatgggagtcgccgtcgtaaagctgctgcacttaccgaaagtgattatcgtgttctggttggcgagctggatgatgagcagatggctgcattatccagattgggtaacgattatcgcccaacaagtgcttatgaacgtggtcagcgttatgcaagccgattgcagaatgaatttgctggaaatatttctgcgctggctgatgcggattttgccgatttcggaaccaccatcaaacaggattttcgcctgctggggcaaaccagcgtggaccgcttgctgcaactctctcagggccaggcgggttttacagacagccctcattacagtgatcacttgaatgacagtcgattaggagcccatgaaggcttgtccccaacacctttcatgaactcaaatctgatggtggactcttgttccaaactggaacaacactcaaccctatctcgggctattcttttgatttataagggattttgccgatttcggaaccaccatcaaacaggattttcgcctgctggggcaaaccagcgtggaccgcttgctgcaactctctcagggccaggcggtgaagggcaatcagctgttgcccgtctcactggtgaaaagaaaaaccaccctggcgcccaatacgcaaaccgcctctccccgcgcgttggccgattcattaatgcagctggcacgacaggtttcccgactggaaagcgggcagtgagcgcaacgcaattaattcaggcaccgtgtatgaaatctaacaatgcgctcatcgtcatcctcgggcaccgtcacctgggatgtggtaggcataggcttggttatgccggtacgccgggccttcttgcgggatatcgtccattccgacagcatcgccagtcactatggcgtgctgctagcgctatatgcgttgatgcaatttctatgcgcacccgttctcggagcactgtccgaccgctttggccgccgcccagtcctgctcgcttcgctacttggagccactatcgactacgcgatcatggcgaccacacccgtcctgtggatctacccactattgactgtcagctgtccttgctccaggatgctgtttttgacaacggatgttttattgcctttgatgttcattaagaagcttggcgcaaatgttgcctttttatcctcgaagcaagcctctgtttgtcatgtagcttgtgataaccccactgttgcctttggcttgcggcactgcgaagtgagaaaacacaaagccattgttcaaaatctggaaagtccagaaaacggtggttcggaaagtggcacttactcatctccccccctggagacaaccgtgcccccccctgccccagggctcccccgggcccctggccagggcttctttgttgttcaccggctggggtatgggccaggtctttgtaagcagaaacacactccctccctaatgtcggtggagccagaacaattttgcctacacctggtttcaaaggctctcgacggagagtacaagttgcagcgcctcaaacgctcggaattgaactggaccctctggcaaaagaacaaaaaccattttgttcactttgccattcctgtgtacctggtattccaggatctggctctcaacgggctacgtgctttgctcgtgcaaggtaacgacccccagggatcagcctcaatgtatcacggatgggtaccagattttcatattcatgcagaagacactctcctgcctttctatcctggggaaaaggacgatgtcacttatgcaataaagcccacttgctggcccgggcttgacattattccttcctgtctggctctgcaccgtattgaaactgagttactgggcaaatttgatgaaggtaaactgcccacccatccacacctgatgctccgactggccattgaaactgttgctcatgactatgatgtcatagttattgacagcgcgcctaacctgggtatcggcacgattaatgtctccttagaagaagtgtgtgacctgctgcacgcggctcctttccagaacatcttgccgcgagtccatgtgaaagtgaaaaactggacaggacgtatggatcagctgttttcagactcggaccttttgctgaggggacggaagcaagtgagggattttgccgatttcggaaccaccatcaaacaggattttcgcctgctggggcaaaccagcgtggaccgcttgctgcaactctctcagggccaggcggtgaagggcaatcagctgttgcccgtctcactggtgaaaagaaaaaccaccctggcgcccaatacgcaaaccgcctctccccgcgcgttggccgattcattaatgcagctggcacgacaggtttcccgactggaaagcgggcagtga

SEQ ID NO: 127500 - DNA, 2937 bp, Homo sapiens
atgaagcgtgcgcctgttattccaaaacatacgctcaatactcaaccggttgaagatacttcgttatcgacaccagctgccccgatggtggattcgttaattgcgcgcgtaggagtaatggctcgcggtaatgccattactttgcctgtatgtggtcgggatgtgaagtttactcttgaagtgctccggggtgatagtgttgagaagacctctcgggtatggtcaggtaatgaacgtgaccaggagctgcttactgaggacgcactggatgatctcatcccttcttttctactgactggtcaacagacaccggcgttcggtcgaagagtatctggtgtcatagaaattgccgatgggagtcgccgtcgtaaagctgctgcacttaccgaaagtgattatcgtgttctggttggcgagctggatgatgagcagatggctgcattatccagattgggtaacgattatcgcccaacaagtgcttatgaacgtggtcagcgttatgcaagccgattgcagaatgaatttgctggaaatatttctgcgctggctgatgcggaaaatatttcacgtaagattattacccgctgtatcaacaccgccaaattgcctaaatcagttgttgctcttttttctcacccctgggattttgccgatttcggaaccaccatcaaacaggattttcgcctgctggggcaaaccagcgtggaccgcttgctgcaactctctcagggccaggcggtgaagggcaatcagctgttgcccgtctcactggtgaaaagaaaaaccaccctggcgcccaatacgcaaaccgcctctccccgcgcgttggccgattcattaatgcagctggcacgacaggtttcccgactggaaagcgggcaggattttgccgatttcggaaccaccatcaaacaggattttcgcctgctggggcaaaccagcgtggaccgcttgctgcaactctctcagggccaggcggtgaagggcaatcagctgttgcccgtctcactggtgaaaagaaaaaccaccctggcgcccaatacgcaaaccgcctctccccgcgcgttggccgattcattaatgcagctggcacgacaggtttcccgactggaaagcgggcaaagcagggttcatagccattcactgggccctctcccaacaaccacgactgggagcttgattaaccaaaaaaaagggggtgtttctggagggccgggttccaaggaacaggcagaaatcagttgtcttaaagaaaggaaagatctgggtttgggtatcctaggttccacagttggaattctgaaggtaaaacatcagggtgcatctaccaaacagggtcattctcaggatttgattaagattttgctatcggatacttcgttatcgacaccagctgccccgatggtggattcgttaattgcgcgcgtaggagtaatggctcgcggtaatgccattactttgcctgtatgtggtcgggatgtgaagtttactcttgaagtgctccggggtgatagtgttgagaagacctctcgggtatggtcaggtaatgaacgtgaccaggagctgcttactgaggacgcactggatgatctcatcccttcttttctactgactggtcaacagacaccggcgttcggtcgaagagtatctggtgtcatagaaattgccgatgggagtcgccgtcgtaaagctgctgcacttaccgaaagtgattatcgtgttctggttggcgagctggatgatgagcagatggctgcattatccagattgggtaacgattatcgcccaacaagtgcttatgaacgtggtcagcgttatgcaagccgattgcagtatatgaatttgctgcccatatttctgcgctggctgatgcggaaaatatttcacgatgaacatggagtgcctcaggaccagcaggaggaagagccaatttctgaaaccataatagaagaagaaattcccagtatcaactctgatttaggaaatgaattgtattttgttaaactacccaagtttctcagtatagaacccaaggattttgccgatttcggaaccaccatcaaacaggattttcgcctgctggggcaaaccagcgtggaccgcttgctgcaactctctcagggccaggcggtgaagggcaatcagctgttgcccgtctcactggtgaaaagaaaaaccaccctggcgcccaatacgcaaaccgcctctccccgcgcgttggccgattcattaatgcagctggcacgacaggtttcccgactggaaagcgggcaacctcactctacggacagtgccacacatagaaagatgactctgtcacttgcagataggtgttcaaagacacagaagattagaatcttgccaatggctggtcgtgatcctgaatgccaacgcacagaaatgattaagagttcggacctcatggcagagataattcaggaacacaaagaagatcagctccctgaattggaacagctagagcacattggactgttcagtcatgcagagattaaggctatcattaagaaggcttctgatctacagtacagaatccaggaaagagcccttttcaaggacgactttatcaattatgttttacatgaaattcctcttttcgaacagatccagagaagaacacgcattggatattcattaaagcacggtatacgtgctgtcaaagcaaccatagtacgcgccctgtacgggcgcattaagcccgcgggtgtggtggttacgcgcagcgtgcccgctacacttgccagcgccctagcgcccgctcctttcgctttcttcctttcttttctcgccacgttcgccggctttcccgtcaagtttaaatcgggggctcctttagggttccgatttagtgctttacggcacctcgaccccaaaaaacttgatttgggtgatggttcacgtagtgggccatcgccctga

SEQ ID NO: 127501 - DNA, 5889 bp, Homo sapiens
atgaaactcatggaaacacttaaccagtgcataaacgctggtcatgaaatgacgaaggctatcgccattgcacagtttaatgatgacagcccggaagcgaggaaaataacccggcgctggagaataggtgaagcagcggatttagttggggtttcttctcaggctatcagagatgccgagaaagcagggcgactaccgcacccggatatggaaattcgaggacgggttgagcaacgtgttggttatacaattgaacaaattaatcatatgcgtgatgtgtttggtacgcgattgcgacgtgctgaagacgtatttccaccggtgatcggggttgctgcccataaaggtggcgtttacaaaacctcagtttctgttcatcttgctcaggatctggctctgaaggggctacgtgttttgctcgtggaagtttctgttcatcttgctcaggatctggctctgaaggggctacgtgttttgctcgtggaaggtaacgacccccagggaacagcctcaatgtatcacggatgggtaccagatcttcatattcatgcagaagacactctcctgcctttctatcttggggaaaaggacgatgtcacttatgcaataaagcccacttgctggccggggcttgacattattccttcctgtctggctctgcaccgtattgaaactgagttaatgggcaaatttgatgaaggtaaactgcccaccgatccacacctgatgctccgactggccattgaaactgttgctcatgactatgatgtcatagttattgacagcgcgcctaacctgggtatcggcacgattaatgtcgtatgtgctgctgatgtgctgattgttcccacgcctgctgagttgtttgactacacctccgcactgcagtttttcgatatgcttcgtgatctgctcaagaacgttgatcttaaagggttcgagcctgatgtacgtattttgcttaccaaatacagcaatattgatggcctgctggcctgccggggctgccgggattttgccgatttcggaaccaccatcaaacaggattttcgcctgctggggcaaaccagcgtggaccgcttgctgcaactctctcagggccaggcggtgaagggcaatcagctgttgcccgtctcactggtgaaaagaaaaaccaccctggcgcccaatacgcaaaccgcctctccccgcgcgttggccgattcattaatgcagctggcacgacaggtttcccgactggaaagcgggcaagtaaaactgggggcatgcaacaagatcacttttaggactgcacttctggcaggaggagcgactcaagccttcgcgaaagaaaataaccaaaaagcatacaaagaaacgtacggcgtctctcatattacacgccatgatatgctgcagatccctaaacagcagcaaaacgaaaaataccaagtgcctcaattcgatcaatcaacgattaaaaatattgagtctgcaaaaggacttgatgtgtgggacagctggccgctgcaaaacgctgacggaacagtagctgaatacaacggctatcacgttgtgtttgctcttgcgggaagcccgaaagacgctgatgacacatcaatctacatgttttatcaaaaggtcggcgacaactcaatcgacagctggaaaaacgcgggccgtgtctttaaagacagcgataagttcgacgccaacgatccgatcctgaaagatcagacgcaagaatggtccggttctgcaacctttacatctgacggaaaaatccgtttattctacactgactattccggtaaacattacggcaaacaaagcctgacaacagcgcaggtaaatgtgtcaaaatctgatgacacactcaaaatcaacggagtggaagatcacaaaacgatttttgacggagacggaaagggagtctttagagtcccccaatggattaaagacttaaatgtaggggggtctttagagtcgccctacgagcatgcaagtctgagtccgaatgaaatggattccgtgagcatccttggtggtattttggcagaggagcctcaccacgtggccactgccaccacaagcccacaggtagtactgccagtctactgccagtgttcccttaaggcccaagaaatacaaactaccatcagagaatactacaaacacctctacgcaaataaactagaaaatctagaagaaatggataaattcctcgacacatacactctcccaagactaaaccaggaagaagttgaatctctgaatagaccaaaaacaggatctgaaattgtggcaataatcaatagtttaccaaccaaaaagagtccaggaccagatggattcacagccgaattctaccagagggattttgccgatttcggaaccaccatcaaacaggattttcgcctgctggggcaaaccagcgtggaccgcttgctgcaactctctcagggccaggcggtgaagggcaatcagctgttgcccgtctcactggtgaaaagaaaaaccaccctggcgcccaatacgcaaaccgcctctccccgcgcgttggccgattcattaatgcagctggcacgacaggtttcccgactggaaagcgggcaggattttgccgatttcggaaccaccatcaaacaggattttcgcctgctggggcaaaccagcgtggaccgcttgctgcaactctctcagggccaggcggtgaagggcaatcagctgttgcccgtctcactggtgaaaagaaaaaccaccctggcgcccaatacgcaaaccgcctctccccgcgcgttggccgattcattaatgcagctggcacgacaggtttcccgactggaaagcgggcactggccgctgcaaaacgctgacggaacagtagctgaatacaacggctatcacgttgtgtttgctcttgcggaaagcccgaaagacgctgatgacacatcaatctacatgttttatcaaaaggtcggcgacaactcaatcgacagctggaaaaacgcgggccgtgtctttaaagacagcgataagttcgacgccaacgatccgatcctgaaagatcagacgcaagaatggtccggttcttgcaccctttacatttgacggaaaaatccgtttattttacattgactattccggtaaacattccggcaaccaaagcctgacatcagcgcaggtaaatgtgtcaaaatctgatgacacactcaaaatcaacggagtggaagatcacaaaacgatttttgacggagacggaaaaacatatcagaacgttcagcagtttatcgatgaaggcaattatacatccggcgacaaccatacgctgagagaccctcactacgttgaagacaaaggccataaatgccttgtattcgaagccaacacgggaacagaaaacggataccaaggcgaagaatctttatttaacaaagcgtactacggcggcggcacgaacttcttccgtaaagaaagccagaagcttcagcagagcgctaaaaaacgcgatgctgagttagcgaacggcgccctcggtatcatagagttaaataatgattacacattgaaaaaagtaatgaagccgctgatcacttcaaacacggtaactgatgaaatcgagcgcgcgaatgttttcaaaatgaacggcaaatggtacttgttcactgattcacgcggttcaaaaatgacgatcgatgggccaaatattatacgcaaggggaacaaggtgtttatgtcgctggcgattcaggttcatcatgccgtttgtgatggattccatgtcggcagaatgcttaatatattacaacagtatgatgatgagtggcaggtggactcttgttccaaactggaacaacactcaaccctatctcgggctattcttttgatttataagggattttgccgatttcggaaccaccatcaaacaggattttcgcctgctggggcaaaccagcgtggaccgcttgctgcaactctctcagggccaggcggtgaagggcaatcagctgttgcccgtctcactggtgaaaagaaaaaccaccctggcgcccaatacgcaaaccgcctctccccgcgcgttggccgattcattaatgcagctggcacgacaggtttcccgactggaaagcggccaagtgagcgcaacgcaattaatcatcatgaagtgtgatattgacatcaggaaggacctctatgctaacaatgtcttatcagggggcaccactatgtaccctggcattgccgaccgaatgcagaaggagatcacggccctagcacccagcaccatgaagatcaagaaaaagttagctgctatgcctgaccatacagatgtttccctaagcccagaagagcgagtccgtgccctaagcaagcttggttgtaatatcaccatcagtgaagacatcactccacgacgttactttagaattttgttaggcacaatcttagttaaagagttaccagaaatggggcttggtctttccttaactataaatatggtaacttacaagttgaaggaagtcccgtcatcaaaaattaaatctctaagagacaaacggggaggggcaaggacacgggggaaggggccgccaaaaacgagcctagaaggggggggggggacagggaaagagcccgaaaggaccaatgccagcagaggcggctgccggccggtcattatcatcatcatcatcatcatcaaatcatttcatcaccatcagaaatgcttatacattatcctgatgtataccaaagctactgtttggaaagaaactaaaataaaagtccagaaggctatcgccattgcacagtttaatgatgacagcccgaaagcgaggaaaataccccggcgctggagaataggtgaagcagcggatttagttggggtttcttctcaggctatcagagatgccgagaaagcagggcgactaccgcacccggatatggaaattcgaggacgggttgagcaacgtgttggttatacaattgaacaaattaatcatatgcgtgatgtgtttggtacgcgattgcgacgtgctgaagacgtatttccaccggtgatcggggttgctgcccataaaggtggcgtttacaaaacctcagtttctgttcatcttgctcaggatctggctctgaaggggctacgtgttttgctccgtggaagggattttgccgatttcggaaccaccatcaaacaggattttcgcctgtggggcaaaccagcgtggaccgcttgctgcaactctctcagggccaggcggtgaagggcaatcagctgttgcccgtctcactggtgaaaagaaaaaccaccctggcgcccaatacgcaaaccgcctctccccgcgcgttggccgattcattaatgcagctggcacgacaggtttcccgactggaaagcgggcacagcaaaacgaaaaataccaagtgcctcaattcgatcaatcaacgattaaaaatattgagtctgcaaaaggacttgatgtgtgggacagctggccgctgcaaaacgctgacggaacagtagctgaatacaacggctatcacgttgtgtttgctcttgcgggaagcccgaaagacgctgatgacacatcaatctacatgttttatcaaaaggtcggcgacaactcaatcgacagctggaaaaacgcgggccgtgtctttaaagacagcgataagttcgacgccaacgatccgatcctgaaagatcagacgcaagaatggtccggttctgcaacctttacatctgacggaaaaatccgtttattctacactgactattccggtaaacattacggcaaacaaagcctgacaacagcgcaggtaaatgtgtcaaaatctgatgacacactcacaatcaacggagtggaagatcacaaaacgatttttgacggagacggaaaggggatcttctag

SEQ ID NO: 127502 - DNA, 6890 bp, Homo sapiens
tcactgcccgctttccagtcgggaaacctgtcgtgccagctgcattaatgaatcggccaacgcgcggggagaggcggtttgcgtattgggcgccagggtggtttttcttttcaccagtgagacgggcaacagctgattgcccttcaccgcctggccctgagagagttgcagcaagcggtccacgctggtttgccccagcaggcgaaaatcctgtttgatggtggttccgaaatcggcaaaatcctgcccgctttccagtcgggaaacctgtcgtgccagctgcattaatgaatcggccaacgcgcggggagaggcggtttgcgtattgggcgccagggtggtttttcttttcaccagtgagacgggcaacagctgattgcccttcaccgcctggccctgagagagttgcagcaagcggtccacgctggtttgccccagcaggcgaaaatcctgtgtgatggtggttccgaaatccggaaaatccggcgtatttgcatcttcagcgcacatccattcaccccagtcgctccctgcattcacattgttgcctttggcttgcggcactgcgaagtgagagtaagtgaatgtcacatcgtttggatcaagacccatttgcagcacaagccctgttttgttcagcggcttgtaagggccggttaaagagtttgatacataaccaagcatgtaaatatcgtttgagttaataccatcgatcgtcatttttgaaccgcgtgaatcagtgaacaagtaccatttgccgttcattttgaaaacattcgcgcgctcgatttcatcagttaccgtgtttgaagtgatcagcggcttcattacttttttcaatgtgtaatcattatttaactctatgataccgagggcgccgttcgctaactcagcatcgcgttttttagcgctctgctgaagcttctggctttctttacggaagaagttcgtgccgccgccgtagtacgctttgttaaataaagattcttcgccttggtatccgttttctgttcccgtgttggcttcgaatacaaggtatttatggcctttgtcttcaacgtagtgagggtctctcagcgtttgggtgtccgccggtgtattattgccttcatcgataaactggcggaccgttctgatttgtttttttcgtccgccgtcaaaaaatcggtttggggaatcttcacctccctgcccgctttccagtcgggaaacctgtcgtgccagctgcattaatgaatcggccaacgcgcggggagaggcggtttgcgtattgggcgccagggtggtttttcttttcaccagtgagacgggcaacagctgattgcccttcaccgcctggccctgagagagttgcagcaagcggtccacgctggtttgccccagcaggcgaaaatcctgtttgatggtggttccgaaatcggcaaaatccctctagttctttctctttcatatccagttctcgtttctttttatttaaggtatccaagtgttctttttgtttttcttcataatgtcgtttccctcgtttttggttatccacttcagaatcagcaaggtttaattcatcctgaatcgccagcggcatcagcaccttgtcgccttgcgtataatatttgcccatggtgaaaacgggggcgaagaagttgtccatattggccacgtttaaatcaaaactggtgaaactcacccagggattggctgagacgaaaaacatattctcaataaaccctttagggaaataggccaggttttcaccgtaacacgccacatcttgcgaatatatgtgtagaaactgccggaaatcgtgcgggtattcacgtctctcattggccatacggacttcgggagagcattcatccagcgggtcaagaatgtggaagaaaggcgggttaaaactcagggctaatattctttcagggcttttataaagccggaaaaaccagccgacggtcttggtaaagggctttgtagcacctgcttttttcaatgtgtaatcattatttaactctatgataccgagggcgccgttcgctaactcagcatcgcgttttttagcgctctgctgaagcttctggctttctttacggaagaagttcgtgccgccgccgtagtacgctttgttaaataaagattcttcgccttggtatccgttttctgttcccgtgttggcttcgaatacaaggtatttatggcctttgtcttcaacgtagtgagggtctctcagcgtatggttgtcgccggatgtataattgccttcatcgataaactgctgaacgttctgatatgtttttccgtctccgtcaaaaatcgttttgtgatcttccactccgttgattttgagtgtgtcatcagattttgacacatttacctgcgctgttgtcaggctttgtttgccgtaatgtttaccggaatagtcagtgtagaataaacggatttttccgtcagatgtaaaggttgcagaaccggaccattcttgcgtctgatctttcaggatcggatcgttggcgtcgaacttatcgctgtctttaaagacacggcccgcgtttttccagctgtcgattgagttgtcgccgaccttttgataaaacatgtagatggatgtgtcatcagcgtctttcgggtgcccgctttccagtcgggaaacctgtcgtgccagctgcattaatgaatcggccaacgcgcggggagaggcggtttgcgtattgggcgccagggtggtttttcttttcaccagtgagacgggcaacagctgattgcccttcaccgcctggccctgagagagttgcaacaagcggtccacgctggtttgccccagcaggcgaaaatcctgtttgatggtgggtccgaaatcggcaaaatccattaattgcgttgcgctcactgcccgctttccagtcgggaaacctgtcgtgccagctgcattaatgaatcggccaacgcgcggggagaggcggtttgcgtattgggcgccagggtggtttttcttttcaccagtgagacgggcaacagctgattgcccttcaccgcctggccctgagagagttgcagcaagcggtccacgctggtttgccccagcaggcgaaaatcctgtttgatggtggttccgaaatcggcaaaatcccgtaagcttgggtttggttccagaattggctactggagtggaagatgggaggtccgtggactcagtgtcagaagacaaatttactcgtgtctgatttactgaaatggtatctgctccactttcagatcctgattccagatctgcccgctttccagtcgggaaacctgtcgtgccagctgcattaatgaatcggccaacgcgcggggagaggcggtttgcgtattgggcgccagggtggtttttcttttcaccagtgagacgggcaacagctgattgcccttcaccgcctggccctgagagaattgcagcaagcggtccacgctggtttgccccagcaggcgaaaatcctgtttgatggggggttccgaaatcggcaaaatcctgcccgctttccagtcgggaaacctgtcgtgccagctgcattaatgaatcggccaacgcgcggggagaggcggtttgcgtattgggcgccagggtggtttttcttttcaccagtgagacgggcaacagctgattgcccttcaccgcctggccctgagagagttgcagcaagcggtccacgctggtttgccccagcaggcgaaaatcctgtttgatggtggttccgaaatcggcaaaatcctgcccgctttccagtcgggaaacctgtcgtgccagctgcattaatgaatcggccaaaatacgtacatcaggcggtttgcgtattgggcgccagggtggtttttcttttcaccagtgagacgggcaacagctgattgcccttcaccgcctggccctgagagagttgcagcaagcggtccacgctggtttgccccagcaggcgaaaatcgacattaatcgtgccgatacccaggttaggcgcgctgtcaataactatgacatcatagtcatgagcaacagtttcaatggccagtcggagcatcaggtgtggatcggtgggcagtttaccttcatcaaatttgcccattaactcagtttcaatacggtgcagagccagacaggaaggaataatgtcaagccccggccagcaagtgggctttattgcataagtgacatcgtccttttccccaagatagaaaggcaggagagtgtcttctgcatgaatatgaagatctggtacccatccgtgatacattgaggctgttccctgggggtcgttaccttccacgagcaaaacaccgtaacccctccccatgggtccctcccacaacacgtgggcattctggaagatacaattcaagttgagatttggtggggacacagctaaccatatcacaggcccggaggcattaattggcgttgcgctcactgcccgcttttcagtcgggaaacctgtcgtgccagctgcattaatgaatcggcccacgcgcggggagaaggcgtttgcgtatttggcgccacggtgggtttttcttttcaccagtgagacgggcaacagctgattgcccttcaccgcctggccctgagagagttgcagcaagcggtccacgctggtttgccccagcaggcgaaaatcctgtttgatggtggttccgaaatcggcaaaatccctgcaggaagcggcggcggaagtcaggcatacgctggtaactttgaggcagctggtaacgctctatgatccagtcgattttcagagagacgatgcctgagccatccggcttacgatactgacacagggattcgtataaacgcatggcatacggattggtgatttcttttgtttcactaagccgaaactgcgtaaaccggtttgcccgctttccagtcgggaaacctgtcgtgccagctgcattaatgaatcggccaacgcgcggggagaggcggtttgcgtattgggcgccagggtggtttttcttttcaccagtgagacgggcaacagctgattgcccttcaccgcctggccctgagagagttgcagcaagcggtccacgctggtttgccccagcaggcgaaaatcctgtttgatggtggttccgaaatcggcaaaatcccttataaatcaaaagaatagcccgagatagggttgagtgttgttccagtttggaacaagagtccaagtggaagtgacctctctgcttttcagagtgaattaatcctgaattggctaaggaaactataatagctttccccgaagcagttgtcatgtaagacaaaggtgattttcttctggacaggctatgaccatccttctttgcttctaggcctctaactaatctgaattctatacagggccctttctctagattttgtggtgtatatttcccagccctgttcatattgggaacaggcttggctgttcccaatatgggcttggctgcatcattgattgcctgatggaatgtcattggatgtgacatgagcagaggcttgatgatcacttctgttattttttctgctctcttgaattcattaattgcgttgcgctcactgcccgctttccagtcgggaaacctgtcgtgccagctggcattaatgaatcggccaacgcgcggggagaggcggtttgcgtattgggcgccagggtggtttttcttttcaccagtgagacgggcaacagctgattgcccttcaccgcctggccctgagagagttgcagcaagcggtccacgctggtttgccccagcaggcgaaaatcctgtttgatggtggttccgaaatcggcaaaatcccttgtagcattctgaggacaggtctgatttctaagaggggaaagtggtaaaactattgtccagtcctttttaagttggtggctgagcttggtgaggtgtgtttttaaaagacctttagtccgttctacttttcctgaagatggaggaccgttagggatataaaggtttgactgaatactaagagcctgaaaaactgcttggctgatttgactaataaaggctggtctgttatcagatgttgctagtctctggagcctctcaacaccattatcaatgccctctgtatatagtgtcctcattaaatctcttgaataatcttttcggattctgtcttttgcaccagtcttttctgtgtatttattcctttttctagcttttgcccttgaagcaggccataagataattctctgaccttcctctaaagtagaccataataccttcattccagcagtgccctcgttatacctgttcactctgatggttgtttcttttgctgtgcagaagctctttagtttaattagatcccatttgtcaattttggcttttggtgttttagacatgaagtccttgcccatgcctatgtcctgaatagtattgcctaggttttcttctagggtttttatggttttaggtctaacgtttaagtctttaatccatcttgaattgatttttgtataaggtttaaggaagggatccagcttcagctttctacatatggctagccagttttcccagcaccatttattaaatagggaatcctttccccattgcttgtttttctcaggtttgtcaaagatcagatagttgtagatacgcggcattatttctgagggctctgttctgttccattgatctatatctctgttttggtaccagtaccatgctgttttggttactgtagccttgtagtatagtttgaagtcaggtagtgtgatgcctccagctttgttcttttggcttaggattgacttggcgatgcgggctcttttttggttccatatgaactttaaagtatttttttccaattctgtgaagaaaggcattggtagcttgatggggatgccattgaatctgtaaattaccttgggcagtatggccat

SEQ ID NO: 127503 - DNA, 5440 bp, Homo sapiens
atgaacatgaacatcaaaaaaattgtaaaacaagccacagttctgacttttacgactgcacttctggcaggaggagcgactcaagccttcgcgaaagaaaataaccaaaaagcatacaaagaaacgtacggcgtctctcatattacacgccatgatatgctgcagatccctaaacagcagcaaaacgaaaaataccaagtgcctcaattcgatcaatcaacgattaaaaatattgagtctgcaaaaggacttgatgtgtgggacagctggccgctgcaaaacgctgacggaacagtagctgaatacaacggctatcacgttgtgtttgctcttgcgggaagcccgaaagacgctgatgacacatcaatctacatgttttatcaaaagggattttgccgatttcggaaccaccatcaaacaggattttcgcctgctggggcaaaccagcgtggaccgcttgctgcaactctctcagggccaggcggtgaagggcaatcagctgttgcccgtctcactggtgaaaagaaaaaccaccctggcgcccaatacgcaaaccgcctctccccgcgcgttggccgattcattaatgcagctggcacgacaggtttcccgactggaaagcgggcagtgagcgcaacgcaattaataaccagtgccaaaagagaaaagaagaagaggggacagacaagaacaccaacaaccatgcaggaacaccgagggcacggccctgagggtgtgggccgcacgggatcaaactctttaaccggccctgacgagccgctgaacaaaacagggcttgtgctgcaaatgggtcttgatccaaacgatgtgacaaacaattactctcacttcgcagtgccgcaagccaaaggcaacaataaaaaaatcacaagaaacatgacaaacagaggcttcttcgaggataaaaaggcaacatttgcgccaagcttcttaatgaacatcaaaggcaataaaacatccgttgtcaaaaacagcatcctggagcaaaacactggggttgggggcggggtgccggagaggggggccaacggccctgaaaagacgggtgattccgcccctgggccgtgggaagaccgcggttctttgaatagtggactccttgttccagagactggacaaaaccaccgaaccctatcccggggctattctgtggaaataataaggattatgcccgatttcggaaccaccatcaaacaggattttcgcctgcgggggcaaaccagcgtggaccgcttgctgcaactctctcagggccaggcggtgaagggcaatcagctgttgcccgtctcactggtgaaaagaaaaaccaccctggcgcccaatacgcaaaccgcctctccccgcgcgttggccgattcattaatgcagctggcacgacaggtttcccgactggaaagcgggcaggattttgccgatttcggaaccaccatcaaacaggattttcgcctgctggggcaaaccagcgtggaccgcttgctgcaactctctcagggccaggcggtgaagggcaatcagctgttgcccgtctcactggtgaaaagaaaaaccaccctggcgcccaatacgcaaaccgcctctccccgcgcgttggccgattcattaatgcagctggcacgacaggtttcccgactggaaagcgggcagtgagcgcaacactggggggcactctaagtcaaggtacgttgtgactcttgctgacgctcagatacacagctatggtaaatttggggaaaataagagcaaatttcatggttcccagcttttgttacagagggcctactcaagaactcaggacaatagagaatgtcagaaaggtgagagggcatcgcagacatgggattttgccgatttcggaaccaccatcaaacaggattttcgcctgctggggcaaaccagcgtggaccgcttgctgcaactctctcagggccaggcggtgaagggcaatcagctgttgcccgtctcactggtgaaaagaaaaaccaccctggcgcccaatacgcaaaccgcctctccccgcgcgttggccgattcattaatgcagctggcacgacaggtttcccgactggaaagcgggcacaacagcagctcctgcccgacacctgggggcgggcacctcaatgggtacccggtgcctccctacgccttcttcttcccccctatgctgggtggactctccccgccaggcggtgaagggcaatcagctgttgcccgtctcactggtgaaaagaaaaaccaccctggcgcccagccaagctggatgcctctccccgcgcgttggccgattcattaatgcagctggcacgacaggtttcccgactggaaagcgggcagtgagcgcaacgcaattaatggatttttccgatttcgggaaccacccatcaaacaagcattttcgcctgctggggcaaacccagcgtggaccgcttgctgcaactctctcagggccaggcggtgaagggcaatcagctgttgcccgtctcactggtgaaaagaaaaaccaccctggcgcccaatacgcaaaccgcctctccccgcgcgttggccgattcattaatgcagctggcacgacaggtttcccgactggaaagcgggcagtgagcgcaacgcaattaatggattttgccgatttcgaaaccaccatcaaacaggattttccgctgctggggcaaaccagcgtggaccgcttgctgcaactctctcagggccagggggtgaagggcaatcagctgttgcccgtctcactggtgaaaagaaaaaccaccctggcgccccaatacgcaaaccgcctctccccgcgcgttggccgattcattaatgcagctggcacgacaggtttcccgactggaaagcgggcagaagtgggccatcgccctgatagagggtttttcgccctttgacgtggtagtccacgtttctttaatagtggatccttgttccaaactggaacaacactcaaccctatctggggctattcttttgatttataagggattttgccgatttcggaaccaccatcaaacaggattttcgcctgctggggcaaaccagcgtggaccgcttgctgcaactctctcagggccaggcggtgaagggcaatcagctgttgcccgtctcactggtgaaaagaaaaaccaccctggcgcccaatacgcaaaccgcctctccccgcgcgttggccgattcattaaatgcagctggcacgacaggtttcccgactggaaagcgggcagtgagcgcaacgcaattaatggggtcctctagagtagtacctgcaggggtgccagaaggaatagagagtgatgaagaaattaggcatttggatgaagaaataaagaaactgaatgaatccaaccttaaaattgaagcagatatgatgaaacttcagacccagaagactgcaggtgtccccgaagattgtgaagtttactctttgaattgttccgggggtgatagtgttaaaaagacctctccgggtaatgaacgtgaccagaagctgcttactgaggacgcatgggatgatttcatcctttcttttctactgattggtcacaagacacgggcgttcggtcgaagagtatctggtgtcatagaaattgccgatgggagtcgccgtcgtaaagctgctgcacttaccgaaagtgattatcgtgttctggttggcgagctggatgatgagcagatggctgcattatccagattgggtaacgattatcgcccaacaagtgcttatgaacgtggtcagcgttatgcaagccgattgcagaatgaatttgctggaaatatttctgcgctggctgatgcggaaaatatttcacgtaagattattacccgctgtatcaacaccgccaaattgcctaaatcagttgttgctcttttttctcaccccggtgaactatctgcccggtcaggtgatgcacttcaaaaagcctttacagataaagaggaattacttaagcagcaggcatctaaccttcatgagcagaaaaaagctggggtgatatttgaagctgaagaagttatcactcttttaacttctgtgcttaaaacgtcatctgcatcaagaactagtttaagctcacgacatcagtttgctcctggagcgacagtattgtataagggcgataaaatggtgcttaacctggacagtctgggcccccgtccccactggtgtggccggtctaataagcggtctggaaccacggtcccactggattgtcgatcagactaccagcgtgatgcacttcaaaaagcctttacagataaagaggaattacttaagcagcaggcatcgaaccttcatgagcagaaaaaagatagggtgatatttgaagctgaaggcagaccttcatactccaagtggcgccttaacccaaggcaaagaaggcatagtcaatggaatggggaaattcaagattccccttttcctggtttaagaaataggttctctcgcaaggccattataaatcagctctttgatctttggcagcattgcagcctcccagtttgtgtgggctctgtcaggttcactgctgcagatggaagctctggaatgcctccttcagggacttctggaaagcacagatcaagccaggcactgaagtgtgcattcatgtctcctcttagtgctctctcagtttcccagttgttgcttcttccatacaatggcagtattgaaagtacctgcatccaagatgattgtaagggtcgctacaaatgtctatataaagctctcagcacatgggattttgccgatttcggaaccaccatcaaacaggattttcgcctgctggggcaaaccagcgtggaccgcttgctgcaactctctcagggccaggcggtgaagggcaatcagctgttgcccgtctcactggtgaaaagaaaaaccaccctggcgcccaatacgcaaaccgcctctccccgcgcgttggccgattcattaatgcagctggcacgacaggtttcccgactggaaagcgggcagcagtcttccaaacagaagaaggccattcaaactgctatccgcaaaaataaagaggcaaacgcagtgctggctcggctgaacagtgagctccagcagcagctcaagggatttgccgattttcgggaaccacccatcaaacaggattttcgcctgctggggcaaaccagcgtggaccgcttgctgcaactctctcagggccaggcgatcacagaactgtgtggtgcaaagcgggttggttattttggtccaacacagttttacattgccctgaaattaattgctgcagcacaatctggcctcccggtacggatagagagtattaaatgtggaaacagctatgaccatgattacgaattcgagctcggtaccctggtgcttcctcgctcactcgagggcttcgccctgtcgctcaactgcggcgagcactactggctgtaa

SEQ ID NO: 127504 - DNA, 6014 bp, Homo sapiens
  misc_feature (1)...(6014): n = a,t,c or g
atgaaaattcgaggacgggttgagcaacgtgttggttatacaattgaacaaattaatcatatgcgtgatgtgtttggtacgcgattgcgacgtgctgaagacgtatttccaccggtgatcggggttgctgcccataaaggtggcgtttacaaaacctcagtttctgttcatcttgctcaggatctggctctgaaggggctacgtgttttgctcgtggaaggtaacgacccccagggaacagcctcaatgtatcacggatgggtaccagatcttcatattcatgcagaagacactctcatgcctttctatcttggggaaaaggacgatgtcacttatgcaataaagcccacttgctggccggggcttgacattattccttcctgtctggctctgcaccgtattgaaactgagttaatgggcaaatttgatgaaggtaaactgcccaccgatccacacctgatgctccgactggccattgaaactgttgctcatgactatgatgtcatagttattgacagcgcgcctaacctgggtatcggcacgattaatgtcgtatgtgctgctgatgtgctgattgttcccacgcctgctgagttgtttgactacacctccgcactgcagtttttcgatatgcttcgtgatctgctcaagaacgttgatcttaaaggggattttgccgatttcggaaccaccatcaaacaggattttcgcctgctggggcaaaccagcgtggaccgcttgctgcaactctctcagggccaggcggtgaagggcaatcagctgttgcccgtctcactggtgaaaagaaaaaccaccctggcgcccaatacgcaaaccgcctctccccgcgcgttggccgattcattaatgcagctggcacgacaggtttcccgactggaaagcgggcaggattttgccgatttcggaaccaccatcaaacaggattttcgcctgctggggcaaaccagcgtggaccgcttgctgcaactctctcagggccaggcggtgaagggcaatcagctgttgcccgtctcactggtgaaaagaaaaaccaccctggcgcccaatacgcaaaccgcctctccccgcgcgttggccgattcattaatgcagctggcacgacaggtttcccgactggaaagcgggcactggaaaccaaaagcaagacgcagcaccagcgctcacctccgccgcctgccgcctgccgccagccgccgggtctggctcgccctgggctcctgccccttaccgctggagagctcgccggcgcacagggcctatgagcgaccgtcagcagtttatcgatgaaggcaattatacatccggcgacaaccatacgctgagagcgcgggtcggggtggccagggaaggggatcctctagagtcgaaccgggggtcagcacccaaaacagaaaccggataccaaggcgaagaatctttatttaacaaagcgtactacggcggcggcacgaacttcttccgtaaagaaagccagaagcttcagcagagcgctaaaaaacgcgatgctgagttagcgaacggcgccctcggtatcatagagttaaataatgattacacattgaaaaaagtaatgaagccgctgatcacttcaaacacggtaactgatgaaatcgagcgcgcgaatgttttcaaaatgaacggcaaatggtacttgttcactgattcacgcggttcaaaaatgacgatcgatggtattaactcaaacgatatttacatgcttggttatgtatcaaactctttaaccggcccttacaagccgctgaacaaaacagggcttgtgctgcaaatgggtcttgatccaaacgatgtgacattcacttactctcacttcgcagtgccgcaagccaaaggcaacaatgtggttatcacaagctacatgacaaacagaggcttcttcgaggataaaaaggcaacatttgcgccaagcttcttaatgaacatcaaaggcaataaaacgggggattttgccgatttcggaaccccccatcaaacaggattttcgcctgctggggcaaaccagcgtggaccgcttgctgcaactctctcagggccaggcggtgaagggcaatcagctgttgcccgtctcactggtgaaaagaaaaccacccctggcgcccaatacgcaaaccgcctctccccgcgcgttggccgattcattaatgcagctggcacgacaggtttcccgactggaaagcgggcaggattttgccgatttcggaaccaccatcaaacaggattttcgcctgctggggcaaaccagcgtggaccgcttgctgcaactctctcagggccaggcggtgaagggcaatcagctgttgcccgtctcactggtgaaaagaaaaaccaccctggcgcccaatacgcaaaccgcctctccccgcgcgttggccgattcattaatgcagctggcacgacaggtttcccgactggaaagcgggcaggattttgccgatttcggaaccaccatcaaacaggattttcgcctgctggggcaaaccagcgtggaccgcttgctgcaactctctcagggccaggcggtgaagggcaatcagctgttgcccgtctcactggaaaaggcagcaaagtggaaaaaccccgacggccacatggatgggctcactactaatggcgtcctggccgatgcatccacgagggggcttcaccgaggagtcccagcccggggtctggcgcgagatctctgtctgtggagatgtgtacaccttgcgagaaaccaggtcggcccagcaacgaggaaagctggattttcgcctgctggggcaaaccagcgtggaccgcttgctgcaactctctcagggccaggcggtgaagggcaatcagctgttgcccgtctcactggtgaaaagaaaaaccaccctggcgcccaatacgcaaaccgcctctccccgcgcgttggccgattcattaatgcagctggcacgacaggtttcccgactggaaagcgggcaggattttgccgatttcgaaaccacccatcaaacaggattttcgcctgctggggcaaaccagcgtggtaccgcttgctgcaaattctttccagggccagccggtgaaaggccaatcagctgttgcccgtttcactggtgaaaagaaaaaccaccctggcgcccaatacgcaaaccgcctctccccgcgcgttggccgattcattaatgcagctggcacgacaggtttcccgactggaaagcgggcacgtttttcgccctatcgacgttggagtccaccgttctcaaaaagtgaatcctggttccaaactgaaacatcacctcacccctattcggggttatcttttaatttataaggacttttgcgattttgtaaccaccatcaaacaggaatttcggcctgctgcggcaaaccagcgtggaccgcttgctgcaattctctcagggccaggcggtgaagggcaatcagctgttgcccgtctcactggtgaaaagaaaaaccaaccctggcgcccaatacgcaaaccgcctctccccgcgcgttggccgattcattaatgcagctggcacgacaggttttcccgactggaaagcgggcaagaataaaatacctaggaatccaacttacaagggatgtgaaggacctcttcaaggagaactacaaaccactgctcaaggaaataaaagaggatacaaacaaatggaagaacattccatgctcatgggtaggaagaatcaatatcgtgaaaatggccatactgccacagtgcttacggcaccctcgacccaaaaactttgatttgggtgagggttcacgaagtgggccatcgcccttatagacggtttttcgcccttgacgtttggagtccacgttctttaatagtggactcttgttccaaactggaacaacactcaaccctatctcgggctattcttttgatttataagggattttgccgatttcggaaccaccatcaaacaggattttcgcctgctggggcaaaccagcgtggaccgcttgctgcaactctctcagggccaggcggtgaagggcaatcagctgttgcccgtctcactggtgaaaagaaaaaccaccctggcgcccaatacgcaaaccgcctctccccgcgcgttggccgattcattaatgcagctggcacgacaggtttcccgactggaaagcgggcagtgagcgcaacgcaattaatagctctcctgtgccagaaatgcattattcctgccctgtcctccccctcgcagcctccaaaggctggcaaattgtcccccacggtccctgttttcaaaaatgcagctggctgtagacagtgtgacaatctaaaaacttgtcacacttcacatggatctgtcatggcggaaacagcggttatcaatcacaagaaacgtaaaaatagcccgcgaatcgtccagtcaaacgacctcactgaggcggcatatagtctctcccgggatcaaaaacgtatgctgtatctgttcgttgaccagatcagaaaatctgatggcaccctacaggaacatgacggtatctgcgagatccatgttgctaaatatgctgaaatattcggattgacctctgcggaagccagtaaggatatacggcaggcattgaagagtttcgcggggaaggaagtggttttttatcgccctgaagaggatgccggcgatgaaaaaggctatgaatcttttccttggtttatcaaacttcaagagctgtttagtctcatggccatttgggcagcagttaagatgatagcaggtagtgagaccaaagtttctggactagaacctacgtttcaggtgcatgggattgaattcaaaagattgggatttgggctaagaaatggcccttcccctaaaaccggtttttcgccctttgccgttgaagtccaccgtcctttaatagtggaattcttggtcccaactggaacaacactcaacctatcctcgggctatcttttgatttataagggattttgccgatttcggacccaccatcaaacaggattttcgcctgctggggcaaaccagcgtggaccgcttgctgcaactctctcagggccaggcggtgaagggcaatcagctgttgcccgtctcactggtgaaaagaaaaaccaccctggcgcccaatacgcaaaccgcctctccccgcgcgttggccgattcattaatgcagctggcacgacaggtttcccgactggaaagcgggcagtgagcgcaacgcaattaatcctgccaggttatctgacgctgccgtcagaaaaacaggttgatttgcagtcgtatctggaagcgaacacgccgaaagcgacgctggctgatcaggtgaactactggagcaactatccgaagttcttcgttagcctgatgaaatctttctatggcgatgccgcgcagaaagagaacaactggggctatgactggctgccgaagtgggaccagacctacgacgtcatcaagtatttcaacatgatggatgaaggcaaagtcaccggttatttctgccagggctttaacccggttgcgtccttcccggacaaaaacaaagtggtgagctgcctgagcaagctgaagtacatggtggttatcgatccgctggtgactgaaacctctaccttctggcagaaccacggtgagtcgaacgatgtcgatccggcgtctattcagactgaagtattccgtctgccttcgacctgctttgctgaagaagatggttctatcgctaactccggtcgctggttgcagtggcactggaaaggtcaggacgcgccgggcgaagcgcgtaacgacggtgaaattctggcgggtatctaccatcatctgcgcgagctgtaccagtccgaaggtggtaaaggcgtagaaccgctgatgaagatgagctggaactacaagcagccgcacgaaccgcaatctgacgaagtggctaaagagaacaacggctacgcgctggaagatctctatgacgctaatgggggatnctttagagtccaacaaagcaggcattgcaagtcctga

SEQ ID NO: 127505 - DNA, 1042 bp, Homo sapiens; identical to SEQ ID NO: 127325

SEQ ID NO: 127506 - DNA, 1180 bp, Homo sapiens
ttaagattcaaggagtccagtaactgtgcggcaaggcatactgggacagttgcctgacacctggcatcctgggttgtggccctcgtccttcactggggatgtgtttgggttactgcagaatcttccacgagcaaaacacgtagccccttcagagccagatcctggattggggaggcggttgccgccgctgctgctgacggtgtgacgttctctgttccggtcacaccacatacgttccgccattcctatgcgatgcacatgctgtatgccggtataccgctgaaagttcttgcaaagcctgatgggacataagtccatcagttcaacgggggtaccgagctcgaattcgtaatcatggtcatagctgtttcctgtatcgaagagcagacccttgcccagcacctgctccaggccactcttagggctgctgggggcaggggcatcaggaggcctggagcctgtggcctcttcctgcccgtgctctctgaggcctgtgaagggccagctagtgtgaatcactaggaattcaagtttggcagcctgcgctgttgtcaggctttgtttgccgtaatgtttaccggaatagtcagtgtagaataaacggatttttccgtcagatgtaaaggttgcagaaccggaccattcttgcgtctgatctttcaggatcggatcgttggcgtcgaacttatgcgctgtctttaaagacacggcccgcgtttttccagccttttgataaaacatgtagattgatgtgtcatcagcgtctttcgggcttcccgcaagagcaaacacaacgtgatagccgttgtattcagctactgttccgtcagcgttttgcagcggccagctgtcccacacatcaagtccttttgcagactcaatatttttaatcgttgattgatcgaattgaggcacttggtatttttcgttttgctgcagtgagacgggcaacagctgattgcccttcaccgcctggccctgagagagttgcagcaagcggtccacgctggtttgccccagcaggcgaaaatcctgtttgatggtggttccgaaatcggcaaaatcccccaaatcaattacatcagaaatctgggagtgctggggaggtttctgagttttggaagtgccccagtggcacttgagtgccagatgactcccatgggcagccacgtctaatttc

SEQ ID NO: 127507 - DNA, 1293 bp, Homo sapiens; identical to SEQ ID NO: 127330

SEQ ID NO: 127508 - DNA, 1341 bp, Homo sapiens; identical to SEQ ID NO: 119092
  misc_feature (1)...(1341): n = a,t,c or g

SEQ ID NO: 127509 - DNA, 735 bp, Homo sapiens; identical to SEQ ID NO: 119097

SEQ ID NO: 127510 - DNA, 1350 bp, Homo sapiens; identical to SEQ ID NO: 119093
  misc_feature (1)...(1350): n = a,t,c or g

SEQ ID NO: 127511 - DNA, 1749 bp, Homo sapiens; identical to SEQ ID NO: 124762

SEQ ID NO: 127512 - DNA, 783 bp, Homo sapiens; identical to SEQ ID NO: 119094

SEQ ID NO: 127513 - DNA, 396 bp, Homo sapiens
atggtgaaagttggaacctcttacgtgccgatcaacgtctcattttcgccaaaagttggcccagggcttcccggtatcaacagggacaccaggatttatttattctgcgaagtgatcttccgtcacaggaaggacagagaaagcgcggatctgggaagtgacggacagaacggtcccagaccctggattggggaggcggttgccgccgctgctgctgacggtgtgacgttctctgttccggtcacaccacatacgttccgccattcctatgcgatgcacatgctgtatgccggtataccgctgaaagttctgcaaagcctgatgggacataagtccatcagttcaacggaagtctacacgaaggtttttgcgctggatgtggctgcccggcaccgg

SEQ ID NO: 127514 - DNA, 515 bp, Homo sapiens
cgcgcctaacctggggtatcggcacgattaatgtcgtatgtgctgctgatgtgctgattgttcccacgcctgctgagttgtttgactacacctccgcactgcagtttttcgatatgcttcgtgatctgctcaagaacgttgatcttaaagggttcgagcctgatgtacgtattttgcttaccaaatacagcaatagtaatggctctcagtccccgtggatggaggagcaaattcgggatgcctggggaagcatggttctaaaaaatgttgtacgtgaaacggatgaagttggtaaagaacccccgtccaccaatacgttccgccattcctatgcgatgcacatgctgtatgccggtataccgctgaaagttctgcaaagcctgatgggacataagtccatcagttcaacggaagtctacacgaaggtttttgcgctggatgtggctgcccggcaccgggtgcagtttgcgatgccggagtctgatgcggttgcgatgctgaaacaattatcctga

SEQ ID NO: 127515 - DNA, 547 bp, Homo sapiens; identical to SEQ ID NO: 119096

SEQ ID NO: 127516 - DNA, 1113 bp, Homo sapiens; identical to SEQ ID NO: 119098

SEQ ID NO: 127517 - DNA, 873 bp, Homo sapiens; identical to SEQ ID NO: 119100

SEQ ID NO: 127518 - DNA, 1425 bp, Homo sapiens; identical to SEQ ID NO: 119112

SEQ ID NO: 127519 - DNA, 1602 bp, Homo sapiens; identical to SEQ ID NO: 127341

SEQ ID NO: 127520 - DNA, 1239 bp, Homo sapiens; identical to SEQ ID NO: 119102

SEQ ID NO: 127521 - DNA, 1026 bp, Homo sapiens; identical to SEQ ID NO: 124784

SEQ ID NO: 127522 - DNA, 702 bp, Homo sapiens
atgcctgattcagggctctctctggtttctgcagattatgtggatgatgacatgtttttccaagtcattaacctgggcacagctttggggccaaatgagaagctacatccaaaccatttaagagtctgggtgattggtgggactgacaaaggaaagaccctctgtcattgcccacggacccctagcgggggggagggtggaaggggcctgcttgtggacctactcggggctgttatcgacaatgtgcttttccgcccccaggaggacgagcaaggggatgagaataaggcccgagggaactggtccagcaaactggacttcatcctgtccatggtatttattcgagataagctcatggagcggcgtaaccgtcgcacaggaaggacagagaaagcgcggatctgggaagtgacggacagaacggtcaggacctggattggggaggcggttgccgccgctgctgctgacggtgtgattttctctgttccggtcacaccacatgcggtccgccattcctatgcgatgcacatgctgtatgccggtataccgctgaaagttctgcaaagcctgatgggacataagtccatcagttcaacggaagtctacacgaaggtttttgcgctggatgtggctgcccggcaccgggtgcagtttgcgatgccggagtctgatgcggttgcgatgctgaaacaattatcctga

SEQ ID NO: 127523 - DNA, 1281 bp, Homo sapiens; identical to SEQ ID NO: 119103

SEQ ID NO: 127524 - DNA, 751 bp, Homo sapiens
tcgttcatcacgcttgtttagtcgcttgcaagagctgtttgctactggcgagggtattgtttttatctcgcataagctgccggaaattcgccagattgccgatcgaattagcgtgatgcgcgacggaaccatcgccttaagcggcaaaaccagcgaactgtctaccgacgacattattcaggccatcaccccagcggtacgggaaaaatcgctctctgccagccaaaaattatggctggagttacctgggggggagactgaagccagcgtgcacgcgagcgtgggccggcaagcaaccgatgcgtcgtttgaactcaagagtgagttgcggcctaatgcagcacaactctgcatgaacgtacgggcatatggccaacgtactgtatttattcgcgataagctcatggagcggcgtaaccgtcgcacaggaaggacagagaaagcgcggatctgggaagtgacggacagaacggtcaggacctggattggggaggcggttgccgccgctgctgctgacggtgtgacgttctctgttccggtcacaccacatacgttccgccattcctatgcgatgcacatgctgtatgccggtataccgctgaaagttctgcaaagcctgatgggacataagtccatcagttcaacggaagtctacacgaaggtttttgcgctggatgtggctgcccggcaccgggtgcagtttgcgatgccggagtctgatgcggttgcgatgctgaaacaattatcctga

SEQ ID NO: 127525 - DNA, 708 bp, Homo sapiens; identical to SEQ ID NO: 127347

SEQ ID NO: 127526 - DNA, 895 bp, Homo sapiens; identical to SEQ ID NO: 119104

SEQ ID NO: 127527 - DNA, 840 bp, Homo sapiens
atgcccacctttggcaaacgatgcttaaacctttgcacgtggcttcaaaaattacctggctgggaacgcgtagctctggcggggcactctgcctccaagccaaaagggggcagtggactcacagagccgctgctcggccctccgatccctccaccccaccctgggaacgtcacgacctcctctcgccgcttctccccgttgctaatgcgcaggcgctggcgggatagcgcgccgccgagccgagaaagagaaagctctctccgccgtgaatctcgatcccacatcccgtcggctttcttcaacctctcttcccggagcgccccccaatccacgagtggcagccgcgggactgtcgcgtcggcgcccgacgccggagtcagcagggcgcaaaagcgccgttggcccagggcttcccggtatcaacagggacaccaggatttatttattctgcgaagtgatcttccgtcacaggtatttattcgcgataagctcatggagcggcgtaaccgtcgcacaggaaggacagagaaagcgcggatctgggaagtgacggacagaacggtcaggacctggattggggaggcggttgccgccgctgctgctgacggtgtgacgttctctgttccggtcacaccacatacgttccgccattcctatgcgatgcacatgctgtatgccggtataccgctgaaagttctgcaaagcctgatgggacataagtccatcagttcaacggaagtctacacgaaggtttttgcgctggatgtggctgcccggcaccgggtgcagtttgcgatgccggagtctgatgcggttgcgatgctgaaacaattatcctga

SEQ ID NO: 127528 - DNA, 1419 bp, Homo sapiens; identical to SEQ ID NO: 117440

SEQ ID NO: 127529 - DNA, 768 bp, Homo sapiens; identical to SEQ ID NO: 119106

SEQ ID NO: 127530 - DNA, 519 bp, Homo sapiens
atgagtgaactcccattcacaattgctttaaagagaataaaatacctaggaatccaacttacaagggatgtgaaggacctcttcaaggagaactacaaaccactgctcaacgaaataaaagaagacacaaacaaatgggagaacattccatgctcatggataggaagaatcaatatcgtgaaaatggccatactgcccaagaattggaaaaaactaaagttcatatggaaccaaaaaagagcccgcgttgccaagacaatcctcagccaaaagaacaaagctggaggcaccacgctacctgacttcaaactatactacaaggctacagtaaccaaaacagcatggtcgactctagaggatcccctatgcgatgcacatgctgtatgccggtataccgctgaaagttctgcaaacctgatgggacataagtccatcagttcaacggaagtctacacgaaggtttttgcgctggatgtggctgcccggcaccgggtgctagtttgcgatgccggagtctga

SEQ ID NO: 127531 - DNA, 2787 bp, Homo sapiens; identical to SEQ ID NO: 127351

SEQ ID NO: 127532 - DNA, 627 bp, Homo sapiens
atgtccctctgggtgcggggtccgcatgcccgcgccctccccgcagctgccggcgtccccattaatcacgcggcgctgacggcgctgatctgcgtgctggcggccacggagatccagtctgaactagcacaaggagcaagtgctgggaacagcgtccgggtacttagccccacctcaggcaccacggagccagcagggaaggacaggcctggcaagggcaagaacgcagctctcatcctactgggaaggcacattccagtatttattcgcgataagctcatggagcggcgtaaccgtcgcacaggaaggacagagaaagcgcggatctgggaagtgacggacagaacggtcaggacctggattggggaggcggttgccgccgctgctgctgacggtgtgacgttctctgttccggtcacaccacatacgttccgccattcctatgcgatgcacatgctgtatgccggtataccgctgaaagttctgcaaagcctgatgggacataagtccatcagttcaacggaagtctacacgaaggtttttgcgctggatgtggctgcccggcaccgggtgcagtttgcgatgccggagtctgatgcggttgcgatgctgaaacaattatcctga

SEQ ID NO: 127533 - DNA, 2457 bp, Homo sapiens
  misc_feature (1)...(2457): n = a,t,c or g
atgctggatggcccactgttctccgaggggcctgacagcccccgggagctccaggatgaggagtctggcagctgcctctgggtgcagaagtccaagctattggtgatagaagtgaagactatttcctgtcattatagtcgccgcgccccttctcgacagcccatggacttccaggccagccactgggctcgcgggttccagaaccgcacgtgtgggccgcgcccgggatccccacagccgccgccccgccggccctgggcctccagggtgctgcaggaggcgaccaactggcgggcggggcccctggccgaggtccgagctcgggagcaagagaaaaggaaagcggcgtcgcaggagcgggaggccaaggagaccgagcgaaaaaggcgcaaggctggtggggcccgacggagccccccgggtcgaccccgcccggagccccgcaacgcccctcgggtggcccagctggcagggctccctgctcccttgcggccggagcgcctggcgcctgtggggcgagcgccccgtccatccgcgcagccgcagagcgacccagggtcggcgtgggcggggccctggggaggtcggcggcccgggcccccaagctacgaggctcacctgctgctgagaggttctgccgggaccgccccacgacgccgctgggaccggccgccaccctacgtggctccaccttcttacgaaggcccccataggaccttggggactaagagaggccccgggaactctcaggtgcccacttcatcagccccagctgcgactccagccaggacagacggagggcgcacaaagaagaggctggatcctcggatctaccgggacgtcctcggggcttggggtctccgacaggggcaaggtctcttggggggatccccaggctgtggagcggccagagcaaggccagagcccggcaagggggtcgtggagaaaagcctggggctggctgctgctgacctgaacagtggtagcgacagccatccccaagccaaagctacagggagcgcaggcaccgagatagctcctgcggggtctgcaactgcggctccctgtgccccgcatcccgctcccagatccaggcaccacctcaagggctcgagggaagggaaagaaggagaacagatctggtttcccaaatgctggattccctcccctaaaaagcagccgccccgccatagccagacactccccagaccctgggctcccggaggcaccggatggagagaatctctgggtcttggagagggggcaggaccggagaccctggagggttggaaggcgacccgccgtgcccacaccttgccccgcagttcccagggcctgtcccgtggggaaggcgtctttgtcattgacgccacgtgcgtagtgatacgatcccaatatgttccaaccccccgaacccagcaggtgcagcttttgccctctggggtgacacgcgtggtgggggattcccccagccaatcgaagcccggcaaggaggagggtgaaggggccacggtctttccttccccttgtcaaaagcggctgtcgagcagtcgccttttacaccagcccggcgggggccgcgggggcgaagctgagggcgggaggccgggggactccacactggaggagcgcactttccgcatcttggggctcccggcccccgaagtaaacctgcgggacgcccccacgcagccaggtagcccagagcaccaagccttaggcccagcagcttcgggagcccagggcagagccgaggggtcggaagtggcggtggtccagcggcgcgccggccggggctgggcgcggaccccagggccctacgccggggccctgcgagaagccgtgtcccgtatccgccgccacacagcccctgactcggacacggacgaagctgaggagctcagcgtccatagcggctcctctgatggaagcgacacagaagccccgggcgcctcctggcggaatgagaggaccctgcccgaggttggaaacagttcgccagaggaagatgggaagacagcggaactgagcgacagtgtcggggagatcctagatgtcataagccaaaccgaggaggtcctcttcggngtatttattcgcgataagctcatggagcggcgtaaccgtcgcacaggaaggacagagaaagcgcggatctgggaagtgacggacagaacggtcaggacctggattggggaggcggttgccgccgctgctgctgacggtgtgacgttctctgttccggtcacaccacatacgttccgccattcctatgcgatgcacatgctgtatgccggtataccgctgaaagttctgcaaagcctgatgggacataagtccatcagttcaacggaagtctacacgaaggtttttgcgctggatgtggctgcccggcaccgggtgcagtttgcgatgccggagtctgatgcggttgcgatgctgaaacaattatcctga

SEQ ID NO: 127534 - DNA, 1434 bp, Homo sapiens; identical to SEQ ID NO: 119110

SEQ ID NO: 127535 - DNA, 2311 bp, Homo sapiens
aaacaaaaaaaacatcacgaatctttcccgcttagttgtccgcccccacacagatgctgtttaccatgcctgcttttctgaggatggtcagagaatagcttcttgtggagctgataaaaccttacagctgcaggctcgggcctccggctccacagagcaggcaggaccccttccccctggtgcagctgtagctgcccaagcggtggctgcagactcaggcatccctgtactcttgggggacctggaaggaccccctgcccttgtgttcaaagctgaaacaggagagaaacttctagaaatcaaggctcatgaggatgaagtgctttgttgtgcattctctacagatgacagatttatagcaacctgctcagtggataaaaaagtgaagatttggaattctatgactggggaactagtacacacctatgatgagcactcagagcaagtcaattgctgccatttcaccaacagtagtcatcatcttctcttagccactgggtcaagtgactgcttcctcaaactttgggatttgaatcaaaaagaatgtcgaaataccatgtttggtcatacaaattcagtcaatcactgcagattttcaccagatgataagcttttggctagttgttcagctgatggaaccttaaagctttgggatgcgacatcagcaaatgagaggaaaagcattaatgtgaaacagttcttcctaaatttggaggaccctcaagaggatatggaagtgatagtgaagtgttgttcgtggtctgctgatggtgcaaggataatggtggcagcaaaaaataaaatctttctttttgacattcatactagtggcctattgggagaaatccacacgggccatcacagcaccatccagtactgtgacttctccccacaaaaccatttggcagtggttgctttgtcccagtactgtgtagagttgtggaatacagactcacgttcaaaggtggctgattgcagaggacatttaagttgggttcatggtgtgatgttttctcctgatggatcatcatttttgacatcttctgatgaccagacaatcaggctctgggagacaaagaaagtatgtaagaactctgctgtaatgttaaagcaagaagtagatgttgtgtttcaagaaaatgaagtgatggtccttgcagttgaccatataagacgtctgcaactcattaatggaagaacaggtcagattgattatctgactgaagctcaagttagctgctgttgcttaagtccacatcttcagtacattgcatttggagatgaaaatggagccattgagattttagaacttgtaaacaatagaatcttccagtccaggtttcagcacaagaaaactgtatggcacatccagttcacagccgatgagaagactcttatttcaagttctgatgatgctgaaattcaggtatggaattggcaattggacaaatgtatctttctacgaggccatcaggaaacagtgaaagactttagactcttgaaaaattcaagactgctttcttggtcatttgatggaacagtgaaggtatggaatattattactggaaataaagaaaaagactttgtctgtcaccagggtacagtactttcttgtgacatttctcacgatgctaccaagttttcatctacctctgctgacaagactgcaaagatctggagttttgatctccttttgccacttcatgaattgaggggccacaacggctgtgtgcgctgctctgccttctctgtggacagtaccctgctggcaacgggagatgacaatggagaaatcaggatatggaatgtctcaaacggtgagcttcttcatttgtgtgctccgctttcagaagaaggagctgctacccatggaggctgggtgactgacctttgcttttctccagatggcaaaatgcttatctctgctggaggatatattaaggtatttattcgcgataagctcatggagcggcgtaaccgtcgcacaggaaggacagagaaagcgcggatctgggaagtgacggacagaacggtcaggacctggattggggaggcggttgccgccgctgctgctgacggtgtgacgttctctgttccggtcacaccacatacgttccgccattcctatgcgatgcacatgctgtatgccggtataccgctgaaagttctgcaaagcctgatgggacataagtccatcagttcaacggaagtctacacgaaggtttttgcgctggatgtggctgcccggcaccgggtgcagtttgcgatgccggagtctgatgcggttgcgatgctgaaacaattatcctga

SEQ ID NO: 127536 - DNA, 606 bp, Homo sapiens
atggaagcgccgacagcggcggcccgggcccctgccctccccgcgcctgcgacgcggtcgcccctggggcgcccgccgggcggacagcccgtgaggcccggcaacctgggcgccgcctgggagcgaggggcccggcaggccgcgcataaaccatgctgtgatgtcacagctaccatagaactccagggtagtgttgggctggcccatgtgggctcaggggttgtagaaggtgatttagctgccatagaagcatacaagtcatcaggaggagacattgcacgtcagctcaccgcagatgaagtacgcttgctgaatcgtccttctgcctttgatgttggctatactcttgtacacttggctatacgttttcagaggcaggatatgctagcaatattgcttacagaggggaagacccattcctatgcgatgcacatgctgtatgccggtataccgctgaaagttctgcaaagcctgatgggacataagtccatcagttcaacggaagtctacacgaaggtttttgcgctggatgtggctgcccggcaccgggtgcagtttgcgatgccggagtctgatgcggttgcgatgctgaaacaattatcctga

SEQ ID NO: 127537 - DNA, 765 bp, Homo sapiens
atggtgccacactcaacaggcaaatcttggaacggctgtgacccaacatctgctacactggatcagctggtcactgtcttcttcatgaaactctttagcattggggatgccagaattccctgtctgggaccacggtcccactcgtatcgtcggtctgattattattctgggaccacgatccactcgtgttgtcgggctgattattggtctgggaccacggcccacttgtattgtcgatcagactatcaccctgtgccttccttcatcctggtgacctccactaccaaccaccagcctcttaaaccaagcatctcagaggcctcgtggaatcccctctttgcctccctccccacttgcagctcattactgagtcgtgttatgtccctggctaccactgtatttattcgcgataagctcatggagcggcgtaaccgtcgcacaggaaggacagagaaagcgcggatctgggaagtgacggacagaacggtcaggacctggattggggaggcggttgccgccgctgctgctgacggtgtgacgttctctgttccggtcacaccacatacgttccgccattcctatgcgatgcacatgctgtatgccggtataccgctgaaagttctgcaaagcctgatgggacataagtccatcagttcaacggaagtctacacgaaggtttttgcgctggatgtggctgcccggcaccgggtgcagtttgcgatgccggagtctgatgcggttgcgatgctgaaacaattatcctga

SEQ ID NO: 127538 - DNA, 765 bp, Homo sapiens
atgtggaagcgactttggagctgggtaacaggcagaggttggaacagtttggaggactcagaagaagacaagaaaatgtgggaaagtttggaacctcctagagacttgttgaatggctttgacaaaaatgctgatagtgatatgaacaataaggtccaggctgaagtagtctcagatgtaggtgaggaacttgttgggaactggagcaaagaattggttccttccattatgagcaacttgttgaattcagatgccattttctcaaacaatgaaatgagcctgtcagacattgaaatctatggcttcgattatgattacaccttggtgttttattcaaagcacctccacacgctgatatttaatgctgcacgggaccttctcatcaatgaacaccgggtatttattcgcgataagctcatggagcggcgtaaccgtcgcacaggaaggacagagaaagcgcggatctgggaagtgacggacagaacggtcaggacctggattggggaggcggttgccgccgctgctgctgacggtgtgacgttctctgttccggtcacaccacatacgttccgccattcctatgcgatgcacatgctgtatgccggtataccgctgaaagttctgcaaagcctgatgggacataagtccatcagttcaacggaagtctacacgaaggtttttgcgctggatgtggctgcccggcaccgggtgcagtttgcgatgccggagtctgatgcggttgcgatgctgaaacaattatcctga

SEQ ID NO: 127539 - DNA, 618 bp, Homo sapiens
atgggttacggtaaaacgttcctctccgtcctgcgccagcaatgttcctttctcaaacggcataaaattcagcgtgtcacttgccatatgcatttcgaaggacggcgagtggcgaatagcagcgcagcaattgcgcttgcagttactgcaaactggcgaagatcgttttgcccaaaggtcaacgctttgccaagttccagcgtacaggccagcgcgccaaaatgtctggcgcttgaaatgttcggacccgtatttattcgcgataagctcatggagcggcgtaaccgtcgcacaggaaggacagagaaagcgcggatctgggaagtgacggacagaacggtcaggacctggattggggaggcggttgccgccgctgctgctgacggtgtgacgttctctgttccggtcacaccacatacgttccgccattcctatgcgatgcacatgctgtatgccggtataccgctgaaagttctgcaaagcctgatgggacataagtccatcagttcaacggaagtctacacgaaggtttttgcgctggatgtggctgcccggcaccgggtgcagtttgcgatgccggagtctgatgcggttgcgatgctgaaacaattatcctga

SEQ ID NO: 127540 - DNA, 1206 bp, Homo sapiens; identical to SEQ ID NO: 119109

SEQ ID NO: 127541 - DNA, 858 bp, Homo sapiens; identical to SEQ ID NO: 127354

SEQ ID NO: 127542 - DNA, 930 bp, Homo sapiens
atgatcatctcaacagactctgaaaaagcgtttcacaaaatccagcatccctttgtgattaaaaccctctgcaaaatcagcatacaagggacatacctaactgtaataaaagccatctgtgacaaacccacagccaacattatactgaatggggaaaagttgaaagctttccccctgagaactggaacaagacaaggatgcccactttcaccacttctattcaacgtagtactggaagtcctagccagagcaatcaaacaagagaaagaagtaaagggcatccaaatcagtaaagaggattcaaactgctactgtttgctgatttgctgctgttttctagagctagaaaaaataatcctaaaatttgtatggaaccaaaaaaggccctgcatagccaaagcaagactaagcaaaaagaacaaatctggaggcatcacattatccaagttcaaactatactacaaggctatcgttaccaaaacagcatgttggcccagggcttcccggtatcaacagggacaccaggatttatttattctgcgaagtgatcttccgtcacaggtatttattcgcgataagctcatggagcggcgtaaccgtcgcacaggaaggacagagaaagcgcggatctgggaagtgacggacagaacggtcaggacctggattggggaggcggttgccgccgctgctgctgacggtgtgacgttctctgttccggtcacaccacatacgttccgccattcctatgcgatgcacatgctgtatgccggtataccgctgaaagttctgcaaagcctgatgggacataagtccatcagttcaacggaagtctacacgaaggtttttgcgctggatgtggctgcccggcaccgggtgcagtttgcgatgccggagtctgatgcggttgcgatgctgaaacaattatcctga

SEQ ID NO: 127543 - DNA, 924 bp, Homo sapiens
atgtctcctcagtggagtgccaagttagggtatggacctttaaccacgcatcaagcagtcactgaatgtgggctgccccagggaaaggcacatgaccttgagggaaaaggctcagaagctgaggactgtcagccagtagcacagccagccatgctttcttcaccctctctcctaacaaagcttcctggcaggagtccccttatccagtggagctggcccctcagggaccagagaaggtctgtcacagggttggatggggcattattagtggatgaatcaaccttcatcacagtgggtgagggtaacagccacctcctccttgatggtcggagccagacaacctccaccataaagcatcttgaatatatgcattcggctcggcatttagaagatgactatttggcttctgaacgttcttctgctattacatattccaaagctgtacagaaagtgtattcacaaggaagatggaaagccaagaggaaaacagttgcaatgcagcctatgccctgtgctctagcctcaaactcaccaggacttggtgttctaggacctgtatttattcgcgataagctcatggagcggcgtaaccgtcgcacaggaaggacagagaaagcgcggatctgggaagtgacggacagaacggtcaggacctggattggggaggcggttgccgccgctgctgctgacggtgtgacgttctctgttccggtcacaccacatacgttccgccattcctatgcgatgcacatgctgtatgccggtataccgctgaaagttctgcaaagcctgatgggacataagtccatcagttcaacggaagtctacacgaaggtttttgcgctggatgtggctgcccggcaccgggtgcagtttgcgatgccggagtctgatgcggttgcgatgctgaaacaattatcctga

SEQ ID NO: 127544 - DNA, 3219 bp, Homo sapiens
atgaaactcatggaaacacttaaccagtgcataaacgctggtcatgaaatgacgaaggctatcgccattgcacagtttaatgatgacagcccggaagcgaggaaaataacccggcgctggagaataggtgaagcagcggatttagttggggtttcttctcaggctatcagagatgccgagaaagcagggcgactaccgcacccggatatggaaattcgaggacgggttgagcaacgtgttggttatacaattgaacaaattaatcatatgcgtgatgtgtttggtacgcgattgcgacgtgctgaagacgtatttccaccggtgatcggggttgctgcccataaaggtggcgtttacaaaacctcagtttctgttcatcttgctcaggatctggctctgaaggggctacgtgttttgctcgtggaaggtaacgacccccagggaacagcctcaatgtatcacggatgggtaccagatcttcatattcatgcagaagacactctcctgcctttctatcttggggaaaaggacgatgtcacttatgcaataaagcccacttgctggccggggcttgacattattccttcctgtctggctctgcaccgtattgaaactgagttaatgggcaaatttgatgaaggtaaactgcccaccgatccacacctgatgctccgactggccattgaaactgttgctcatgactatgatgtcatagttattgacagcgcgcctaacctgggtatcggcacgattaatgtcgtatgtgctgctgatgtgctgattgttcccacgcctgctgagttgtttgactacacctccgcactgcagtttttcgatatgcttcgtgatctgctcaagaacgttgatcttaaagggttcgagcctgatctctccagcttcgctaagcaggccctgtcccaggcccagaagtctattgacagggttctggacatccaggaagaggagccgagcatctgggccgagaccattccgtatggagagccgggtatttattcgcgatttttcatggagcggcgtaaccgtcgcacaggaaggacagagaaagcgcggatctgggaagtgacggacagaacggtcaggacctggattggggaggcggttgccgccgctgctgctgacggtgtgacgttctctgttccggtcacaccacatacgttccgccattcctatgcgatgcacatgctgtatgccggtataccgctgaaagttctgcaaagcctgatgggacataagtccatcagttcaacggaagtctacacgaaggtttttgcgctggatgtggctgcccggcaccggtgtgacaatctaaaaacttgtcacacttcacatggatctgtcatggcggaaacagcggttatcaatcacaaaaaaagtaaaaatagcccgcgaatcgtccagtcaaacgacctcactgaggcggcatatagtctctcccgggatcaaaaacgtatgctgtatctgttcgttgaccagatcagaaaatctgatggcaccctacaggaacatgacggtatctgcgagatccatgttgctaaatatgctgaaatattcggattgacctctgcggaagccagtaaggatatacggcaggcattgaagagttacgcggcgaaggaagtggttctttatcgccctgaagaggatgccggcgatgaagaaggctatgaatcttttccttggtttatcaaacgtgcgcacagtccatccagagggctttacagtgtacatatcaacccatatctcattcccttctttatcgggttacagaaccggtttacgcagtttcggcttagtgaaacaaaagaaatcaccaatccgtatgccatgcgtttatacgaatccctgtgtcagtatcgtaagccggatggctcaggcatcgtctctctgaaaatcgactggatcatagagcgttaccagctgcctcaaagttaccagcgtatgcctgacttccgccgccgcttcctgcagtgcataaacgctggtcatgaaatgacgaaggctatcgccattgcacagtttaatgatgacagcccggaagcgaggaaaataacccggcgctggagaataggtgaagcagcggatttagttggggtttcttctcaggctatcagagatgccgagaaagcagggcgactaccgcacccggatatggaaattcgaggacgggttgagcaacgtgttggttatacaattgaacaaattaatcatatgcgtgatgtgtttggtacgcgattgcgacgtgctgaagacgtatttccaccggtgatcggggttgctgcccataaaggtggcgtttacaaaacctcagtttctgttcatcttgctcaggatctggctctgaaggggctacgtgttttgctcgtggaaggtaacgacccccagggaacagcctcaatgtatcacggatgggtaccagatcttcatattcatgcagaagacactctcctgcctttctatcttggggaaaaggacgatgtcacttatgcaataaagcccacttgctggccggggcttgacattattccttcctgtctggctctgcaccgtattgaaactgagttaatgggcaaatttgatgaaggtaaactgcccaccgatccacacctgatgctccgactggccattgaaactgttgctcatgactatgatgtcatagttattgacagcgcgcctaacctgggtatcggcacgattaatgtcgtatgtgctgctgatgtgctgattgttcccacgcctgctgagttgtttgactacacctccgcactgcagtttttcgatatgcttcgtgatctgctcaagaacgttgatcttaaagggttcgagcctgatgtatttattcgcgataagctcatggagcggcgtaaccgtcgcacaggaaggacagagaaagcgcggatctgggaagtgacggacagaacggtcaggacctggattggggaggcggttgccgccgctgctgctgacggtgtgacgttctctgttccggtcacaccacatacgttccgccattcctatgcgatgcacatgctgtatgccggtataccgctgaaagttctgcaaagcctgatgggacataagtccatcagttcaacggaagtctacacgaaggtttttgcgctggatgtggctgcccggcaccgggtgcagtttgcgatgccggagtctgatgcggttgcgatgctgaaacaattatcctga

SEQ ID NO: 127545 - DNA, 1977 bp, Homo sapiens
atgaaagagctgagctccacgattgccctaacttactgcctggctacagtttacaggatgcagtatgggaaacgggaatccaggcagtgtctagcagtctccatgaggtctgtcccgcagattctggccgaaatgagtactcagacacagaggccagagagcagccctgagaagctagagctccttgcttttattcagtgcaggcacaatgccaaaaacctggggccaacacaacctgtagggaatgtcatgcatggagatgatcaaagggacacgcatgaaatttggtgccatgactcggatcagggcacctcccttgggagatcaatcccttgtcctcctgctctttgctcggtgagaaagatccacctacgacctcaggtcctcagaccaaccagcccaagaaacatcacaccaatttcaaatccgagacaaaggagacacattttatccgtggacccaaaactctggcgccggtcatggactgggaaggcagccttcccttggtgtttcatcattgcagggacgcctctgattattcacccatgtttcagaggtgtcagaccatgcagggacacctggcttggtccttcacccttagcggcaagtcctgcttttctgggggaggggcaaagaataaaatacctaggaatccagcttatgagggatgtgaaggacctcttcaaggagaactacaaaccactgctcaatgaaataaaagtggacaaacacaaatggaaaaacattccatgctcatggataggaagaatcaatatcatgaaaatggccacagtgcccaaggtatttattcgcgataagctcatggagcggcgtaaccgtcgcacaggaaggacagagaaagcgcggatctgggaagtgacggacagaacggtcaggacctggattggggaggcggttgccgccgctgctgctgacggtgtgacgttctctgttccggtcacaccacatacgttccgccattcctatgcgatgcacatgctgtatgccggtataccgctgaaagttctgcaaagcctgatgggacataagtccatcagttcaacggaagtctacacgaaggtttttgcgctggatgtggctgcccggcaccggatcagaaaatctgatggcaccctacaggaacatgacggtatctgcgagatccatgttgctaaatatgctgaaatattcggattgacctctgcggaagccagtaaggatatacggcaggcattgaagagtttcgcggggaaggaagtggttttttatcgccctgaagaggatgccggcgatgaaaaaggctatgaatcttttccttggtttatcaaacgtgcgcacagtccatccagagggctttacagtgtacatatcaacccatatctcattcccttctttatcgggttacagaaccggtttacgcagtttcggcttagtgaaacaaaagaaatcaccaatccgtatgccatgcgtttatacgaatccctgtgtcagtatcgtaagccggatggctcaggcatcgtctctctgaaaatcgactggatcatagagcgttaccagctgcctcaaagttaccagcgtatgcctgacttccggcgccgcttcctgcaggtatttattcgcgataagctcatggagcggcgtaaccgtcgcacaggaaggacagagaaagcgcggatctgggaagtgacggacagaacggtcaggacctggattggggaggcggttgccgccgctgctgctgacggtgtgacgttctctgttccggtcacaccacatacgttccgccattcctatgcgatgcacatgctgtatgccggtataccgctgaaagttctgcaaagcctgatgggacataagtccatcagttcaacggaagtctacacgaaggtttttgcgctggatgtggctgcccggcaccgggtgcagtttgcgatgccggagtctgatgcggttgcgatgctgaaacaattatcctga

SEQ ID NO: 127546 - DNA, 1224 bp, Homo sapiens
atgcatgcggaagtcctagctccaacactggatggaaatgcagatgaaaaagttaggaccactcgtctaaaaccatcctgtgtccacttggctccttcccaaatgacggccaaaattctgtccctgattgagatgcaaggggaaataaagcgtgtctttattcgggtccaggctgccttggacaccctgctccagcttgagccaaggcagacacagatgcttattgagcaaggttctccctatgttcccgacacaccacactggagcctggggaccctcaagaatgcaagtccagccatcggagtccagagcgtgaaggtatttattcgcgataagctcatggagcggcgtaaccgtcgcacaggaaggacagagaaagcgcggatctgggaagtgacggacagaacggtcaggacctggattggggaggcggttgccgccgctgctgctgacggtgtgacgttctctgttccggtcacaccacatacgttccgccattcctatgcgatgcacatgctgtatgccggtataccgctgaaagttctgcaaagcctgatgggacataagtccatcagttcaacggaagtctacacgaaggtttttgcgctggatgtggctgcccggcaccgggaacatgacggtatctgcgagatccatgttgctaaatatgctgaaatattcggattgacctctgcggaagccagtaaggatatacggcaggcattgaagagtttcgcggggaaggaagtggttttttatcgccctgaagaggatgccggcgatgaaaaaggctatgaatcttttccttggtttatcaaacgtgcgcacagtccatccagagggctttacagtgtacatatcaacccatatctcattcccttctttatcgggttacagaaccggtttacgcagtttcggcttagtgaaacaaaagaaatcaccaatccgtatgccatgcgtttatacgaatccctgtgtcagtatcgtaagccggatggctcaggcatcgtctctctgaaaatcgactggatcatagagcgttaccagctgcctcaaagttaccagcgtatgcctgacttccgccgccgcttcctgcaggtctgtgttaatgagatcaacagcagaactccaatgcgcctctcatacattgagaaaaagaaaggccgccagacgactcatatcgtattttccttccgcgatatcacttccatgacgacaggatag

SEQ ID NO: 127547 - DNA, 2337 bp, Homo sapiens
atgaacatgaacatcaaaaaaattgtaaaacaagccacagttctgacttttacgactgcacttctggcaggaggagcgactcaagccttcgcgaaagaaaataaccaaaaagcatacaaagaaacgtacggcgtctctcatattacacgccatgatatgctgcagatccctaaacagcagcaaaacgaaaaataccaagtgcctcaattcgatcaatcaacgattaaaaatattgagtctgcaaaaggacttgatgtgtgggacagctggccgctgcaaaacgctgacggaacagtagctgaatacaacggctatcacgttgtgtttgctcttgcgggaagcccgaaagacgctgatgacacatcaatctacatgttttatcaaaaggtcggcgacaactcaatcgacagctggaaaaacgcgggccgtgtctttaaagacagcgataagttcgacgccaacgatccgatcctgaaagatcagacgcaagaatggtccggttctgcaacctttacatctgacggaaaaatccgtttattctacactgactattccggtaaacattacggcaaacaaagcctgacaacagcgcaggtaaatgtgtcaaaatctgatgacacactcaaaatcaacggagtggaagatcacaaaacgatttttgacggagacggaaaaacatatcagaacgttcagcagtttatcgatgaaggcaattatacatccggcgacaaccatacgctgagagaccctcactacgttgaagacaaaggccataaataccttgtattcgaagccaacacgggaacagaaaacggataccaaggcgaagaatctttatttaacaaagcgtactacggcggcggcacgaacttcttccgtaaagaaagccagaagcttcagcagagcgctaaaaaacgcgatgctgagttagcgaacggcgccctcggtatcatagagttaaataatgattacacattgaaaaaagtaatgaagccgctgatcacttcaaacacggtaactgatgaaatcgagcgcgcgaatgttttcaacatgaacggcaaatggtacttgttcactgatttcacgcggttcaaaatgacgatcgatggtattaactcaaacgatatttacatgcttggttatgtatcaaactctttaaccggcccttacaagccgctgaacaaaacaggggctgtgctgcaaatgggtcttgatcaacgatgtgacattccttactctcacttcgcaagcagtgtctcactggtaatttattacagcctgctgcatccaaaatccacagacatctggcagggctgcctaaggaagtcctgtggcattgcaggaggtgataaaacagagagaagagattctccccgggccacagatctagctgggaagagaaccgagagctcaggctcatgccaaggggcaagttatgaaccaaccattttagggaagccccctacccctgagcaggtccccccagaggctgggctggggacccaggttgctgtggaggactctttcctcagtcatcaccactggctgtgggtgaaacttgccctaaaaacaggaaatgtgtctaagatcaatgccgcctttggagataacagtcctgcctattgtccacctgcatgggggttgagtcaacaggactacctgcagagaaaggccttgtctgcccagcaagagctcccatcctcatcccgtgacccctcaaccttagagaacagctctgcgtttgaaggtgtccctaaagcagaggccgacccattggaaacctcaagttacgtatcttttgccagcgatcagcaggatgaagcacctacccagaacccagcagccacgcaggggggagggcacccaaaggaaggagctgacgctgtttctgggacacaggggaaggggacagtcaacaacagacccctgactgcagacgatgactccatcctctcgggagggacctgggggactcagcttgagaaaccagaaaagccacaaggaggctcctaccacatggtgctttgctttgccctcaaaggacagaaggacagagaaagcgcggatctgggaagtgacggacagaacggtcaggacctggattggggaggcggttgcgcgactgctgctgacggtgtgacgttctctgttccggtcacaccacatacgttccgccattcctatgcgatgcacatgctgtatgccggtataccgctgaaagttctgcaaagcctgatgggacataagtgcatcagttcaacggaagtctacacgaaggtttttgcgctggatgtggctgcccggcaccgggtgcacgtttgcgatgccggagtctga

SEQ ID NO: 127548 - DNA, 1291 bp, Homo sapiens
atgacaaaggactctcagaacaaatgggaagtgaatcagaggaaaattaggagttcggtgatagaaaagcccagggaagtaagtgttttgagaaggaagtggttgactgtgtgggctgatgctgatcatcaggtcaaaatagatgagaacaaagaatgggccttcagtctgacacacagagctgcatggagtcttggcagaacagccactcaggcatgcatggaggcccaggacactcaggcatgcatggaggcccaggagctttacctactgtggcactgggctttccggcaaaatgactgccactctgtaagggttcagaaccggggtgaggctgagatggctgaaatgacagaagtagaattcagaatgtggataaacacaatcttcactgatcttaaggagcacattgtaacccaatgcaggaaagctaaaaatcataaaatattgcaggaagtgacagacaaaatagccagtatagagaagaatgtaatgaacctgatggagctgaaaaacacaatacaagaatttcataatgcaatcacaagtattaatagcagaaaagaccaagtggaggaaagaatctcagagtttgaggactgtgtttctgaaataaggcagacagacaagaatagagaaaaaagaatgaaaaggaacgaacaaaacctccaagaaatatgggattgtgtaaagagactggatctacaactaattggtgtgcctgaaagagatgttggcccagggcttctggatcaacagggacaccaggatttatttattctgcgaagtgatcttccgtcacaggtatttattcgcgataagctcatggagcggcgtaaccgtcgcacaggaaggacagagaaagcgcggatctgggaagtgacggacagaacggtcaggacctggattggggaggcggttgccgccgctgctgctgacggtgtgacgttctctgttccggtcacaccacatacgttccgccattcctatgcgatgcacatgctgtatgccggtataccgctgaaagttctgcaaagcctgatgggacataagtccatcagttcaacggaagtctacacgaaggtttttgcgctggatgtggctgcccggcaccgggtgcagtttgcgatgccggagtctgatgcggttgcgatgactctcggagtcttccaacatccttgtggtctcctgcacttcaggggcactgggaacaaccactggcataggaggccggctcttcctagagtcccgatggaggctgtcttcactgagtgaatgtgatggttcagag

SEQ ID NO: 127549 - DNA, 1254 bp, Homo sapiens
atgagaactagtgaccgcagatcgactgatctgcggtacagtagttcatcaaatctgctttccattgccaaggcactactgctaaagcaatacagtatcaagcaccctcccagtaggcccatggactatcacagaaggggtgggcacatgagatttcaggcaccgtgtatgaaatctaacaatgcgctcatcgtcatcctcggcaccgtcaccctggatgctgtaggcataggcttggttatgccggtactgccgggcctcttgcgggatatcgtccattccgacagcatcgccagtcactatggcgtgctgctagcgctatatgcgttgatgcaatttctatgcgcacccgttctcggagcactgtccgaccgctttggccgccgcccagtcctgctcgcttcgctacttggagccactatcgactacgcgatcatggcgaccacacccgtcctgtggatctacccactagtctctacagcggaacaatgtcgttcttcccccaaaagcatgatttgctgcaataaaaaatccctatatcttccacaagaaatgtcagctgtctatatagaattcacagaatattactatccagatggaaaggattttccaagaaataaaaagaactcaactacaaattacaggggcacagcagaaagtgtgaatgctggtgcaaacctacagaattatggtgaaacttctccagatgccatcagtacaaattcagagggtgctcaggaaaatcatgatgacctggtatttattcgcgataagctcatggagcggcgtaaccgtcgcacaggaaggacagagaaagcgcggatctgggaagtgacggacagaacggtcaggacctggattggggaggcggttgccgccgctgctgctgacggtgtgacgttctctgttccggtcacaccacatacgttccgccattcctatgcgatgcacatgctgtatgccggtataccgctgaaagttctgcaaagcctgatgggacataagtccatcagttcaacggaagtctacacgaaggtttttgcgctggatgtggctgcccggcaccgggacactgaatcttcgtcggtgtacgttaagtggaccggattagtccacatggacagacacctaatgaacacagaccaagatgtggctgtcctttacaccagtaatctcgcgcagttgaccacagggcaacttcgattgaccgaggagcacagggacagccctatatatatgctacaagattcctga

SEQ ID NO: 127550 - DNA, 3240 bp, Homo sapiens
  misc_feature (1)...(3240): n = a,t,c or g
atgtcatatcaggccacaaaaataacaattcatgaaaataccactagttcttcaaactggagttcatcaggattcttaagaaatctggtgcagatcccctttgtggaggtgataatgaaggggaagaaggaagggggagcaggagttgacccagctgctgaggttggttgtgtagagcgccacccagagggggatgggccgagaaccgctggggaggtagcagccagaggtggtcctctccgacccactactctgtcgatcatcactggggaggtggaaagacaaggcaagatcctcattttgttgcctgctcaggcctgtgcgcacttactctccatggacacgacggtgagcgtggagcagcccgcggtctcgctgcccccttcactcccggacccccagcctccccagagtggaggggcaagcacacattggcccagggcttcccggtatcaacagggacaccaggatttatttattctgcgaagtgatcttccgtcacaggtatttattcgcgataagctcatggagcggcgtaaccgtcgcacaggaaggacagagaaagcgcggatctgggaagtgacggacagaacggtcaggacctggattggggaggcggttgccgccgctgctgctgacggtgtgacgttctctgttccggtcacaccacatacgttccgccattcctatgcgatgcacatgctgtatgccggtataccgctgaaagttctgcaaagcctgatgggacataagtccatcagttcaacggaagtctacacgaaggtttttgcgctggatgtggctgccccggcccggatccctaaacagcagcaaaacgaaaaataccaagtgcctcaattcgatcaatcaacgattaaaaatattgagtctgcaaaaggacttgatgtgtgggacagctggccgctgcaaaacgctgacggaacagtagctgaatacaacggctatcacgttgtgtttgctcttgcgggaagcccgaaagacgctgatgacacatcaatctacatgttttatcaaaaggtcggcgacaactcaatcgacagctggaaaaacgcgggccgtgtctttaaagacagcgataagttcgacgccaacgatccgatcctgaaagatcagacgcaagaatggtccggttctgcaacctttacatctgacggaaaaatccgtttattctacactgactattccggtaaacattacggcaaacaaagcctgacaacagcgcaggtaaatgtgtcaaaatctgatgacacactcaaaatcaacggagtggaagatcacaaaacgatttttgacggagacggaaaaacatatcagaacgttcagcagtttatcgatgaaaggcattatacatccggcgacaaccatacgctgagagaccctcactacgttgaagacggagggcataaataccttgtattcgaagccaacacgggaacagaaaacggataccaaggcgaagaatctttatttaacaaagcgtactacggcggcggcacgaacttcttccgtaaagaaagccagaagcttcagcagagcgctaaaaaacgcgatgctgagttagcgaacggcgccctcggtgtcatagagttaaataatgattacgcattgaaaaaagtaatgaagccgctgatcacttcaaacacggtaactgatgaaatcgagcgcgcgattgttttcaaaatgaacgggaaatggtacttgttcactgattcacgcggttcaaaaatgacgatcggatggtgtaaactcaaacgatatttacatgcctgggtatttattcgcgataagctcatggagcggcgtaaccgtcgcacaggaaggacagagaaagcgcggatctgggaagtgacggacagaacggtcaggacctggattggggaggcggttgccgccgctgctgctgacggtgtgacgttctctgttccggtcacaccacatacgttccgccattcctatgcgatgcacatgctgtatgnccgtataccgctgaaagttctgcaaagcctgatgggacataagtccatcagttcaacggaagtctacacgaaggtttttgcgctggatgtggctgccccgcaccgggtgcagtttgcgatgccggagtctgatgccgcgtactacgggggcggcacgaacttcttccgtaaagaaagccagaagcttcagcagagcgctaaaaaacgcgatgctgagttagcgaacggcgccctcggtatcatagagttaaataatgattacacattgaaaaaagtaatgaagccgctgatcacttcaaacacggtaggtggtgaaatcgagcgcgcgaatgttttcaaaatgaacggcaaatgggacttgttcactgattcacgcggttcaaaaatgacgatcgatggtattaactcaaacgatatttacatgcttggttatgtatcaaactctttaaccggcccttacaagccgctgaacaaaacagggcttgtgctgcaaatgggtcttgatccaaacgatgtgacattcacttactctcacttcgcagtgccgcaagccaaaggcaacaatgtggttatcacaagctacatgacaaacagaggcttcttcgaggataaaaaggcaacatttgcgccaagcttcttaatgaacatcaaaggcaataaaacatccgttgtcaaaaacagcatcctggagcaaggacagctgacatggctccaagtagcgaagcgagcaggactgggcggcggccaaagcggtcggacagtgctccgagaacgggtgcgcatagaaattgcatcaacgcatatagcgctagcagcacgccatagtgactggcgatgctgtcggaatggacgatatcccgcaagaggcccggcagtatttattcgcgataagctcatggagcggcgtaaccgtcgcacaggaaggacagagaaagcgcggatctgggaagtgacggacagaacggtcaggacctggattggggaggcggttgccgccgctgctgctgacggtgtgacgttctctgttccggtcacaccacatacgttccgccattcctatgcgatgcacatgctgtatgccggtataccgctgaaagttctgcaaagcctgatgggacataagtccatcagttcaacggaagtctacacgaaggtttttgcgctggatgtggctgcccggcaccgggtgcagtttgcgatgccggagtctgatgcggttgcgatgctgaaacaattatcctga

SEQ ID NO: 127551 - DNA, 1776 bp, Homo sapiens; identical to SEQ ID NO: 127379

SEQ ID NO: 127552 - DNA, 710 bp, Homo sapiens
gcgcaggcgctgatcgccacctacggccgtgatcgtgatcctggccggccgttgtggttggggtcggtcaagtcgaacatcggtcatacgcaagcggcggcgggtgtggctggtgtgatcaagatggtgatggcgatgcggcacgggcagctgccacgcacgttgcacgtggaatcgccgtcgccggaggtatttattcgcgataagctcatggagcggcgtaaccgtcgcacaggaaggacagagaaagcgcggatctgggaagtgacggacagaacggtcaggacctggattggggaggcggttgccgccgctgctgctgacggtgtgacgttctctgttccggtcacaccacatacgttccgcttttcctatgcgatgcacatgctgtatgccggtataccgctgtatagttctgcaaagcctgatgggacataagtccatcagttcaacggaagtctacacgaaggtttttgcgctggatgtggctgcccggcaccgggtgcagtttgcgatgccggagtctgatgcgggtgggcccggcacctgtgcctgctcccagcaggggtgcaggctccgtggcagcagcgtttctccaggcaggcagcacccccagcctcatgtccgcgtctaacttctggtattgcatgttctgggcagggaagcgagggcgtcgcagcagtgcgggatcgctagagagcaatgtggaa

SEQ ID NO: 127553 - DNA, 1943 bp, Homo sapiens
tcaggataattgtttcagcatcgcaaccgcatcagactccggcatcgcaaactgcacccggtgccgggcagccacatccagcgcaaaaaccttcgtgtagacttccgttgaactgatggacttatgtcccatcaggctttgcaagaactttcagcggtataccggcatacagcatgtgcatcgcataggaatggcggaacgtatgtggtgtgaccggaacagagaacgtcacaccgtcagcagcagcggcggcaaccgcctccccaatccaggtcctgaccgttctgtccgtcacttcccagatccgcgctttctctgtccttcctgtgcgacggttacgccgctccatgagcttatcgcgaataaatacctgaatcgccagcggcatcagcaccttgtcgccttgcgtataatatttgcccatggtgaaaacgggggcgaagaagttgtccatattggccacgtatttattcgcgataagctcatggagcggcgtaaccgtcgcacaggaaggacagagaaagcgcggatctgggaagtgacggacagaacggtcaggacctggattggggaggcggttgccgccgctgctgctgacggtgtgacgttctctgttccggtcacaccacatacgttccgccattcctatgcgatgcacatgctgtatgccggtataccgctgaaagttctgcaaagcctgatgggacataagtccatcagttcaacggaagtctacacgaaggtttttgcgctggatgtggctgcccggcaccgggtgcagtttgcgatgccggagtctgatgcggttgcgatgctgaaacaattggcggagagcatcccgggggacagctcttcaatgcccatgtgcactaggcagagagcatcctgggcgcagctcttcaatgcacgtgtgcaccaggatcacctggagagtggagcaaagctcaagctcccggaccaccttagaactcgcatgggatggagtgccccatgggaacgactccctgtatgggaacggctcctgcatggaatggacccccccgccatggttcagggcctccctgaagcagcactctgccttctcctctggcagcatcctggctcctacacggagcaggtatttattcgcgataagctcatggagcggcgtaaccgtcgcacaggaaggacagagaaagcgcgggtgtgggaagtgacggacagaacggtcaggacctggattggggaggcggttgccgccgctgctgctgacggtgtgacgttctctgttccggtcacaccacatacgttccgccattcctatgcgatgcacatgctgtatgccggtataccgctgaaagttctgcaaagcctgatgggacataagtccatcagttcaacggaagtctacacgaaggtttttgcgctggatgtggctgcccggcaccgggagcacgccaagatgtcccttgtgactgtccccttctaccagaagagacataggcacttcgaccagtcctaccgtaatattcaaacacggtacctgctggacgaatatgcgtcaaaaaagagggcaggcgagacggtcactctcaagtgcaccatgctggtgacgccggacctgaagcgggtgcagccgcgcgccgagtggtaccgcgatggggccgggaatgcacagattcatcttgtcaatggacagcctcccgtgatcctggtgcacacgtgcattgaagagctgcgcccaggatgctctctggctaatgcacatggggtaccgagcctcgaatcccgaatcatgggcataggctggttccctggggggaaaaatggtatccgggtggacggcttgacggaaggctcactctacgagttcaaaatcgccgccgtcaacctggccggcatcggggagccctcagatcccagtgagcacttcaagtgtgaggcctggaccatgccggagcccg

SEQ ID NO: 127554 - DNA, 3926 bp, Homo sapiens
  misc_feature (1)...(3926): n = a,t,c or g
atggagtatctgcgaatgacttgctggatttggctctcccgggacttcctctggcttccaggagtgatgtatacccgggttttctaccggtttggggagcatttattaatggtgctctgctgcttgttcgaggcagttatcaatgggacgggcactcggcttggtgatccgatcgaggcgcaggcgctgatcgccacctacggccgtgatcgtgatcctggccggccgttgtggttggggtcggtcaagtcgaacatcggtcatacgcaagcggcggcgggtgtggctggtgtgatcaagatggtgatggcgatgcggcacgggcagctgccacgcacgttgcacgtggaatcgccgtcgccggaggtggattggtcggcggggacggttcaactccttacggagaacacgccctggcccaggagtggtcgtgttcgtcgggtgggggtgtcgtcgttcgggatcagtggtactaacgcgcacgtcatcctcgaacagcccccgggagtgccgagtcagtctgcggggccgggttcgggttctgtcgtggatgttccggtggtgccgtggatggtgtcgggcaaaacacccgaagcgctatccgcgcaggcaacggcgttgatgacctatctggacgagcgacctgatgtctcctcgctggatgttgggtactcgctggcgttgacacggtcggcgctggatgagcgagcggtggtgctgtggtcggaccgtgaaacgttgttgtgcggcaaggacacaagaagatggctgtctacaagccaggaaaagattctgcaccaggaactggatcaactggcaccttgatcttggacttcccagcctccagaactatgagatgagaaataagtgtctattgtttaagcctcccagtctatggtattttgttatagcaacccaagatgacaaagacaacaagcctaaaatgaaaaatggcaaagtaaccaagatgtccttcaagagagaacaggaagctaaggtgtttatctacctgcttccgcctcccaccagtggagctttgccccccgggactgtccatgtccctgcacttctggggctgcacaggtggaacaagcgctacaaaaagccaaagccctggggcacaaggcagaaagttgaggtgacaccgctctcgttaatatatggaggaagatctcagatgctccactttcccgagttccagggagctgacctgtatgctcttgagcaggggcagggtgtttgtgatctccgcaacctaactacttacagagttgttcataaagtgagccttggaagtctggtttacatgacatcaaacactggcagaaccatgatgcctggggatgtggccggggacggcggtgggttgggggaagctgtgtttctcagcttccgttacagccagggctgccatgacaaggtaccacaatgggagtggataaaaacacagttctggaatgtgaaagtccaagatcaagatgtcatgctccttttgaaggtcttgcttcaagtgacatactcacaagttccacccagtatggagtacagagagctgaaaggaggagaattgggggttgtaccagaaccagagaaagagaggtgtgtggcaactctccaggagacagtgtccctccaagaagagggcttcgtggagaaaagtagtgactttgagtccaaggacacaaccagaccaaggagtgatgccaggcaagccatttcattttacctctgcattcagggacatcgtgttggtagcttgaagacagccatgctgggaatagttacaccatgggaactgccaaacagtacacaacagagaaatgcctccagcatggaaatttccacacaaggactgagctgtagccaggtaggttcttttcaaatgggcaatagatgtccagttgtcaatcttctgaagaggaaaaagggccctagaattgtggaagcagctgggatgaaaaagccacattctgaaactgttcctgactggacagaccctgggaagaacaccactatcaccattatcaccccaatcatcatatataatcgtcatcattcccatcatcaccattttcaccaacattatcatgccatcatcaccatcaacatcaccatcatcctcatcatcaactccattaccatcatccatattctagagaagaattggaaaacaggatttgggatccgtgaatctggtttcaaaatctggctgttttttcttggttggattcccaaatctttgaaaacaacatctctagcatcttcgaagacagaaggcagtgaatatcggtgctgtttaaaggcccatgtgattatgctgctgccaattcgccaatgctgcaaagatcaaatgggcaaatttagggaacatcagctgcacaactacttggcatctgcacttagcattgctttgatacctgatgaccaactctctgaaaagaaggtatttattcgcgataagctcatggagcggcgtaaccgtcgcacaggaaggacagagaaagcgcggatctgggaagtgacggacagaacggtcaggacctggattggggaggcggttgccgccgctgctgctgacggtgtgacgttctctgttccggtcacaccacatacgttccgccattcctatgcgatgcacatgctgtatgccggtataccgctgaaagttctgcaaagcctgatgggacataagtccctcagggatcttctggacccaccttacgtgcagcagctccgggaggtggcaggatatgagctgactatgaaaggggctgccaaagggcgctcccgaagaatggagaaactagcatcccagtgtcccagagtccaaggcaagcatcaagaagacatgatgtatacccacctgaaatccataagggagtgcatgtttgggcctgaagacagcaggtcactagagcccgaaagacgctgatgacacatcaatctacatgttttatcaaaaggtcggcgacaactcaatcgacagctggaaaaacgcgggccgtgtctttaaagacagcgataagttcgacgccaacgatccgatcctgaaagatcagacgcaagaatggtccggttctgcaacctttacatctgacggaaaaatccgtttattctacactgactattccggtaaacattacggcaaacaaagcctgacaacagcgcaggtaaatgtgtcaaaatctgatgacacactcaaaatcaacggagtggaagatcacaaaacgatttttgacggagacggaaaaacatatcagaacgttcagcagtttatcgatgaaggcaattatacatccggcgacaaccatacgctgagagaccctcactacgttgaagacaaaggccataaataccttgtattcgaagccaacacgggaacagaaaacggataccaaggcgaagaatctttatttaacaaagcgtactacggcggcggcacgaacttcttccgtaaagaaagccagaagcttcagcagagcgctanaaaacgcgatgctgagttagcgaacggcgccctcggtatcatagagttaaatatgattaccattgaaaaagtatttattcgcgataagctcatggagcggcgtaaccgtcgcacaggaaggacagagaaagcgcggatctgggaagtgacggacagaacggtcaggacctggattggggaggcggttgccgccgctgctgctgacggtgtgacgttctctgttccggtcacaccacatacgttccgccattcctatgcgatgcacatgctgtatgccggtataccgctgaaagttctgcaaagcctgatgggacataagtccatcagttcaacggaagtctacacgaaggtttttgcgctggatgtggctgcccggcaccgggtgcagtttgcgatgccggagtctgatgcggttgcgatgctgaaacaattatcctga

SEQ ID NO: 127555 - DNA, 3212 bp, Homo sapiens
atgctgggcatggtggctcatgcctgtaatcccagtactttgggaggccgagatggaaagaactccagtggatccaagcgttataatcgcaaacgtgaactttcctaccccaaaaatgaaagttttaacaaccagtcccgtcgctccagttcacagaaaagcaagacttttaacaagatgcctcctcaaaggggcggcggcagcagcaaactctttagctcttcttttaatggtggaagacgagatgaggtagcagaggctcaacgggcagagtttagccctgcccagttctctggtcctaagaagatcaacctgaaccacttgttgaatttcacttttgaaccccgtggccagacgggtcactttgaaggcagtggacatggtagctggggaaagaggaacaagtggggacataagccttttaacaaggaactctttttacaggccaactgccaatttgtggtgtctgaagaccaagactacacagctcattttgctgatcctgatacattagttaactgggactttgtggaacaagtgcgcatttgtagccatgaagtgccatcttgcccaatatgcctctatccacctactgcagccaagataacccgttgtggacacatcttctgctgggcatgcatcctgcactatctttcactgagtgagaagacgtggagtaaatgtcccatctgttacagttctgtgcataagaaggatctcaagagtgttgttgccacagagtcacatcagtatgttgttggtgataccattacgatgcagctgatgaagagggagaaaggggtgttggtggctttgcccaaatccaaatggatgaatgtagaccatcccattcatctaggagatgaacagcacagccagtactccaagttgctgctggcctctaaggagcaggtgctgcaccgggtagttctggaggagaaagtagcactagagcagcagctggcagaggagaagcacactcccgagtcctgctttattgaggcagctatccaggagctcaaggtatttattcgcgataagctcatggagcggcgtaaccgtcgcacaggaaggacagagaaagcgcggatctgggaagtgacggacagaacggtcaggacctggattggggaggcggttgccgccgctgctgctgacggtgtgacgttctctgttccggtcacaccacatacgttccgccattcctatgcgatgcacatgctgtatgccggtataccgctgaaagttctgcaaagcctgatgggacataagtccatcagttcaacggaagtctacacgaaggtttttgcgctggatgtggctgcccggcaccgggtgcagtttgcgatgccggaggattttgccgatttcggaaccaccatcaaacaggattttcgcctgctggggcaaaccagcgtggaccgcttgctgcaactctctcagggccaggcggtgaagggcaatcagctgttgcccgtctcactggtgaaaagaaaaaccaccctggcgcccaatacgcaaaccgcctctccccgcgcgttggccgattcattaatgcagctggcacgacaggtttcccgactggaaagcgggcaaagagtatctggtgtcatagaaattgccgatggaagtcgccgtcgtaaagctgctgcacttaccgaaagtgattatcgtgttctggttggcgagctgaatgatgagcagatgcctgcattatccagattgggtaacgattatcgcccaacaagtgcttatgaacgtggtcagcgttatgcaagccgattgcagaatgaatttgctggaaatatttctgcgctggctgatgcggaaaaatatttacgtatcagtgataaacttgggaataatacagaaacatcaatgagccaaaagccttgcaaaatgaaaaggataattctagagaagagttggcagtttgaaaaatggatcatcatagtgatcttatttcattatggtgaaagttggaacctcttacgtgccgatcaacgtctcattttcgccaaaagttggcccaggggcttcccggtatcaacagggacaccaggatttatttattctgcgaagtgatcttccgtcacaggtatttattcgcgataagctcatggagcggcgtaaccgtcgcacaggaaggacagagaaagcgcggatctgggaagtggacggacagaacggtcaggacctggattggggaggcggttgccgccgctgctgctgacggtgtgacgttctctgttccggtcacaccacatacgttccgccattcctatgcgatgcacatggtgttatgccggtataccgctgaaagttctgcaaagcctgatgggacataagtccatcagtttaaacggaagtctacacgaaaggtttttgcgctggatgtggctgcccggcaccggtgtgacaatctaaaaacttgtcacacttcacatggatctgtcatggcggaaacagcggttatcaatcacaagaaacgtaaaaatagcccgcgaatcgtccagtcaaacgacctcactgaggcggcatatagtctctcccgggatcaaaaacgtatgctgtatctgttcgttgaccagatcagaaaatctgatggcaccctacaggaacatgacggtatctgcgagatccatgttgctaaatatgctgaaatattcggattgacctctgcggaagccagtaaggatatacggcaggcattgaagagtttcgcggggaaggaagtggttttttatcgccctgaagaggatgccggcgatgaaaaaggctatgaatcttttccttggtttatcaaacgtgcgcacagtccatccagagggctttacagtgtacatatcaacccatatctcattcccttctttatcgggttacagaaccggtttacgcagtttcggcttagtgaaacaaaagaaatcaccaatccgtatgccatgcgtttatacgaatccctgtgtcagtatcgtaagccggatggctcaggcatcgtctctctgaaaatcgactggatcatagagcgttaccagctgcctcaaagttaccagcgtatgcctgacttccgccgccgcttcctgcaggtctgtgttaatgagatcaacagcagaactccaatgcgcctctcatacattgagaaaaagaaaggccgccagacgactcatatcgtattttccttccgcgatatcacttccatgacgacaggatag

SEQ ID NO: 127556 - DNA, 834 bp, Homo sapiens
gtgcgttggtggatccagccagtcatcaagccttccgccgccgggaagaatttgcagatgaccataaaacagcacaatgacgcccagcccaagccagaacgcaggtgtggagattccggtaatggccattattcgcaccagatgatccagccagcgatttcgccagactgcagagagtatgcccagcgggatgccaatcaggagtgccagcagcagggcaccaaaagccagctccagcgtcgccgggaaaaatatacgcaactcttccagcaccggacgcccggtacgaatggatgttcccaggtcaccatgaaacaggtcgctgacgtagcggtaaaactgtacatacagtggctggtccagtcccagttgctggcgaatattttccacgatagcatcgcctggaaccatacctgcgcgaccactggcatttttttgattacgcagtttatcggccagctgatacgccagtttgtgcgcctgttcagcaaccggctgcggcaggcgggcttgttccagcagcatagaaaccgcttcggtttccgggcggcgataggccgcggtgatcgcggcgcgggaaaccgactggggcaatatttgctcggcaaagtcgaggaatggctggtgtggttcctctgccggagtcggtgcttcatcgctctcattggccgcgccagaaagcagcgcaggtagctccggcagagtatcgctgttttccagttgttcgagataagaaaaaatcgcctgcttaattaaccagtgtggtgtgcgatcgatacgtgtcgcggcagacttaatacgctcacgcgtcgcgtcgtccagcttaacccccat

SEQ ID NO: 127557 - DNA, 1105 bp, Homo sapiens
atgggggttaagctggacgacgcgacgcgtgagcgtattaagtctgccgcgacacgtatcgatcgcacaccacactggttaattaagcaggcgattttttcttatctcgaacaactggaaaacagcgatactctgccggagctacctgcgctgctttctggcgcggccaatgagagcgatgaagcaccgactccggcagaggaaccacaccagccattcctcgactttgccgagcaaatattgccccagtcggtttcccgcgccgcgatcaccgcggcctatcgccgcccggaaaccgaagcggtttctatgctgctggaacaagcccgcctgccgcagccagttgctgaacaggcgcacaaactggcgtatcagctggccgataaactgcgtaatcaaaaaaatgccatgtcgcgcaggtcctttgccggactggtcggttccggacgtactgaactgatgaattgtctgtttggcgtggataaacgcgctggcggagaaatccgtcttaatggcaaagatatctctccacgttcacccctggatgccgtgaaaaaagggatggcttacatcactgaaagccgccgggataacggttttttccccaacttttccatcgctcagaacatggcgatcagccgcagtctgaaagacggcggctataaaggcgcgatgggcttgtttcatgaagttgacgagcaacgtaccgctgaaaatcaacgcgaactgctggcgctgaaatgtcattcggtaaaccagaatatcaccgaactctccgggggaaatcagcagaaagtcctgatctccaaatggctgtgctgttgcccggaagtgattattttcgatgaacctacccgcggcatcgacgttggcgcgaaagccgaaatttacaaagtgatgcgccaactggcggacgacggaaaagtcatcctgatggtgtcatctgaactacctgaaattatcaccgtgtgcgaccgcatcgccgtgttctgcgaaggacgactgacgcaaatcctgacgaatcgcgatgacatgagcgaagaggagattatggcatgggctttcccacaagagtaaaaagcgaagcgagcgagaagaaaccgtt

SEQ ID NO: 127558 - DNA, 360 bp, Homo sapiens
atgcaactcatcaaagaccgttggcgacaccaggctattcaggcgctgatgcgtttttcctggtgcaagcattttgcggtgatcggcgtactggcaagcggcgtgcttaatgcattgttgattaccggatttccccccacgctaacgacttactggggccaactcttattgctcaaagccatcctggtgatgattatagaggtcattgcgctggctaatcgttatgttcttgtaccgcgcatgaggcaggatgaagatcgtgcggcaccctggtttgtgtggatgactaaactcgaatgggcgataggtgcggtagtgctggtgatcatcagcctgcttgcgactctcgaacctttttga

SEQ ID NO: 127559 - DNA, 1494 bp, Homo sapiens
  misc_feature (1)...(1494): n = a,t,c or g
atggaaattcgaggacgggttgagcaacgtgttggttatacaattgaacaaattaatcatatgcgtgatgtgtttggtacgcgattggcacgtgctgaagacgtatttccaccggtgatcggggttgctgcccataaaggtggcgtttacaaaacctcagtttctgttcatcttgctcaggatctggctctgaaggggctacgtgttttgctcgtggaaggtaaactgcccaccgatccacacctgatgctccgactggccattgaaactgttgctcatgactatgatgtcatagttattgacagcgcgcctaacctgggtatcggcacgattaatgtctttttcgatatgcttcgtgatctgctcaagaacgttgatcttaaagggttcgagcctgatgtacgtattttgcttaccaaatacagcaatagtaatggctctcagtccccgtggatggaggagcaaattcgggatgcctggggaagcatggttctaaaaaatgttgtacgtcgaaacggnataatgaagcgtgcgcctgttattccaaaacatacgctcaatactcaaccggttgaagatacttcgttatcgacaccagctgccccgatggtggattcgttaattgcgcgcgtaggagtaatggctcgcggtaatgccattactttgcctgtatgtggtcgggatgtgaagtttactcttgaagtgctccggggtgatagtgttgagaagacctctcgggtatggtcaggtaatgaacgtgaccaggngctgcttactgaggacgcactggatgatctcatcccttcttttctactgactggtcaacagacaccggctttcggtcgaagagtatctggtgtcatagaaattgccgatgggagtcgccgtcgtaaagctgctgcacttaccgaaagtaattatcgtgttctggttggcgagctggatgatgagcagatggctgcattatccagattgggtaacgattatcgcccaacaagtgcttatgaacgtggtcagcgttatgcaagccgattgcagaatgaatttgctggaaatatttctgcgctggctgatgcggaaaatatttcacgtaagattattacccgctgtatcaacaccgccaaattgcctaaatcagttgttgctcttttttctcaccccggtgaactatctgcccggtcaggtgatgcacttcaaaaagcctttacagataaagaggaattacttaagcagcaggcatctaaccttcatgagcagaaaaaagctggggtgatatttgaagctgaagaagttatcactcttttaacttctgtgcttaaaacgtcatctgcatcaagaactagtttaagctcacgacatcagtttgctcctggagcgacagtattgtataagggcgataaaatggtgcttaacctggacaggtctcgtgttccaactgagtgtatagagaaaattgaggccattcttaaggaacttgaaaagccagcaccctga

SEQ ID NO: 127560 - DNA, 1086 bp, Homo sapiens
ttaggcaatttggcaagagttgatacagcgggggataatcttacgtgaaatattttccgcatcagccagcgcagaaatatttccagcaaattcattctgcaatcggcttgcataacgctgaccacgttcataagcacttgttgggcgataatcgttacccaatctggataatgcagccatctgctcatcatccagctcgccaaccagaacacgataatcactttcggtaagtgcagcagctttacgacggcgactcccatcggcaatttctatgacaccagatactcttcgaccgaacgccggtgtctgttgaccagtcagtagaaaagaagggatgagatcatccaatgcgtcctccataagcagctcctggtcacgttcattacctgaccatacccgaaaagtcttctcaacactatcaaccccgagcacttcaagaagtaaattcacatcccgaacccgtgaaatattttccgcatcagccagcgcagaaatatttccagcaaattcattctgcaatcggcttgcataacgtcttttctgggggtgagcacttgttgggcgataatcgttacccaatctggataatgggggcatctgctcatcatacagctcgccaaccagaacacgataatcactttcggtaagtgcagcagctttacgacggcgacttccatcggcaatttctatgacaccagatactcttctacccaacgccggtgtctgttgaccagtcagtagaaaagaagggatgagatcattcagtgcgttctcagtaagcagcttctggtcacgttcattacccgaccatacccgagaggtgtttttaacactatcacccccgggcacgcctttcattgccatacggaactccggatgagcattcatcaggcgggcaagaatgtgaataaaggccggataaaacttgtgcttatttttctttacggtctttaaaaaggccgtaatatccagctgaactgtttggttttttgtacattgagcaggtgactgaaatgcctcaaaatgttctttacgatgccattgggatatatcaacggtggtatatccagtgatttttttctccat

SEQ ID NO: 127561 - DNA, 1575 bp, Homo sapiens
ttaatccattgtcgtgtgaggaaaaaccacaagacgggtgtggtcgccatgatcgcgtagtcgatagtggctccaagtagcgaagtgccagggactgggcggcggcaaatacgatcggacagtgctccgagaacgggtgcgcatagaaattgcatcaacgcatatagcgctagagacacgccatagtggctggcgatgctgtcggaatggacgatatcccgcaagaggcccggcagtaccggcataaccaagcctatgcctacagcatccagggtgacggtgccgaggatgacagatgagcgcattgttagatttcatacaacggtgcctgattgcatcggatgcagcccggttaacgtgaccggcaccgctgggtaagcaggtaattttgtccacataaccgtgcgcaaaatgttgtggataaggcgggaccagcagcaatccacaagcaggacatacaaacggcacaccgaagttactccgttctaaagggttacaacgacatgtactatggttggccctgttgcaaggtgaatgaaatttccggacaactggcttcagaacctgcctagtcgctagttttacctgcggcgggatgacaggctcctgcctctggtagcccatggctgagcggtggtcctcagcaggtggaagatgctggggctgggtacggattcgcacccggccagcctcctccgccacctcgcacacagccgaggtccgcgtgtagccgcagagctgcagggagccagttccacgggcgccccctgctccctcggcaggccgcgaaggctcgagcaccaagatctctaggctgtggcagcctggggcgcttttccaccggagttcgcccagacaaatgtatttttcctccggagacggagaatgctgcaggatgtttctgatccgggcagccctgtctccccgcctccccccttcacacccccgcctccttttcttggatctagaggatcccccatcggcaatttctatgacaccagatactcttcgaccgaacgccggtgtctgttgaccagtcagtagaaaagaagggatgagatcatccagtgcgtcctcagtaagcagctcctggtcacgttcattacctgaccatacccgagaggtcttctcaacactatcaccccggagcacttcaagagtaaacttcacatcccgaccacatacaggcaaagtaatggcattaccgcgagccattactcctacgcgcgcaattaacgaatccaccatcggggcagctggtgtcgataacgaagtatcttcaaccggttgagtattgagcgtatgttttggaataacaggcgcaccttcattatcagttgaagagcgttgatcaatggcctgttcaaaaacagttctcatccggatctgacctttaccaacttcatccgtttcacgtacaacattttttagaaccatgcttccccaggcatcccgaatttgctcctccatccacggggactgagagccattactattgctgtatttggtaagcaaaatacgtacatcaggctcgaaccctttaagatcaacgttcttgagcagatcacgaagcat

SEQ ID NO: 127562 - DNA, 1494 bp, Homo sapiens
atggagaacaaaatcactggatataccaccgttgatatatcccaatggcatcgtaaagaacattttgaggcatctcagtcagttgctcaatgtacctataaccagaccgttcagctggatattacggcctttttaaagaccgtaaagaaaaataagcacaagttttatccggcctttattcacattcttgcccgcctgatgaatgctcatccggagttccgtatggcaatgaaagacggtgagctggtgatatgggatagtgttcacccttgttacaccgttttccatgagcaaactgaaacgttttcatcgctctggagtgaataccacgacgatttccggcagtttctacacatatattcgcaagatgtggcgtgttacggtgaaaacctggcctatttccctaaagggtttattgagaatatgtttttcgtctcagccaatccctgggtgagtttcaccagttttgatttaaacgtggccaatatggacaacttcttcgcccccgttttcaccatgggcaaatattatacgcaaggcgacaaggtgctgatgccgctggcgattcaggttcatcatgccgtttgtgatggcttccatgtcggcagaatgcttaatgaattacaacagtactgcgatgagtggcagggcggggcccaagaggaacctccaaagttctgtatgttccagataaatgccctgtcctctgctttagtcagcactggcaggggtgcctacaccaaagccttttcccagaaaggagactgtattgacttgcaccttcagtttctttggaacctgtccaaggttcatcattggagcggcgtaaccgtcgcacaggaaggacagagaaagcgggatctgggaagtgacggacagacggtcaggacctggattggggaggcggttgccgcgctgctgctgacgtgtgacaatctaaaaacttgtcacacttcacatggatctgtcatggcggaaacagcggttatcaatcacaagaaacgtaaaaatagcccgcgaatcgtccagtcaaacgacctcactgaggcggcatatagtctctcccgggatcaaaaacgtatgctgtatctgttcgttgaccagatcagaaaatctgatggcaccctacaggaacatgacggtatctgcgagatccatgttgctaaatatgctgaaatattcggattgacctctgcggaagccaaaatcaccaatccgtatgccatgcgtttatacgaatccctgtgtcagtatcgtaagccggatggctcaggcatcgtctctctgaaaatcgactggatcatagagcgttaccagctgcctcaaagttaccagcgtatgcctgacttccgccgccgcttcctgcaggtctgtgttaatgagatcaacagcagaactccaatgcgcctctcatacattgagaaaaagaaaggccgccagacgactcatatcgtattttccttccgcgatatcacttccatgacgacaggatag

SEQ ID NO: 127563 - DNA, 1746 bp, Homo sapiens; identical to SEQ ID NO: 121214

SEQ ID NO: 127564 - DNA, 3216 bp, Homo sapiens; identical to SEQ ID NO: 127327

SEQ ID NO: 127565 - DNA, 813 bp, Homo sapiens
atgtcccatcaggctttgcagaactttcagcggtataccggcatacagcatgtgcatcgcataggaatggcggaacgtatgtggtgtgaccggaacagagaacgtcacaccgtcagcagcagcgcggcaaccgcctccccaaccagtctctcccgggatcaaaaacgtatgctgtatctgttcgttgaccagatcagaaaatctgatggcaccctacaggaacatgacggtatctgcgagatccatgttgctaaatatgctgaaatattcggattgacctctgcggaagccagtaaggatatacggcaggcattgaagagtttcgcggggaaggaagtggttttttatcgccctgaagaggatgccggcgatgaaaaaggctatgaatcttttccttggtttatcaaacgtgcgcacagtccatccagagggctttacagtgtacatatcaacccatatctcattcccttctttatcgggttacagaaccggtttacgcagtttcggcttagtgaaacaaaagaaatcaccaatccgtatgccatgcgtttatacgaatccctgtgtcagtatcgtaagccggatggctcaggcatcgtctctctgaaaatcgactggatcatagagcgttaccagctgcctcaaagttaccagcgtatgcctgacttccgccgccgcttcctgcaggtctgtgttaatgagatcaacagcagaactccaatgcgcctctcatacattgagaaaaagaaaggccgccagacgactcatatcgtagtttccttccgcgatatcacttccatgacgacaggatag

SEQ ID NO: 127566 - DNA, 1299 bp, Homo sapiens; identical to SEQ ID NO: 127495

SEQ ID NO: 127567 - DNA, 1410 bp, Homo sapiens
  misc_feature (1)...(1410): n = a,t,c or g
gtcgcgctggcgctgatcgccacctacggccgtgatcgtgatcctggccggccgttgtggttggggtcggtcaagtcgaacatcggtcatacgcaagcggcggcgggtgtggctggtgtgatcaagatggtgatggcgatgcggcacgggcagctgccacgcacgttgcacgtggaatcgccgtcgccggaggtggattggtcggcggggacggttcaactccttacggagaacacgccctggcccaggagtggtcgtgttcgtcgggtgggggtgtcgtcgttcgggatcagtggtactaacgcgcacgtcatcctcgaacagcccccgggagtgccgagtcagtctgcggggccgggttcgggttctgtcgtggatgttccggtggtgccgtggatggtgtcgggcaaaacacccgaagcgctatccgcgcaggcaacggcgttgatgacctatctggacgagcgacctgatgtctcctcgctggatgttgggtactcgctggcgttgacacggtcggcgctggatgagcgagcggtggtgctggggtcggaccgtgaaacgtttgtgtgcggtgtgaaagcgctgtctgccggtcatgaggcttctggntgtgacaatctaaaaacttgtcacacttcacatggatctgtcatggcggaaacagcggttatcaatcacaagaaacgtaaaaatagcccgcgaatcgtccagtcaaacgacctcactgaggcggcatatagtctctcccgggatcaaaaacgtatgctgtatctgttcgttgaccagatcagaaaatctgatggcaccctacaggaacatgacggtatctgcgagatccatgttgctaaatatgctgaaatattcggattgacctctgcggaagccagtaaggatatacggcaggcattgaagagtttcgcggggaaggaagtggttttttatcgccctgaagaggatgccggcgatgaaaaaggctatgaatcttttccttggtttatcaaacgtgcgcacagtccatccagagggctttacagtgtacatatcaacccatatctcattcccttctttatcgggttacagaaccggtttacgcagtttcggcttagtgaaacaaaagaaatcaccaatccgtatgccatgcgtttatacgaatccctgtgtcagtatcgtaagccggatggctcaggcatcgtctctctgaaaatcgactggatcatagagcgttaccagctgcctcaaagttaccagcgtatgcctgacttccgccgccgcttcctgcaggtctgtgttaatgagatcaacagcagaactccaatgcgcctctcatacattgagaaaaagaaaggccgccagacgactcatatcgtattttccttccgcgatatcacttccatgacgacaggatag

SEQ ID NO: 127568 - DNA, 3384 bp, Homo sapiens
atggaggtgattcctgaagggtacaggctttccgagttgaaaaaatgttctaaatggattgtggtgatggttgcacggctctatgaatatactaaaaaccaacaaattatacatttaaaatgggtgaatcatatgctgggatgcctactggaccgcaacgacccgctccgggatgtcgatgaggcagccgtgcctgtgctgtgtatctgcagtgctgacgaccccgtgtgtggacccccagaccacactctgacaactgaactcttccacagcaacccctacttcttcctcctgctcagtcgccacggaggccactgtggcttcctgcgccaggagcccttgccagcctggagccatgaggtcatcttggagtccttccgggccttgactgagttcttccgaacggaggagaggattaaagggctgagcaggcacagagcttccttccttgggggccgtcgtcgtgggggagccttgcagaggcgggaagtctcttcctcttccaacctggaggagatctttaactggaagcgatcatacacaaggttgatggcagcggcagctggggctgcagcggcgccgggctctagagagccgcaggatcggccagagtgcggagctggacacccgggtcccagatactacagacacccggagaggtggctccttcgccctgaagccttcctcggccccctacgcactcgggccccttccgcagaggattcgcagcgtgagcgccccgcagcccgctcaggaccagagatgcgagttcggtatcctgtggtggctgcagtcttggccccatacctggctttaagccaagatccaatggtcaagtcttctgcttctggacagggtgcctctgggagctacaaccacgtccgtgaagagatgctcatcaaggctggcggtgctatgagcagacgtgtggttcggcaaagcaagttccgccatgtgtttgggcaggcagcaaaggccgaccaggcctacgaggacatccgtgtgtccaaggtcacatgggacagctccttctgtgccgtcaaccccaaattcctggccattattgtggaggctggaggcggggtgccttcatcgtcctgcctctggccaaggtggtggctagcaggctaccgttgtgttccagcacacactgtggatgacgtctgggtgcatatcatccaggctcagcagcacctccccggtgcccacattccagatgatgatcacattgtcaccacctgcccagagtggccaggcatggtagcagggaatccaatggccccagacttctctttgaactcatttgctccacccttcgccaatggccttccccggaacgttctccaggatcctccagagagccccaaagctttctccctcccttcactcaggctgctgctcaaatgtcacctccttagaaaagcccaccctgacagcccatctgaggaggtgaggggcgcctctgcccggccaccaccccgtctgggaggtgtacccaacagctcattgagaacgggccatgatgacaataggcggttttgtggaatagaaaggggggaaaggaggagcgactcaagcttcgcgaaagaaaataaccaaaaagcatacaaagaaacgtacggcgtctctcatattacacgccatgatatgctgcagatccctaaacagcagcaaaacgaaaaataccaagtgcctcaattcgatcaatcaacgattaaaaatattgagtctgcaaaaggacttgatgtgtgggacagctggccgctgcaaaacgctgacggaacagtagctgaatacaacggctatcacgttgtgtttgctcttgcgggaagcccgaaagacgctgatgacacatcaatctacatgtttatcaaaagtcgcgacaactcaatcgacaatgatgaactcaaccctggctgggcatccatcagcaggggtgtgctggtgtgtgacgagtgctgcagcgtgcaccggagcctgggacgccacatctccattgtcaagcaccttcgccacagcgcctggcctcccacgctgctgcaggctttgcagaactttcagcggtataccggcatacagcatgtgcatcgcataggaatggcggaacgtatgtggtgtgaccggaacagagaacgtcacaccgtcagcagcagcggcgcaaccgcctccccaatccagaccgttcagctggatattacggcctttttaaagaccgtaaagaaaaataagcacaagttttatccggcctttattcacattcttgcccgcctgatgaatgctcatccggagttccgtatggcaatgaaagacgggtttattgagaatatgtttttcgtctcagccaatccctgggtgagtttcaccagttttgatttaaacgtggccaatatggacaacttcttcgcccccgttttcaccatgggcaaatattatacgcaaggcgacaaggtgctgatgccgctggcgattcaggaatatggctggaatctggaccgagcctatgactatgtgaaagaaagacgaacggtaaccaagcccaacccaagcttcatgagacaactggaagagtatcaggggatcttgctggcaagcgttatcaatcacaagaaacgtaaaaatagcccgcgaatcgtccagtcaaacgacctcactgaggcggcatatagtctctcccgggatcaaaaacgtatgctgtatctgttcgttgaccagatcagaaaatctgatggcaccctacaggaacatgacggtatctgcgagatccatgttgctaaatatgctgaaatattcggattgacctctgcggaagccagtaaggatatacggcaggcattgaagagtttcgcggggaaggaagtggttttttatcgccctgaagaggatgccggcgatgaaaaaggctatgaatcttttccttggtttatcaaacgtgcgcacagtccatccagagggctttacagtgtacatatcaacccatatctcattcccttctttatcgggttacagaaccggtttacgcagtttcggcttagtgaaacaaaagaaatcaccaatccgtatgccatgcgtttatacgaatccctgtgtcagtatcgtaagccggatggctcaggcatcgtctctctgaaaatcgactggatcatagagcgttaccagctgcctcaaagttaccagcgtatgcctgacttccgccgccgcttcctgcagcacatatttgttcttcgggagcgccctgaaaccgtgttaatagatctcattcagaggacaaaggatgcagtaagagagctggacaatctgcagtatcgaaagatgaagaaactccttttccaggaggcacataatggaccagcagtagaagcacaggaagaagaagaggatgattga

SEQ ID NO: 127569 - DNA, 2787 bp, Homo sapiens
atgaacatgaacatcaaaaaaattgtaaaacaagccacagttctgacttttacgactgcacttctggcaggaggagcgactcaagccttcgcgaaagaaaataaccaaaaagcatacaaagaaacgtacggcgtctctcatattacacgccatgatatgctgcagatccctaaacagcagcaaaacgaaaaataccaagtgcctcaattcgatcaatcaacgattaaaaatattgagtctgcaaaaggacttgatgtgtgggacaagtggccgcttgcaaacgctgacggaacagtagctgaatacaacggctataacgttgtcgataagttcgacgccaacgatccgatcctgaaagatcagacgcaagaatggtccggttctgcaacctttacatgtgacggaaaaatccgtttattctacactgactattccggtaaacattacggcaaacaaagcctgacaacagcgcaggtaaatgtgttaaaatctgatgacacactcaaaatcaacggagtggaagatcacaaagcgatttttgacggagacggaaaaacatatcagaacgttcagcagcttatcgatgaaggcaattatacatccggcgacaaccatacgctgagagaccctcactacgttgaagacaaaggccataaataccttgtattcgaagccaacacgggaacagaaaacggataccaaggcgaagaatctttatttaacaaagcgtactacggcggcggcacgaacttcttccgtaaagaaagccagaagcttcagcagagcgctaaaaaacgcgatgctgagttagcgaacggcgccctcggtatcatagagttaaataatgattacacattgaaaaaagtaatgaagccgctgatcacttcaaacacggtaactgatgaaatcgagcgcgcgaatgttttcaaaatgaacggcaaatggtacttgttcactgattcacgcggttcaaaaatgacgatcgatggtattaactcaaacgatatttacatgcttggttatgtatcaaactctttaaccggcccttacaagccgctgaacaaaacagggcttgtgctgcaaatgggtcttgatccaaacgatgtgacattcacttactctcacttcgcagtgccgcaagccaaaggcaacaatgtggttatcacaagctacatgacaaacagaggcttcttcgaggataaaaaggcaacatttgcgccaagcttcttaatgaacatcaaaggcaataaaacatccgttgtcaaaaacagcatcctggagcaaggacagctgacatggctccaagtagcgaagcgagcaggactgggcggcggccaaagcggtcggacagtgctccgagaacggcttccaaactacaaaaactttaaaggcacgattcaagaacttggtcaaaaccagtatgcagtcagtggtgaaatatttgtagtggacagaaacacagtagaaattacagagcttccagttagaacttggacacaggtatataaagaacaggttttagaacctatgctaaatggaacagataaaacaccagcattaatttctgattataaagaatatcatactgacacaactgtgaaatttgtggtgaaaatgactgaagagaaactagcacaagcagaagctgctggactgcataaagtttttaaacttcaaactactcttacttgtaattccatggtactttttgatcatatgggatgtctgaagaaatatgaaactgtgcaagacattctgaaagaattctttgatttacgattaagttattacggtttacgtaaggagtggcttgtgggaatgttgggagcagaatctacaaagcttaacaatcaagcccgtttcattttagagaagatacaagggaaaattactatagagaataggtcaaagaaagatttgattcaaatgttagtccagagaggttatgaatctgacccagtgaaagcctggaaagaagcacaagaaaagtgtgacaatctaaaaacttgtcacacttcacatggatctgtcatggcggaaacagcggttatcaatcacaagaaacgtaaaaatagcccgcgaatcgtccagtcaaacgacctcactgaggcggcatatagtctctcccgggatcaaaaacgtatgctgtatctgttcgttgaccagatcagaaaatctgatggcaccctacaggaacatgacggtatctgcgagatccatgttgctaaatatgctgaaatattcggattgacctctgcggaagccagtaaggatatacggcaggcattgaagagtttcgcggggaaggaagtggttttttatcgccctgaagaggatgccggcgatgaaaaaggctatgaatcttttccttggtttatcaaacgtgcgcacagtccatccagagggctttacagtgtacatatcaacccatatctcattcccttctttatcgggttacagaaccggtttacgcagtttcggcttagtgaaacaaaagaaatcaccaatccgtatgccatgcgtttatacgaatccctgtgtcagtatcgtaagccggatggctcaggcatcgtctctctgaaaatcgactggatcatagagcgttaccagctgcctcaaagttaccagcgtatgcctgacttccgccgccgcttcctgcaggtctgtgttaatgagatcaacagcagaactccaatgcgcctctcatacattgagaaaaagaaaggccgccagacgactcatatcgtattttccttccgcgatatcacttccatgacgacaggatag

SEQ ID NO: 127570 - DNA, 1470 bp, Homo sapiens
  misc_feature (1)...(1470): n = a,t,c or g
atggagaaaaaaatcactggatataccaccgttgataatacccaatggcatcgtaaagaacattttgaggcatttcagtcagttgctcaatgtacctataaccagaccgttcagctggatattacggcctttttaaagaccgtaaagaaaaataagcacaagttttatccggcctttattcacattcttgcccgcctgatgaatgctcatccggagttccgtatggcaatgaaagacggtgagctggtgatatgggatagtgttcacccttgttacaccgttttccatgagcaaactgaaacgttttcatcgctctggagtgaataccacgacgatttccggcagtttctacacatatattcgcaagatgtggcgtgttacggtgaaaacctggcctatttccctaaagggtttattgagaatatgtttttcgtctcagccaatccctgggtgagtttcaccagttttgatttaaacgtggccaatatggacaacttcttcgcccccgttttcaccatgggcaaatattatacgcaaggcgacaaggtgctgatgccgctggcgattcaggttcatcatgccgtttgtgatggcttccatgtcggcagaatgcttaatgaattacaacagtactgcgatgagtggcagggcggagaacacaagcatcttcagngtgacaatctaaaaacttgtcacacttcacatggatctgtcatggcggaaacagcggttatcaatcacaagaaacgtaaaaatagcccgcgaatcgtccagtcaaacgacctcactgaggcggcatatagtctctcccgggatcaaaaacgtatgctgtatctgttcgttgaccagatcagaaaatctgatggcaccctacaggaacatgacggtatctgcgagatccatgttgctaaatatgctgaaatattcggattgacctctgcggaagccagtaaggatatacggcaggcattgaagagtttcgcggggaaggaagtggttttttatcgccctgaagaggatgccggcgatgaaaaaggctatgaatcttttccttggtttatcaaacgtgcgcacagtccatccagagggctttacagtgtacatatcaacccatatctcattcccttctttatcgggttacagaaccggtttacgcagtttcggcttagtgaaacaaaagaaatcaccaatccgtatgccatgcgtttatacgaatccctgtgtcagtatcgtaagccggatggctcaggcatcgtctctctgaaaatcgaatggatcatagagcgttaccagctgcctcaaagttaccagcgtatgcctgacttccgccgccgcttcctgcaggtctgtgttaatgagatcaacagcagaactccaatgcgcctctcatacattgagaaaaagaaaggccgccagacgactcatatcgtattttccttccgcgatatcacttccatgacgacaggatag

SEQ ID NO: 127571 - DNA, 1890 bp, Homo sapiens
atgaaactcatggaaacacttaaccagtgcataaacgctggtcatgaaatgacgaaggctatcgccattgcacagtttaatgatgacagcccggaagcgaggaaaataacccggcgctggagaataggtgaagcagcggatttagttggggtttcttctcaggctatcagagatgccgagaaagcagggcgactaccgcacccggatatggaaattcgaggacgggttgagcaacgtgttggttatacaattgaacaaattaatcatatgcgtgatgtgtttggtacgcgattgcgacgtgctgaagacgtatttccaccggtgatcggggttgctgcccataaaggtggcgtttacaaaacctcagtttctgttcatcttgctcaggatctggctctgaaggggctacgtgttttgctcgtggaaggtaacgacccccagggaacagcctcaatgtatcacggatgggtaccagatcttcatattcatgcagaagacactctcctgcctttctatcttggggaaaaggacgatgtcacttatgcaataaagcccacttgctggccggggcttgacattattccttcctgtctggctctgcaccgtattgaaactgagttaatgggcaaatttgatgaaggtaaactgcccaccgatccacacctgatgctccgactggccattgaaactgttgctcatgactatgatgtcatagttattgacagcgcgcctaacctgggtatcggcacgattaatgtcgtatgtgctgctgatgtgctgattgttcccacgcctgctgagttgtttgactacacctccgcactgcagtttttcgatatgcttcgtgatctgctcaagaacgttgatcttaaagggttcgagcctgatgtacgtattttgcttaccaaatacagcaatagtaatggctctcagtccccgtggatggaggagcaaattcgggatgcctggggaagcatggttctaaaaaaatgttctgccccgatggtggattcgttaattgcgcgcgtaggagtaatggctcgcggtaatgccattactttgcctgtatgtggtcgggatgtgaagtttactcttgaagtgctccggggtgatagtgttgagaagacctctcgggtatggtcaggtaatgaacgtgaccaggagctgcttactgaggacgcactggatgatctcatcccttcttttctactgactggtcaacagacaccggcgttcggtcgaagagtatctggtgtcatagaaattgccgatgggagtcgccgtcgtaaagctgctgcacttaccgaaagtgattatcgtgttctggttggcgagctggatgatgagcagatggctgcattatccagattgggtaacgattatcgcccaacaagtgcttatgaacgtggtcagcgttatgcaagccgattgcagaatgaatttgctggaaatatttctgcgctggctgatgcggaaaatatttcacgtaagattattacccgctgtatcaacaccgccaaattgcctaaatcagttgttgctcttttttctcaccccggtgaactatctgcccggtcaggtgatgcacttcaaaaagcctttacagataaagaggaattacttaagcagcaggcatctaaccttcatgagcagaaaaaagctggggtgatatttgaagctgaagaagttatcactcttttaacttctgtgcttaaaacgtcatctgcatcaagaactagtttaagctcacgacatcagtttgctcctggagcgacagtattgtataagggcgataaaatggtgcttaacctggacaggtctcgtgttccaactgagtgtatagagaaaattgaggccattcttaaggaacttgaaaagccagcaccctga

SEQ ID NO: 127572 - DNA, 831 bp, Homo sapiens; identical to SEQ ID NO: 121416

SEQ ID NO: 127573 - DNA, 1554 bp, Homo sapiens
  misc_feature (1)...(1554): n = a,t,c or g
ctatcctgtcgtcatggaagtgatatcgcggaaggaaaatacgatatgagtcgtctggcggcctttctttttctcaatgtatgagaggcgcattggagttctgctgttgatctcattaacacagacctgcaggaagcggcggcggaagtcaggcatacgctggtaactttgaggcagctggtaacgctctatgctccagtcgattttcagagagacgatgcctgagccatccggcttacgatactgacacagggattcgtataaacgcatggcatacggattggtgatttcttttgtttcactaagccgaaactgcgtaaaccggttgtgggtatcggcacgattaatgtcgtatgtgctgctgatgtgctgattgttcccacgcctgctgagttgtttgactacacctccgcactgcagtttttcgatatgcttcgtgatctgctcaagaacgttgatcttaaagggttcgagcctgatgtacgtattttgaacatttttaagaaccatgcttcccagcgcatccggaatttgctcctctatccacgggggctgagagccatcactattgctgtatttggtaagcaaaatacgtacatcaggctcgaaccctttaagatcaacgttcttgagcagatcacgaagcatatcgaaaaactgcagtgcggaggtgtagtcaaacaactcagcaggcgtgggaacaattagtacatcagcagcacatactaccctcatcgtgccgatacccaggttaggcgcgctgtcaataactaccccaccatagtcatgagcaacagtttcaatggccagtaggagcatcaagtgtggatcggtgggcagtttaccttcatcaaatttgcccattaactcagtttcaatacggtgcagagccagacaggaaggaataatgtcaagctctggccagcaagtgggcgctcctgcataagtgacatctgccccgccctgccactcatcgcagtactgttgtaattcattaagcattctgccgacatggaagccatcacaaacggcatgatgaacctgaatcgccagcggcatcagcaccttgtcgccttgcgtataatatttgcccatggtccacacgggggcgaagaagttgtccatattggccacgtttaaatcaaaactggtgaaactcacccagggattggctgagacgaaaaacatattctcaataaaccgtttgataaaccaaggaaaagattcatagcctttttcatcgccggcatcctcttcagggcgataaaaaaccacttccttccccgcgaaactcttcaatgcctgccgtatatccttactggcttccgcagaggtcaatccgaatatttcagcatatttagcaacatggatctcgcagataccgtcatgttcntgtagggtgccatcagattctctgatctggtcaacgaacagatacagcatacgtttttgatcccgcgacacactatatgccgcctcagtgaggtcgtttgactggacgattcgcgggctatttttacgtttcttgtgattgataaccgctgtttccgccat

SEQ ID NO: 127574 - DNA, 1980 bp, Homo sapiens; identical to SEQ ID NO: 119299
  misc_feature (1)...(1980): n = a,t,c or g

SEQ ID NO: 127575 - DNA, 1350 bp, Homo sapiens
  misc_feature (1)...(1350): n = a,t,c or g
tcaggataattgtttcagcatcgcaaccgcatcagactccggcatcgcaaactgcacccggtgccgggcagccacatccagcgcaaaaaccttcgtgtagacttccgttgaactgatggacttatgtcccatcaggctttgcagaactttcagcggtataccggcatacagcatgtgcatcgcataggaatggcggaacgtatgtggtgtgaccggaacagagaacgtcacaccgtcagcagcagcggcggcaaccgcctccccaatccaggtcctgaccgttctgtccgtcacttcccagatccgcgctttctctgtccttcctgtgcgacggttacgccgctccatgagcttatcgcgaataaatacntgaatcgccagcggcatcagcaccttgtcgccttgcgtataatatttgcccatggtgaaaacgggggcgaagaagttgtccacattggccacgtttaaatcaaaactggtgaaactcacccagggattggctgagacgaaaaacatattctcaataaacccatgattacgaattcgagctcggtacccgatggggatcctgttcgagttcggcatcgtcggcgcggcgctgatcctggcgatcccggtgcgcggtgtgtgggtgttccacacgctgcgccggatgcgcgacgacccgttcgtcgccgcgctggggggtcctctagagtccacatacagacattcaagctgcaggaagcggcggcggaagtcaggcatacgctggtaactttgaggcagctggtaacgctctatgatccagtcgattttcagagagacgatgcctgagccatccggcttacgatactcacacagggattcgtataaacgcatggcatacggattggtgatggagacctcccccatttcacacaggaaacagctatgaccatgattacgaattcgagctcggtacccgaaattgccgatgggagtcgccgtcgtaaagctgctgcacttaccgaaagtgattatcgtgttctggttggcgagctggatgatgagcagatggccagtgcataaacgcgggtcataaatgacgaaggctatcgccattgcacagtttaatgatgacagccggaaagcgaggaaaataaccgcgcgagcattttttatgtccatgcatccgcaggcatcggaatcttgctcatccattcgtggggtgtaagagccattactatttatgtatctggtaagatagatacgtacttcaggctggaaccctttaatatcatcgatcttgagcagatcacgaagcatatctaagtaccggtcctcgatttcccataccggggtgcggtagtcgccttgctttctcggcat

SEQ ID NO: 127576 - DNA, 1932 bp, Homo sapiens; identical to SEQ ID NO: 119300
  misc_feature (1)...(1932): n = a,t,c or g

SEQ ID NO: 127577 - DNA, 1386 bp, Homo sapiens; identical to SEQ ID NO: 119301
  misc_feature (1)...(1386): n = a,t,c or g

SEQ ID NO: 127578 - DNA, 1009 bp, Homo sapiens
ctggccgctgcaaaacgctgacggaacagtagctgaatacaacggctatcacgttgtgtttgctcttgcgggaagcccgaaagacgctgatgacacatcaatctacatgttttatcaaaaggtcggcgacaactcaatcgacagctggaaaaacgcgggccgtgtctttaaagacagcgataagttcgacgccaacgatccgatcctgaaagatcagacgcaagaatggtccggttctgcaacctttacatctgacggaaaaatccgtttattctacactgactattccggtaaacattacggcaaacaaagcctgacaacagcgcagtgtgacaatctaaaaacttgtcacacttcacatggatctgtcatggcggaaacagcggttatcaatcacaagaaacgtaaaaatagcccgcgaatcgtccagtcaaacgacctcactgaggcggcatatagtctctcccgggatcaaaaacgtatgctgtatctgttcgttgaccagatcagaaaatctgatggcaccctacaggaacatgacggtatctgcgagatccatgttgctaaatatgctgaaatattcggattgacctctgcggaagccagtaaggatatacggcaggcattgaagagtttcgcggggaaagaagtggttttttatcgccctgaagaggatgccggcgatgaaaaaagctatgaatcttttccttggtttatcaaacgtgcgcacagtccatccagagggctttacagtgtacatatcaacccatatctcattcccttctttatcgggttacagaaccgggttacgcagtttcggcttagtgaaacaaaagaaattaccaatccgtatgccatgcgtttataccaatccctgtgtcagtatcgtaagccggatggctcaagcatcgtctctctggaaatcgactgggtcataaagcggtaccagctgcctcaaaattaccagcgtatgcctgacttcccccgccgcttctggagggtgtggtaa

SEQ ID NO: 127579 - DNA, 2040 bp, Homo sapiens
  misc_feature (1)...(2040): n = a,t,c or g
atgggcacaggggattttatctgcatttccatgactggaggggcgccctgggggttcagattgcaaggtggcaaggagcagaagcagcccttacaagttgcaaagtgggccaatctaaaacctggtcccccttcacatggatctgtcatggcggaaacagcggttatcaatcacaagaaacgtaaaaatagcccgcgaatcgtccagtcaaacgacctcactgaggcggcatatagtctctcccgggatcaaaaacgtatgctgtatctgttcgttgaccagatcagaaaatctgatggcaccctacaggaacatgacggtatctgcgagatccatgttgctaaatatgctgaaatattcggattgacctctgcggaagccagtaaggatatacggcaggcattgaagagtttcgcggggaaggaagtggttttttatcgccctgaagaggatgccggcgatgaaaaaggctatgaatcttttccttggtttatcaaacgtgcgcacagtccatccagagggctttacagtgtacatatcaacccatatctcattcccttctttatcgggttacagaaccggtttacgcagtttcggcttagtgaaacaaaagaaatcaccaatccgtatgccatgcgtttatacgaatccctgtgtcagtatcgcatcgtctctctgaaaatcgactggatcatagagcgttaccagctgcctcaaagttaccagcgtatgcctgacttccgccgccgcttcctgcaggtacacagaaagagaaagaggctttctcatgagctcaactttttcagcattttacaatataggggagctcttacagtctatctgcgaggagttacagaaggtcccaaccctttggaaggccaagaagggcggttcacaagttcaggagatcaagcccttcctggtggggagacacaaaggcagccagacgtggagaggagcacatcagcggataaagatacaagcagctggacagcgagaggacgtggagggagaatgccagtggaagagcacactgacagacatgggaagaggcggagtttggccggggcagtcggagacccagggccactgagtgaggatgccggcgatgaaaaaggctatgaatcttttccttggtttatcaaacgtgcgcacagtccatccagagggctttacagtgtacatatcaacccatatctcattcccttctttatcgggttacagaaccggtttacgcagtttcggcttagtgaaacaaaagaaatcaccaatccgtatgccatgcgtttatacgaatccctntatcgtaagccggatggctcaggcatcgtctctctgaaaatcgactggatcatagagcgttaccagctgcctcaaagttaccagcgtatgcctgacttccgccgccgcttcctgcaggtctgtgttaatgagatcaacagcagaactccaatgcgcctctcatacattgagaaaaagaaaggccgccagacgactcatatcggcaatgaaaggcgggtaagctggttatatgggatagtggtcccccctggtacccccgttttccatgagcaaattgaacgttttcatcgctttggagtgaatcccacgacgatttccggcagtttctacacatatattcgcaagatgtggcgtgttacgcccaatccctgggtgagtttcaccagttttgatttaaacgtggccaatatggacaacttcttcgcccccgttttcaccatgggcaaatattatacgcaaggcgacaaggtgctgatgccgctggcgattcagggattttgcccgatttcggaaaccaccatcaaacaggattttcgcctgctggggcaaaccagcgtggaccgcttgctgcaactctctcagggccaggcggtgaagggcaatcagctgttgcccgtctcactggtgaaaagaaaaaccaccctggcgcccaatacgcaaaccgcctctccccgcgcgttggccgattcattaatgcagctggcacgacaggtttcccgactggaaagcgggcagtga

SEQ ID NO: 127580 - DNA, 657 bp, Homo sapiens
  misc_feature (1)...(657): n = a,t,c or g
atgaagcgtgcgcctgttattccaaaacatacgctcaatactcaaccggttgaagatacttcgttatcgacaccagctgccccgatggtggattcgttaattgcgcgcgtaggagtaatggctcgcggtaatgccattactttgcctgtatgtggtcgggatgtgaagtttactcttgaagtgctccggggtgatagtgttgagaagacctctcgggtatggtcaggtaatgaacgtgaccaggagctgcttactgaggacgcactggatgatctcatcccttcttttctactgactggtcaacagacaccggcgttcggtcgaagagtatctggtgtcatagaaattgccgatgggagtcgccgtcgtaaagctgctgcacttaccgaaagtgattatcgtgttctcctcggcgagctgantagtgagcagaaaactgcattatccagattgggtaacgattatcgcccaacaagtgcttatgaacgtggtcagcgttatgcaagccgattgcagaatgaactcgctggaaatatttctgcgctggctgatgcggaaaatatgtcttccaacacgggaaacaaaaaacggataccaaggcgaagaatctttattgaacaaagggaactacggcggcggcaagaacttcttcggtaa

SEQ ID NO: 127581 - DNA, 783 bp, Homo sapiens
atgaagcgtgcgcctgttattccaaaacatacgctcaatactcaaccggttgaagatacttcgttatcgacaccagctgccccgatggtggattcgttaattgcgcgcgtaggagtaatggctcgcggtaatgccattactttgcctgtatgtggtcgggatgtgaagtttactcttgaagtgctccggggtgatagtgttgagaagacctctcgggtatggtcaggtaatgaacgtgaccaggagctgcttactgaggacgcactggatgatctcatcccttcttttctactgactggtcaacagacaccggcgttcggtcgaagagtatctggtgtcatagaaattgccgatgggagtcgccgtcgtaaagctgctgcacttaccgaaagtgattatcgtgttctggttggcgagctggatgatgagcagatggctgcattatccagattgggtaacgattatcgcccaacaagtgcttatgaacgtggtcagcgttatgcaagccgattgcagaatgaatttgctggaaatatttctgcgctggctgatgcggataatatttcacgtaagattattacccgctgtatcaacaccgacaaattgcctgaatcagttgttgctcttttttctcactccggtgaactatctgcccggtcagtctgggaccacggtcccactcgtatcgtcggtctgattattagtctgggaccacggtcccactcgtatcgtcggtctgataatcagactgggaccacggtcccactcgtatcgtcggtctga

SEQ ID NO: 127582 - DNA, 894 bp, Homo sapiens
atgaagcgtgcgcctgttattccaaaacatacgctcaatactcaaccggttgaagatacttcgttatcgacaccagctgccccgatggtggattcgttaattgcgcgcgtaggagtaatggctcgcggtaatgccattactttgcctgtatgtgggggggatgtgaagtttactcttgaagtgctccggggtgatagtgttgagaagacctctcgggtatggtcaggtaatgaacgtgaccaggagctgcttactgaggacgcactggatgatctcatcccttcttttctactgactggtcaacagacaccggcgttcggtcgaagagtatctggtgtcatagaaattgccgatgggagtcgccgtcgtaaagctgctgcacttaccgaaagtgattatcgtgttctggttggcgagctggatgatgagcagatggctgcattatccagattgggtaacgattatcgcccaacaagtgcttatgaacgtgggcagcgttatgccagccgattgcagaatgaatttgctggaaatatttctgcgctggctgatgcggaaaatttttacaaccggtttacgcagtttcggcttagtgaaacaaaagaaatcaccaatccgtatgccatgcgtttatacgaatccctgtgtcagtatcgtaagccggatgggtcaggcatcgtctctctgaaaatcgactggatcatagagcgttaccagctgcctcaaagttaccagcgtatgcctgacttccgccgccgcttcctgcaggtctgtgttaatgagatcaacagcagaactccaatgcgcctctcatacattgagaaaaagaaaggccgccagacgactcatatcgtattttccttccgcgatatcacttccatgacgacaggatag

SEQ ID NO: 127583 - DNA, 1053 bp, Homo sapiens; identical to SEQ ID NO: 118377

SEQ ID NO: 127584 - DNA, 1869 bp, Homo sapiens
  misc_feature (1)...(1869): n = a,t,c or g
atggcggaaacagcggttatcaatcacaagaaacgtaaaaatagcccgcgaatcgtccagtcaaacgacctcactgaggcggcatatagtctctcccgggatcaaaaacgtatgctgtatctgttcgttgaccagatcagaaaatctgatggcaccctacaggaacatgacggtatctgcgagatccatgttgctaaatatgctgaaatattcggattgacctctgcggaagccagtaaggatatacggcaggcattgaagagtttcgcggggaaggaagtggttttttatcgccctgaagaggatgccggcgatgaaaaaggctatgaatcttttccttggtttatcaaacgtgcgcacagtccatccagagggctttacagtgtacatatcaacccatatctcattcccttctttatcgggttacagaaccggtttacgcagtttcggcttagtgaaacaaaagaaatcaccaatccgtatgccatgcgtttatacgaatccctgtgtcagtatcgtaagccggatggctcaggcatcgtctctctgaaaatcgactggatcatagagcgttaccagctgcctcaaagttaccagcgagtgtggaccccaggcatcaactgtccagagccctgtccaggagtgtggaccccaggcatcaactgtccaggggcctggggcatccatgggccacacggcagcgctgaaaacacagggcccttgcacccagggcagacctcagcacagttggagacatcactcctgccctccttgcgctcggcccgagagctagagcttgctcagctcagccccaggaggaagcagaaccgcagcctccagaacattggggtgaccccgtcgctgagggtcccctggcccaaggccagcaacgttcagcagtttatcgatgaaggcaattatacatccggcgacaaccatacgctgagagaccctcactacgttgaagacaaaggccataaataccttgtattcgaagccaacacgggaacagaaaacggataccaaggcgaagaatctttatttaacaaagcgtactacggcggcggcacgaacttcttccgtaaagaaagccagaagcttcagcagagcgctaaaaaacgcgatgctgagttagcgaacggcgccctcggtatcatagagttaaataatgattacacattgaaaaaagtaatgaagccgctgatcacttcaaacacggtaactgatgaaatcgagcgcgcgaatgttttcaaaatgaacggcaaatggtacttgttcactgattcacgcggttcaaaaatgacgatcgatgtgccgcaagccaaaagcaacaatgtgggtatcacaagctacatgacaaacagaagcttcttcgaggataaaaagccacatttgcgccaggcttcttatggaacatcaaagccattaaaacttcccnagatccccggcacgattaatgtcgtatgtgctgctgatgtgctgattgttcccacgcctgctgagttgtttgactacacctccgcactgcagtttttcgatatgcttcgtgatctgctcaagaacgttgatcttaaagggttcgagcctgatgtacgtattttgcttaccaaatacagcaatagtaatggctctcagtccccgtggatggaggagcaaattcgggatgcctggggaagcatggttctaaaaaatgttgtacgtgaaacggatgaagttggtaaaggtcagatccggatgagaactgtttttgaacaggccattgatcaacgctcttcaactggtgcctggagaaatgctctttctatttgggaacctgtctgcaatgaaattttcgatcgtctgattaaaccacgctgggagattagataa

SEQ ID NO: 127585 - DNA, 1101 bp, Homo sapiens
atggtggattcgttaattgcgcgcgtaggagtaatggctcgcggtaatgccattactttgcctgtatgtggtcgggatgtgaagtttactcttgaagtgctccggggtgatagtgttgagaagacctctcggacaccggcgttcggtcgaagagtatctggtgtcatagaaattgccgatgggagtcgccgtcgtaaagctgctgcacttaccgaaagtgattatcgtgttctggttggcgagctggatgatgagcagatggctgcattatccagattgggtaacgattatcgcccaacaagtgcttatgaacgtggtcagcgttatgcaagccgattgcagaatgaatttgctggaaatatttctgcgctggctgatgcggaaaatatttcactcgtctctagaggatccccgaaattggcatttgtgaattgtggaggatgtcagcaactggaggaagacaataaattacttgtggaagagaattcctgggtttgggaaaaaatgactatgaaccggtttacgcagtttcggcttagtgaaacaaaagaaatcaccaatccgtatgccatgcgtttatacgaatccctgtgtcagtatcgtaagccggatggctcaggcatcgtctctctgaaaatcgactggatcatagagcgttaccagctgcctcaaagttaccagcgtatgcctgacttccgccgccgcttcctgcagaggatcccctacagtgtacatatcaacccatatctcattcccttctttatcgggttacagaaccggtttacgcagtttcggcttagtgaaacaaaagaaatcaccaatccgtatgccatgcgtttatacgaatccctgtgtcagtatcgtaagccggatggctcaggcatcgtctctctgaaaatcgactggatcatagagcgttaccagctgcctcaaagttaccagcgtatgcctgacttccgccgccgcttcctgcaggtctgtgttaatgagatcaacagcagaactccaatgcgcctctcatacattgagaaaaagaaaggccgccagacgactcatatcgtattttccttccgcgatatcacttccatgacgacaggatag

SEQ ID NO: 127586 - DNA, 436 bp, Homo sapiens; identical to SEQ ID NO: 119095
  misc_feature (1)...(436): n = a,t,c or g

SEQ ID NO: 127587 - DNA, 376 bp, Homo sapiens
  misc_feature (1)...(376): n = a,t,c or g
aaccagcatggataaaggcctacaaggcgctctaaaaaagaagatctaaaanctataaaaaaaataattataaaaatatccccgtggataagtggataaccccaagggaagttttttcaggcatcgtgtgtaagcagaatatataagtgctgttccctggtnnnnnnnnnnnnnnnnnnnnnnnnnnnnnnnnnnnnnnnnnnnnnnnnnnnnnnnnngctgtaaaaggacagaccacatcatggttctgtgttcattaggttgttctgtccattgctgacataatccgctccacttcaacgtaacaccgcacgaagatttttattgttcctgaaggcatattcaaatcgttttcgttaccgcttgcaggcatcat

SEQ ID NO: 127588 - DNA, 647 bp, Homo sapiens
  misc_feature (1)...(647): n = a,t,c or g
agtttgtagattgtcncnctaaataaaaaagagtcaataagcaggaatatctgtgtgaaaaacatgcctcttctgagggcnatttgtcacagggttaagggcaatttgtcacagacaggactgtcatttgagggtgatttgtcacactgaaaggcaatttgtcacaacaccttctctaaacccagcatggataaaggcctacaaggcgctctaaaaaagaaggttttaaaacctataaaaaaaatatttataaaaatatccccgtggataagtggataaccccaagggaagttttttcaggcatcgtgtgtaagcagaatatataagtgctgttccctggtnnnnnnnnnnnnnnnnnnnnnnnnnnnnnnnnnnnnnnnnnnnnnnnnnnnnnnnnngctgtaaaaggacagaccacatcatggttctgtgttcattaggttgttctgtccattgctgacataatccgctccacttcaacgtaacaccgcacgaagatttctattgttcctgaaggcatattcaaatcgttttcgttaccgcttccaggcatcatgacagaacactacttcctataaacgctacacaggctcctgagattaannnnnnnnnnnnnnnnnnnnnnnnnnnnnnnnnnnggtcagaca

SEQ ID NO: 127589 - DNA, 406 bp, Homo sapiens
  misc_feature (1)...(406): n = a,t,c or g
aacaagttggcttatagagattataaaacttataaaaaaaataattataaaaatatccccgtggataagtggataaccccaagggaagttttttcaggcatcgtgtgtaagcagaatatataagtgctgttccctggtnnnnnnnnnnnnnnnnnnnnnnnnnnnnnnnnnnnnnnnnnnnnnnnnnnnnnnnnngctgtaaaaggacagaccacatcatggttctgtgttcattaggttgttctgtccattgctgacataatccgctccacttcaacgtaacaccgcacgaagatttctattgttcctgaaggcatattcaaatcgttttcgttaccgcttgcaggcatcatgacagaacagtacttcctataaacgctacacaggctcctgagattaataatgc

SEQ ID NO: 127590 - DNA, 1902 bp, Homo sapiens; identical to SEQ ID NO: 118124

SEQ ID NO: 127591 - DNA, 1044 bp, Homo sapiens
  misc_feature (1)...(1044): n = a,t,c or g
atgatcggtatggagctgccaggcctggaaggaacagaactggaggggtgtcacgagcgggaggtcgtgtacgatcgggtgcgcgtgttcgaaaagaggggagaggctcgacatgtcgaggcgcgaagtccggggggtgggagtgagaaacgcggttgggggggagcccgtcatcagcggatgtgtaggaaaggcgccgacaacggaggggcgggccgcgcccgaagggtggcccgactgcgccagctggcgtcgagggccatcggcaggcgcaagggggcggtactttatcaaacaccggttatcaatcacaagaaacgtaaaaatagcccgcgaatcgtccagtcaaacgatctcactgaggcggcatatagtctctcccgggatcaaaaacgtatgctgtatctgttcgttgaccagatcagaaaatctgatggcaccctacaggaacatgacggtatctgcgagatccatgttgctaaatatgctgaaatattcggattgancctctggcgggaagccagtaaggatatacggcaggcattgaagagtttcgcggggaaggaagtggttttttatcgccctgaagaggatgccggcgatgaaaaaggctatgaatcttttccttggtttatcaaacgtgcgcacagtccatccagagggctttacagtgtacatatcaacccatatctcattcccttctttatcgggttacagaaccggtttacgcagtttcggcttagtgaaacaaaagaaatcaccaatccgtatgccatgcgtttatacgaatccctgtgtcagtatcgtaagccggatggctcaggcatcgtctctctgaaaatcgactggatcatagagcgttaccagctgcctcaaagttaccagcgtatgcctgacttccgccgccgcttcctgcaggtctgtgttaatgagatcaacagcagaactccaatgcgcctctcatacattgagaaaaagaaaggccgccagacgactcatatcgtattttccttccgcgatatcacttccatgacgacaggatag

SEQ ID NO: 127592 - DNA, 1425 bp, Homo sapiens; identical to SEQ ID NO: 119112

SEQ ID NO: 127593 - DNA, 1002 bp, Homo sapiens
atggcagtcccagtcccaaaagcagctcaggacatttgtcccacttctcccactctggccagagcgctcaggattggggttccgtttgacagatatggaaatggggacttcaccgaagccaggcgctttggcacgaaatgcgccggctgcgcgcaaggcatctcgcccagcgacctggtgcgcaaggcccggagcaaagtctttcacctcaactgtttcacctgcatggtgtgtaacaagcagctgtccaccggcgaggagctctacgtcatcgacgagaacaagttcgtgtgcaaagacgactacctgagctcatccagcctcaaggagggcagcctcaactcagcagttcatcatatgctgtatctgttcgttgaccagatcagaaaatctgatggcaccctacaggaacatgacggtatctgcgagatccatgttgctaaatatgctgaaatattcggattgacctctgcggaagccagtaaggatatacggcaggcattgaagagtttcgcggggaaggaagtggttttttatcgccctgaagaggatgccggcgatgaaaaaggctatgaatcttttccttggtttatcaaacgtgcgcacagtccatccagagggctttacagtgtacatatcaacccatatctcattcccttctttatcgggttacagaaccggtttacgcagtttcggcttagtgaaacaaaagaaatcaccaatccgtatgccatgcgtttatacgaatccctgtgtcagtatcgtaagccggatggctcaggcatcgtctctctgaaaatcgactggatcatagagcgttaccagctgcctcaaagttaccagcgtatgcctgacttccgccgccgcttcctgcaggtctgtgttaatgagatcaacagcagaactccaatgcgcctctcatacattgagaaaaagaaaggccgccagacgactcatatcgtattttccttccgcgatatcacttccatgacgacaggatag

SEQ ID NO: 127594 - DNA, 1602 bp, Homo sapiens; identical to SEQ ID NO: 127341

SEQ ID NO: 127595 - DNA, 1560 bp, Homo sapiens
atgcgcgccgaacagccggtacagtacacggcagctctcgaaactagcacacccttccctacggccacccaagcaggggacgttgccagctaccgcgttgtctctgggtgcctctggacggccgaggatggcacgggcttagtatatccctccgggacagcgccgaccccgcaccgccccgccgaccccgccctctcccacctcggccgcatcccccgcatgcatcccgggccacagtccccgttccgccacctcgctcccggcccggcagccgccgccctgcggggcggggaccacgggtccctccacatcctcgcggcctgccggacagtcctgcgggcggggccccaacgcctaggcggtcccgggagccctgggccgcctccccccgccccccagggctgtcacccgctggcgcgtggggctcctactgggaccccggtctttggacctggcccatgtggccccagtgcatgcggcctcgccattctccgctcagggcccgaggggccgcccttcctggaggcctccccaggacccacccacctctgggacttgcgggggcatctcctgcaaatggacgccaagtctggggaaagtttctggcgatgtcaaggattatcctggactatctatgtgggtgcaacgcaatcacgatggtcctttaaatgcggaagaggtaggcaggaagtcagagtcagagagaaatatgaagttgctatactgctggctttgaagatgaaggaaggggctgcaagccagtgtgacaatctaaaaacttgtcacacttcacatggatctgtcatggcggaaacagcggttatcaatcacaagaaacgtaaaaatagcccgcgaatcgtccagtcaaacgacctcactgaggcggcatatagtctctcccgggatcaaaaacgtatgctgtatctgttcgttgaccagatcagaaaatctgatggcaccctacaggaacatgacggtatctgcgagatccatgttgctaaatatgctgaaatattcggattgacctctgcggaagccagtaaggatatacggcaggcattgaagagtttcgcggggaaggaagtggttttttatcgccctgaagaggatgccggcgatgaaaaaggctatgaatcttttccttggtttatcaaacgtgcgcacagtccatccagagggctttacagtgtacatatcaacccatatctcattcccttctttatcgggttacagaaccggtttacgcagtttcggcttagtgaaacaaaagaaatcaccaatccgtatgccatgcgtttatacgaatccctgtgtcagtatcgtaagccggatggctcaggcatcgtctctctgaaaatcgactggatcatagagcgttaccagctgcctcaaagttaccagcgtatgcctgacttccgccgccgcttcctgcaggtctgtgttaatgagatcaacagcagaactccaatgcgcctctcatacattgagaaaaagaaaggccgccagacgactcatatcgtattttccttccgcgatatcacttccatgacgacaggatag

SEQ ID NO: 127596 - DNA, 1281 bp, Homo sapiens; identical to SEQ ID NO: 119103

SEQ ID NO: 127597 - DNA, 895 bp, Homo sapiens; identical to SEQ ID NO: 119104

SEQ ID NO: 127598 - DNA, 1125 bp, Homo sapiens
atggaagaaaatgaaagagatttagaaataaacatgattaacatgtccaaagagctaaaggtagaaaatattaaaaaacacataggcatgcttgaaaaggatgaaattgaaatcatagtgacaaaaagtatactcattgaaatagaaatcccaacacagtgccttagaaatttaaatacccttcatctggctgcttctgcaggcaaccacatgtcaaacactgcttgttggtatggctgtgaggacttcacttcagtgagcacctttgcacaccagggagtgggaagctgggatgcatatgaaccagcagcctctttgttattaagctgtgacaatctaaaaacttgtcacacttcacatggatctgtcatggcggaaacagcggttatcaatcacaagaaacgtaaaaatagcccgcgaatcgtccagtcaaacgacctcactgaggcggcatatagtctctcccgggatcaaaaacgtatgctgtatctgttcgttgaccagatcagaaaatctgatggcaccctacaggaacatgacggtatctgcgagatccatgttgctaactatgctgaaatatacggattgacctctgcggaagccagtaaggatatacggcaggcattgaagagtttcgcggggaaggaagtggttttttatcgccctgaagaggatgccggcgatgaaaaaggctatgaatcttttccttggtttatcaaacgtgcgcacagtccatccagagggctttacagtgtacatatcaacccatatctcattcccttctttatcgggttacagaaccggtttacgcagtttcggcttagtgaaacaaaagaaatcaccaatccgtatgccatgcgtttatacgaatccctgtgtcagtatcgtaagccggatggctcaggcatcgtctctctgaaaatcgactggatcatagagcgttaccagctgcctcaaagttaccagcgtatgcctgacttccgccgccgcttcctgcaggtctgtgttaatgagatcaacagcagaactccaatgcgcctctcatacattgagaaaaagaaaggccgccagacgactcatatcgtattttccttccgcgatatcacttccatgacgacaggatag

SEQ ID NO: 127599 - DNA, 1131 bp, Homo sapiens
atggtggattcgttaatggcgcgcgtaggagtaatggctcgcggtaatcccattactttgcctgtatgtggtcgggatgtgaagtttactcttgaagtgctccggggtgatagtgttgagaagacctctcggacaccggcgttcggtcgaagagtatctggtgtcatagaaattgccgatgggagtcgccgtcgtaaagctgctgcacttaccgaaagtgattatcgtgttctggttggcgagctggatgatgagcagatggctgcattatccagattgggtaacgattatcgcccaacaagtgcttatgaacgtggtcagcgttatgcaagccgattgcagaatgaatttgctccccatatttctgcgctggctgatgcggaaaatataatcacgtgcgcctttattccaaaacatacgcccaatatcaaccggttgaaagatatttcgttaacgacaccagttgccccgatggtggattcgttatttgcgcgcgtaggagtaatggctcgcggtaatgccaatactttgcctgtatgtggtcgggatgtgaagtttactcttaaagtgctccggggtgatagtgttgagaagacctctcgggtatggtcaggtaatgaacgtgaccaggagctgcttactgaggacgcactggatgatctcatcccttcttttctactgactggtcaacagacaccggcgttcggtcgaagagtatctggtgtcatagaaattgccgatgggagtcgccgtcgtaaagctgctgcacttaccgaaagtgattatcgtgttctggttggcgagctggatgatgagcagatggctgcattatccagattgggtaacgattatcgcccaacaagtgcttatgcacgtggtcagcgttatgcaagccgattgcagaatgaattcgccccccacatttctgcgctggctgatgcggaaaataaaaaacgtaaaaaaattacccgctgtatcaacaccgccaaattgcctaaatcagttgttgctcttttttctcaccccggtgaactatctgccccgtcaggaacgggaaaggaagtaattcttgaagtgcagctgattcacaatgtattccaatacaccttgcttgcttgttttgggacctga

SEQ ID NO: 127600 - DNA, 1188 bp, Homo sapiens
atgaagcgtgcgcctgttattccaaaacatacgctcaatactcaaccggttgaagatacttcgttatcttcaccagctgtttcgatggtggattcgttaattgcgcgcgtgggagtaatggctcgcggtaatgccattactttgcctgtatgtggtcgggatgtgaagtttactcttgaagtgctccggggtgatagtgttgagaagacctctcgggtatggtcaggtaatgaacgtgaccaggagctgcttactgaggacgcactggatgatctcatcccttcttttctactgactggtcaacagacaccggcgttcggtcgaagagtatctggtgtcatagaaattgccgatgggagtcgccgtcgtaaagctgctgcacttaccgaaagtgattatcgtgttctggttggcgagctggatgatgagcagatggctgaattatccagattgggtaacgattatcgcccaacaagtgcttatgaacgtggtcagcgttatgcaagccgattgcagaaagaatttgctggaaatatttctgcgctggctgatgcggaaaaatatttacgtatcagtgataaacttgggaataatacagaaacatcaatgagccaaaagccttgcaaaatgaaaaggataattctagagaagagttggcagtttgaaaaatggatcatcatagtgatcttatttcattatggtgaaagttggaacctcttacgtgccgatcaacgtctcattttcgccaaaagttggcccagggcttcccggtatcaacagggacaccaggatttatttattctgcgaagtgatcttccgtcacaggtatttattcgcgataagctcatggagcggcgtaaccgtcgcacaggaaggacagagaaagcgcggatctgggaagtgacggacagaacggtcaggacctggattggggaggcggttgccgccgctgctgctgacggtgtgacgttctctgttccggtcacaccacatacgttccgccattcctatgcgatgcacatgctgtatgccggtataccgctgaaagttctgcaaagcctgatgggacataagtccatcaattcaacggaagtctacacgaaagtttttgcgctggatgtggctgcccggcaccgggtgcagtttgcgatgccggaatctgatgccgttgcaatgctatccttttaa

SEQ ID NO: 127601 - DNA, 987 bp, Homo sapiens; identical to SEQ ID NO: 127362

SEQ ID NO: 127602 - DNA, 3561 bp, Homo sapiens
atgcttcaaagcaaccgaaccgccgccagccattcaccatccatccagccagccatccagccagccatccagccagccaaccaactatccatccacaatttgtggacacaattccggcattcaaccaaaattccagttgaatgggtgaatggtgaatggctgaatggacgaatgccaggggatcatcatgaatggcaatgcaactatcagccagccatccagccagccatccagccagccaaccaactatccatccacaatttgtggacacaattccggcattcaaccaaaattccagttgaatgggtgaatggtgaatggctgaatggacgaatgacaaaggatcatcatgaatggcaatgcaactatcagccagccatccagccagccatccagccagccaaccaactatccatccacaatttgtggacacaattccggcattcaaccaaaattccagttgaatgggtgaatggtgaatggctgaatggacgaaagcaaggggatcatcatgaatggcaatgcaactatcagccagccatccagccagccatccagccagccaaccaactatccatccacaatttgtggacacaattccggcattcaaccaaaattccagttgaatgggtgaatggtgaatggctgaatggacgaatgccaggggatcatcatgaatggcaatgcaactatcagccagccatccagccagccatccagccagccaaccaactatccatccacaatttgtggacacaattccggcattcaaccaaaattccagttgaatgggtgaatggtgaatggctgaatggacgaatgccaggggatcatcatgaatggcaatgcaactatcagccagccatccagccagccatccagccagccaaccaactatccatccacaatgtgtggacacaattccggcattcaaccaaaattccagttgaatgggtgaatggtgaatggctgaatgcacgaaagcaaggggatcatcatgaatggcaatgcaactatcaggcagcgattgttccgttaaccgttggtgcagcaccgtttattgcccgtatggtcgagaacgctctgctggagatcccaaccgggttaattgaagcttcccgcgcaatgggtgccacgccgatgcagatcgtcccgctgccgggtctggtgaatgcggcaactatcaccctgattaccctggtcggttattccgcgatgggtggtgcagtcggtgccggtggtttaggtcagattggctatcagtatggctacatcggctataacgcgacggtgatgaatacgccagccatccagccagccatccagccagccaaccaactatccatccacaatttgtggacacaattccggcattcaaccaaaattccagttgaatgggtgaatggtgaatggctgaatggacgaatgccaggggatcatcatgaatggcaatgcaactatcagccagccatccagccagccatccagccagccaaccaactatccatccacaatttgtggacacaattccggcattcaaccaaaattccagttgaatgggtgaatggtgaatggctgaatggacgaatgccaggggatcatcatgaatggcaatgcaactatcagccagccatccagccagccatccagccagccaaccaactatccatccacaatttgtggacacaattccggcattcaaccaaaattccagttgaatgggtgaatggtgaatggctgaatggacgaatgacagaggatcatcatgaatggcaatgcaactatcagccagccatccagccagccatccagccagccaaccaactatccatccacaatttgtggacacaattccggcattcaaccaaaattccagttgaatgggtgaatggtgaatggctgaatggacgaatgacaggggatcatcatgaatggcaatgcaactatcagagcagccgaaccgccgccagccattcaccatccatccagccagccatccagccagccatccagccagccaaccaactatccatccacaatttgtggacgcaattccggcattcaaccaaaattccagttgaatgggtgaatggtgaatggctgaatggacgaatgccaggggatcatcatgaatggcaatgcaactatcaggaacatgacggtatctgcgagatccatgttgctaaatatgctgaaatattcggattgacctctgcggaagccagtaaggatatacggcaggcattgaagagtttcgcggggaaggaagtggttttttatcgccctgaagaggatgccggcgatgaaaaaggctatgaatcttttccttggtttatcaaacgtgcgcacagtccatccagagggctttacagtgtacatatcaacccatatctcattcccttctttatcgggttacagaaccggtttacgcagtttcgccattcaccatccatccagccagccatccagccagccatccagccagccaaccaactatccatccacaatttgtggacacaattccggcattcaaccaaaattccagttgaatgggtgaatggtgaatggctgaatggacgaatgccaggggatcatcatgaatggcaatgcaactatcagccagccatccagccagccatccagccagccaaccaactatccatccacaatttgtggacacaattccggcattcaaccaaaattccagttgaatgggtgaatggtgaatggctgaatggacgaatgccaggggatcatcatgaatggcaatgcaactatcagccagccatccagccagccatccagccagccaaccaactatccatccacaatttgtggacacaattccggcattcaaccaaaattccagttgaatgggtgaatggtgaatggctgaatggacgaatgccaggggatcatcatgaatggcaatgcaactatcaggaaaaaattgggccaaattggggctttcattcaagtggccctttcccccgaatactttcaaaatgcggatcagggggacttcttattctgtttaaagaagaagttttgatacccccgacgggtcctggcgcagttctttcacctgggaatggtgtagcgccaaatcgacaaactccaccgaggagtacccgattggtactgtcaacggtgcgtgaagttggtcactactcttgccgttcgatgaccggtaactgtgcggcactggcggcgctggctgatgaacctggctacgcacaaatcaataccgaagacgccaaacgtctgggtattgaagatgaggcattggtttgggtgcactcgcgtaaaggcaaaattatcacccgtgcgcaggtcagcgatcgtccgaacaaaggggcgatttacatgacctaccagtggtggattggtgcctgtaacgagctggttaccgaaaacttaagcccgattacgaaaacgccggagtacaaatactgcgccgttcgcgtcgagccgatcgccgatcagcgcgccgccgagcagtacgtgattgacgagtacaacaagttgaaaactcgcctgcgcgaagcggcactggcgtaa

SEQ ID NO: 127603 - DNA, 1797 bp, Homo sapiens
  misc_feature (1)...(1797): n = a,t,c or g
atgggtgcagctggaggtcatcgtattaagcaagataagccaagcacagaaagacagataccacatgttctcactcaaaggtctagaaaagccatccaagagccaagtcctggaataaaggaccccaagaggtcacttggtgctctagaccctgtggctgagctggtacctaagaccgttcagctggatattacggcctttttaaagaccgtaaagaaaaataagcacaagttttatccggcctttattcacattcttgcccgcctgatgaatgctcatccggaattccgtatggcaatgaaagacggtgagctggtgatatgggatagtgttcacccttgttacaccgttttccatgagcaaactgaaacgttttcatcgctctggagtgaataccacgacgatttccggcagtttctacacatatattcgcaagatgtggcgtgttacggtgaaaacctggcctatttccctaaagggtttattgagaatatgtttttcgtctcagccaatccctgggtgagtttcaccagttttgatttaaacgtggccaatatggacaacttcttcgcccccgttttcaccatgggcaaatattatacgcaaggcgacaaggtgctgatgccgctggcgattcaggttcatcatgccgtttgtgatggcttccatgtcggcagaatgcttaatgaattacaacagtactgcgatgagtggcagggcggggggtnaaaacatacgctcaatactcaaccggttgaagatacttcgttatcgacaccagctgccccgatggtggattcgttaattgcgcgcgtaggagtaatggctcgcggtaatgccattactttgcctgtatgtggtcgggatgtgaagtttactcttgaagtgctccggggtgatagtgttgagaagacctctcgggtatggtcaggtaatgaacgtgaccaggagctgcttactgaggacgcactggatgatctcatcccttcttttctactgactggtcaacagacaccggcgttcggtcgaagagtatctggtgtcatagaaattgccgatgggagtcgccgtcgtaaagctgctgcacttaccgaaagtgattatcgtgttctggttggcgagctggatgatgagcagatggctgcattatccagattgggtaacgattatcgcccaacaagtgcttatgaacgtggtcagcgttatgcaagccgattgcagaatgaatttgctggaaatatttctgcgctggctgatgcggaaaatatttcacgtaagattattacccgctgtatcaacaccgccaaattgcctaaatcagttgttgctcttttttctcaccccggtgaactatctgcccggtcaggtgatgcacttcaaaaagcctttacagataaagaggaattacttaagcagcaggcatctaaccttcatgagcagaaaaaagctggggtgatatttgaagctgaagaaggtccccggtcaggtgatgcacttcaaaaagcctttacagataaagaggaattatttaagcagcaggcatctaaccttcatgagcagaaaaaagctggggtgatatttgaagctgaagaagttatcactcttttaacttctgtgcttaaaacgtcatctgcatcaagaactagtttaagctcacgacatcagtttgctcctggagcgacagtattgtataagggcgataaaatggtgcttaacctggacaggtctcgtgttccaactgagtgtatagagaaaattgaggccattcttaaggaacttgaaaagccagcaccctga

SEQ ID NO: 127604 - DNA, 1203 bp, Homo sapiens
gctggccttgggccaggggaccctcagcgacggggtcaccccaatgttctggaggctgcggttctgcttcctcctggggctgagctgagcaagctctagctctcgggccgagcgcaaggagggcaggagtgatgtctccaactgtgctgaggtctgccctgggtgcaagggccctgtgttttcagcgctgccgtgtggcccatggatgccccaggcccctggacagttgatgcctggggtccacactcctggacagggctctggacagttgatgcctggggtccacactcgctggtaactttgaggcagctggtaacgctctatgatccagtcgattttcagagagacgatgcctgagccatccggcttacgatactgacacagggattcgtataaacgcatggcatacggattggtgatttcttttgtttcactaagcggaaactgcgtaaaccggttctgtaacccgataaagaagggaatgagatatgggttgatatgtacactgtaaagccctctggatggactgtgcgcacgtttgataaaccaaggaaaagattcatagcctttttcatcgccggcatcctcttcagggcgataaaaaaccacttccttccccgcgaaactcttcaatgcctgccgtatatccttactggcttccgcagaggtcaatccgaatatttcagcatatttagcaacatggatctcgcagataccgtcatgttcctgtagggtgccatcagattttctgatctggtcaacgaacagatacagcatacgtttttgatcccgggagagactatatgccgcctcagtgaggtcgtttgactggacgattcgcgggctatttttacgtttcttgtgattgataaccgctgtttccgccatgacagatccatgtgaagtgtgacaagtttttagattgtcacaagcatattccctgtgtgtcttggtgtccgcatttctctcttttatcaggacaccagtcactgaattatggaccaccttaatatccagcagggagttcttcgatgatgccgcagagatgacagagttgcgttcttgatccatccccaggatttggcttccataatgcaaaagtcctttattctttttggggctccaagaattaccaaccggttgcaaagaaactgggttaaaaaaaagggcccccaaagtctctccggtccggtttcttttcat

SEQ ID NO: 127605 - DNA, 1177 bp, Homo sapiens
atgggtcctctgccttttggcaagggagtcttcatcactgatgccagccatcaggtacttgaggcctgtgatccaggtgcgggcctcctcggggttggaggtgatgaggtccagggactccatgtggttgccatggtagatggtgaagcagcagctggggtcgaagttcccctcagcttgtctgtggaatatttcagactgccggccctcagtcactttgtaaatggaatcaataagtactggcacagacaaacaaaaagacagcaggaacttctgcagacttatatgtccccgtctgacagctttgaagaaaagcagtggttctccccaccaacgcaccttggagattttggagaacaaggcaagaatggttctcctcaagggggcgcagcggttatcaatcacaagaaacgtaaaaatagcccgcgaatcgtccagtcaaacgacctcactgaggcggcatatattctctcccgggatcaaaaacgtatgctgtatctgttcgttgaccagatcagaaaatctgatggcaccctacaggaacatgacggtatctgcgagatccatgttgctaaatatgctgaaatattcggattgacctctgcggaagccagtaaggatatacggcaggcattgaagagtttcgcggggaaggaagtggttttttatcgccctgaagaggatgccggcgatgaaaaaggctatgaatcttttccttggtttatcaaacgtgcgcacagtccatccagagggctttacagtgtacatatcaacccatatctcattcccttctttatcgggttacagaaccggtttacgcagtttcggcttagtgaaacaaaagaaatcaccaatccgtatgccatgcgtttatacgaatccctgtgtcagtatcgtaagccggatggctcaggcatcgtctctctgaaaatcgactggatcatagagcgttaccagctgcctcaaagttaccagcgtatggcctgacttccgccgccgcttcctgcagcacatatttgttcttcgggagcgccctgaaaccgtgttaatagatctcattcagaggacaaaggatgcagtaagagagctggacaatctgcagtatcgaaagatgaagaaactccttttccaggaggcacataatggaccagcagtagaagcacaggaagaagaagag

SEQ ID NO: 127606 - DNA, 2421 bp, Homo sapiens
gattctgagtatgtctttgtggtggttgatttcctaattggagtgttaatttttgctaccatcgttggtaacataggttctatgatttccaacatgaatgcagccagagcagaatttcaagcaagaattgatgctatcaagcaatatgtgcgtggtcgaaatcaagatttgatgctatcaagcaatatatgcacttttcgaaatgtaagcaaagatatggaaaagagggttattaaatggtttgactacctgtggaccaacaaaaaaacagttgatgagaaagaagtcttaaagtatctacctgataaactaagagcagaaattgccatcaacgttcacttagacacagtggggaaagtctacagtcctggagattatatttgcaagaaaggggatatcggacgagagatgtacattatcaaggaaggcaaactcgctgtggtggcagatgatggagtcactcagtttgtggtattgagcgatggcagctacttcggtgagatcagcattcttaacattaaagggagcaaagctggcaatcgaagaacggccaatattaaaagtattggctactcagacctgtgtgacaatctaaaaacttgtcacacttcacatggatctgtcatggcggaaacagcggttatcaatcacaagaaacgtaaaaatagcccgcgaatcgtccagtcaaacgacctcactgaggcggcatatagtctctcccgggatcaaaaacgtatgctgtatctgttcgttgaccagatcagaaaatctgatggcaccctacaggaacatgacggtatctgcgagatccatgttgctaaatatgctgaaatattcggattgacctctgcggaagccagtaaggatatacggcaggcattgaagagtttcgcggggaaggaagtggttttttatcgccctgaagaggatgccggcgatgaaaaaggctatgaatcttttccttggtttatcaaacgtgcgcacagtccatccagagggctttacagtgtacatatcaacccatatctcattcccttctttatcgggttacagaaccggtttacgcagtttccgcttagtgaaacaaaagaaatcaccaattcctatgccatgcgtttatacgaatccctgtgtcagtatctattggaagttctggccagggcaatcaggaaagagaaagaaataagggtattcaaaataagaagagaggtagtcaaattgtctctgttttcagatgacatgattttatatttagaaaaccccagcatatcagccccaaatctccttaagcagataggcaacttcagcaaagtcttaggatacaaaatcaatgtggaaaaatcacaagcattcttatacaccaataatagaccaacagagagccaaatcatgagtgaactcccattcacaattgctacaaagaaaataaaattcctaggaatccagcgggatcctctagagtcaactgcggtcatgcacggaattttgccgatttcggaaccaccatcacacaggattttcgcctgtggggcaaaccagcgtggaccgcttgctgcaactctctcagggccaggcggtgaagggcaatcagctgttgcccgtctcactggtgaaaagaaaaaccaccctggcgcccaatacgcaaaccgcctctccccgcgcgttggccgattcattaatgcagctggaaggacaggtttcccgactggaaagcgggcagtgagcgcaacgcaattaattgtcaggtttagctcccatggcttgagggatggctctgccatccagaaagaaacagggaagggagtttgccgatttcggaaccaccatcaaacaggattttcgcctgctggggcaaaccagcgtggaccgcttgctgcaactctctcagggccaggcggtgaagggcaatcagctgttgcccgtctcactggtgaaaagaaaaaccaccctggcgcccaatacgcaaaccgcctctccccgcgcgttggccgattcattaatgcagctggcacgacaggtttcccgactggaaagcgggcagtgagcgcaacgcaattaatggattttgccgatttcggaaccaccatcaaacaggattttcgcctgctggggcaaaccagcgtggaccgcttgctgcaactctctctgggccaggcggtgaagggcaatcagctgttgcccgtctcactggtgaaaagaaaaaccaccctggcgcccaatacgcaaaccgcctctccccgcgcgttggccgattcattaatgcagctggcacgacaggtttcccgactggaaagcgggcagggtggggaacagatgcaagggctgcctgagaaaagtaggcaggacactaaacagctgtcgccagcacttcacgggcccaaaaacttagaaaatgacttgatgctggctgctggcatatga

SEQ ID NO: 127607 - DNA, 1848 bp, Homo sapiens
atggagaaattgctactggaaaatgacagcttaagtaaggatgtaagccgcctagaaactgtgtttgtacctcctgagaaacatgaaaaagagataatagctctgaaatccaatattgttgaacttaagaaacagctgtctgaacttaagaaaaaatgtggtgaagaccaggagaaaatacacgctctcacatctgaaaacactaacttgaagaagatgatgagtaatcagtatgtgccagttaaaacccatgaagaggttaaaatgacactgaatgacacgttagccaaaactaacagagaattattagatgtgaagaaaaaatttgaagatataaatcaggaatttgtaaaaataaaagataagaatgaaatattaaaaagaaacctggaaaacactcagaaccaaataaaagctgagtacatcagcctggcagagcacgaggcaaagatgagctcgctaagtcagagcatgagaaaggtgcaggatagtaatgctgaaatcttggccaactacagaaaaggccaagaagagattgtgacactgcatgccgaaattaaagcacagaagaaggagctcgacacaatacaagaatgcattaagataatgaagcgtgcgcctgttattccaaaacatacgctcaatactcaaccggttgaagatacttcgttatcgacaccagctgccccgatggtggattcgttaattgcgcgcgtaggagtaatggctcgcggtaatgccattactttgcctgtatgtggtcgggatgtgaagtttactcttgaagtgctccggggtgatagtgttgagaagacctctcgggtatggtcaggtaatgaacgtgaccaggagctgcttactgaggacgcactggatgatctcatcccttcttttctactgactggtcaacagacaccggcgttcggtcgaagagtatctggtgtcatagaaattgccgatgggagtcgccgtcgtaaagctgctgcacttaccgaaagtgattatcgtgttctggttggcgagctggatgatgagcagatggctgcattatccagattgggtaacgattatcgcccaacaagtgcttatgaacgtggtcagcgttatgcaagccgattgcagaatgaatttgctggaaatatttctgcgctggctgatgcggaaaatatttcacgtaagattattacccgctgtatcaacaccgccaaattgcctaaatcagttgttgctcttttttctcaccccggtgaactatctgcccggtcagataaatcagggatttcttcttggtttggatccattactggtgaactaaaccggtttacgcagtttcggcttagtgaaacaaaagaaatcaccaatccgtatgccatgcgtttatacgaatccctgtgtcagtatcgtaagccggatggctcaggcatcgtctctctgaaaatcgactggatcatagagcgttaccagctgcctcaaagttaccagcgtatgcctgacttccgccgccgcttcctgcaggcaccgtgtatgaaatctaacaatgcgctcatcgtcatcctcggcaccgtcaccctggatgctgtaggcataggcttggttatgccggtactgccgggcctcttgcgggatatcgtccattccgacagcatcgccagtcactatggcgtgctgctagcgctatatgcgttgatgcaatttctatgcgcacccgttctcggagcactgtccgaccgctttggccgccgcccagtcctgctcgcttcgctacttggagccactatcgactacgcgatcatggcgaccacacccgtcctgtggatctacccactagtcaattcaccatcttgttga

SEQ ID NO: 127608 - DNA, 1662 bp, Homo sapiens
tcaggataattgtttcagcatcgcaaccgcatcagactccggcatcgcaaactgcacccggtgccgggcagccacatccagcgcaaaaaccttcgtgtagacttccgttgaactgatggacttatgtcccatcaggctttgcagaactttcagcggtataccggcatacagcatgtgcatcgcataggaatggcgcaacgtatgtggtgtgaccggaacagagaaagtcacaccgtcagcagcagcggcggcaaccgcctccccaatccaggtcctgaccgttctgtccgtcacttcccagatccgcgctttctctgtccttcctgtgcgacggttacgccgctccatgagcttatcgcgaataaatacctgcgtaaaccggttctgtaacccgataaagaagggaatgagatatgggttgatatgtccactgtaaagccttctggatggactgtgcgcacgtttgataaaccaaggaaaagattcatagcctttttcatcgccggcatcctcttcagggcgataaaaaaccacttccttccccgcgaaactcttcaatgcctgccgtatatccttactggcttccgcagaggtcaatccgaatatttcagcatatttagcaacatggatctcgcagagtaccgtcatgttcctgtagggtgccatcagattttctgatctggtcaacgaacacccaccgcgcacgtttttgatcccgggagagactataaaccgcctcagtaaggtcgtttgactggacgattcgcgggctatttttacgtttcttgtgattgataaccgctgtttccgccatgacagacacactgtgaagtgtgacaagtttttagattgtcacactgcagtaagcggcggcggaagtcaggcatacgctggtaactttgaggcagctggtaacgctctatgatccagtcgattttcagagagacgatgcctgagccatccggcttacgatactgacacagggattcgtataaacgcatggcatacggattggttttttcttttgttggggggggccgaaactgcgtaaaccggttctgtaacccgataaagaagggaatgagatatgggttgatatgtacactgtaaagccctctggatggactgtgcgcacgtttgataaaccaaggaaaagattcatagcctttttcatcgccggcatcctcttcagggcgataaaaaaccacttccttccccgcgaaactcttcaatgcctgccgtatatccttactggcttccgcagaggtcaatccgaatatttcaacatatttagcaacatggatctcgcagataccgtcatgttcctggagggtgccattagaatttctgatctgggcaacgaacagataccgcatacgtttttgatccccggaagagactatttgccgcctcaaaggaagtcgtttgaactggccaattcgcgggctttttttacctttcttgtgaatgaaaacccctgtttccgccatacagaatccagctgcctcaaagttaccagcgtatgccttgatttcgcccgcgctttctgcaggtcttgtgttaatgagatcaacaaccagaactccaatgcgcctttcatacatttgagaaaaaaaaagggcggcagaccactcatattgtattttcctttccccgaaatca

SEQ ID NO: 127609 - DNA, 1861 bp, Homo sapiens
atggtggattcgttaattgcgcgcgtaggagtaatggctcgcggtaatgccattactttgcctgtatgtggtcgggatgtgaagtttactcttcaagtgctccggggtgatagtgttgagaagacctctcgggtaccgccaggtaatgaacgtgaccaggagatgcttactgaggacgcactggatgatctcatcccttcttttctactgactggtcaacagacaccggcgttcggtcgaagagtatctggtgtcatacacactgccgatgggagtcgccgtcgtaaagctgctgcacttaccgaaaaattttgtatcgttgataaccccccgggggagattagaaaaagagcgtgcctttttattccaacacatgcgctcaatctcaaccggtttgaagatatttgttatgcacaccagctgcccgatggtggtttgttaagtgcgcgcgtaggagtaatggctcgcggtaaccccattctttcccctgtatgtggtcggaatgtaaagttcactcttaaagtgctccggggtgatagtgttgagaacccctctcgggtatggtcgggtaatgaacgtgcccaggagctgcttactgagcacgcactggatgatctcaccctttcttttctactgactggtcaacagacaccggcgttcggtcgaagagtatctggtgtcatagaaattgccgatgggagtcgccgtcgtaaagctgctgcacttaccgaaagtgattatcgtgttctggttggcgagctggatgatgagcagatggctgcattatccagattgggtaacgattatcgcccaacaagcccttatgaacgtggtcagcgttatgcaagccgattgcagaatgaatttgctggaaatatttctgcgctggctgatgcggaaaatatttcacgtaagattattacccgctgtatcaacaccgccaaattgcctaaatcagttgttgctcttttttctcaccccggtgaactatctgcccggtcaggtgatgcacttcaaaaagcctttacagataaagaggaattacttaagcagcaggcatctaaccttcatgagcagaaaaaagctggggtgatatttgaagctgaagaagttatcactcttttaacttctgtgcttaaaactgtgcaatctaaaaacttgtcacacttcacatggatctgtcatgcggaaacagcggttatcaatcacaagaaacgtaagaatagcccgcgaatcgtccagtcaaacgacctcactgaggcggcatatagtctctcccgggatcaaaaacgtatgctgtatctgttcgttgaccagatcagaaaatctgatggcaccctacaggaacatgacggtatctgcgagatccatgttgctaaatatgctgaaatattcggattgacctctgcggaagccagtaaggatatacggcaggcattgaagagtttcgcggggaaggaagtggttttttatcgccctgaagaggatgccggcgatgaaaaaggctatgaatcttttccttggtttatcaaacaaccggtttacgcagtttcggcttagtgaaacaaaagaaatcaccaatccgtatgccatgcgtttatacgaatccctgtgtcagtatcgtaagccggatggctcaggcatcgtctctctgaaaatcgactggatcatagagcgttaccagctgcctcaaagttaccagcgtatgcctgacttccgccgccgcttcctgcaggtctgtgttaatgagatcaacagcagaactccaatgcgcctctcatacattgagaaaaagaaaggccgccagacgactcatatcgtattttccttccgcgatatcacttccatgacgacaggatag

SEQ ID NO: 127610 - DNA, 2586 bp, Homo sapiens
atgagactgggatttgaatcaaggggtgagatagcaaaagatcaagctaaacttgatctagcagggcaaaaagaaagggataaccaaagctcaacattgggggaagcagaaaccccattgattatttgctggtcgactctagaggatccccactatgatgtcatagttattgacagcgcgcctaacctgggtatcggcacgattaatgtcgtatgtgctgctgatgtgctgattgttcccacgcctgctgagttgtttgactacacctccgcactgcagtttttcgatatgcttcgtgatctgctcaagaacgttgatcttaaagggttcgagcctgatgtacgtattttgcttaccaaatacagcaatagtaatggctctcagtccccgtggatggaggagcaaattcgggatgcctggggaagcatggttctaaaaaatgttgtacgtgaaacggatgaagttggtaaaggtcagatccggatgagaactgtttttgaacaggccattgatcaacgctcttcaactgatacttcgttatcgacaccagctgccccgatggtggattcgttaattgcgcgcgtaggagtaatggctcgcggtaatgccattactttgcctgtatgtggtcgggatgtgaagtttactcttgaagtgctccggggtgatagtgttgagaagacctctcgggtatggtcaggtaatgaacgtgaccaggagctgcttactgaggacgcactggatgatctcatcccttcttttctactgactggtcaacagacaccggcgttcggtcgaagagtttccttgtaccctctggcaggaggagcgactcaagccttcgcgaaagaaaataaccaaaaagcatacaaagaaacgtacggcgtctctcatattacacgccatgatatgctgcagatccctaaacagcagcaaaacgaaaaataccaagtgcctcaattcgatcaatcaacgattaaaaatattgagtctgcaaaaggacttgatgtgtgggacagctggccgctgcaaaacgctgacggaacagtagctgaatacaacggctatcacgttgtgtttgctcttgcgggaagcccgaaagacgctgatgacacatcaatctacatgttttatcaaaaggtcggcgacaactcaatcgacagctggaaaaacgcgggccgtgtctttaaagacagcgataagttcgacgccaacgatccgatcctgaaagatcagacgcaagaatggtccggttctgcaacctttacatctgacggaaaaatccgtttattctacactgactattccggtaaacattacggcaaacaaagcctgacaacagcgcaggtaaatgtgtcaaaatctgatgacacactcaaaatcaacggagtggaagatcacaaaacgatttttgacggagacggaaaaacatatcagaacgttcagcagtttatcgatgaaggcaattatacatccggcgacaaccatacgctgagagaccctcactacgttgaagacaaaggccataaataccttgtattcgaagccaacacgggaacagaaaacggataccaaggcgaagaatctttatttaacaaagcgtactacggcggcggcacgaacttcttccgtaaagaaagccagaagcttcagcagagcgctaaaaaacgcgatgctgagttagcgaacggcgccctcggtatcatagagttaaataatgattacacattgaaaaaagtaatgaagccgctgatcacttcaaacacggtatttattcgcgataagctcatggagcggcgtaaccgtcgcacaggaaggacagagaaagcgcggatctgggaagtgacggacagaacggtcaggacctggattggggaggcggttgccgccgctgctgctgacggtgtgacgttctctgttccggtcacaccacatacgttccgccattcctatgcgatgcacatgctgtatgccggtataccgctgaaagttctgcaaagcctgatgggacataagtccatcagttcaacggaagtctacacgaaggtttttgcgctggatgtggctgcccggcaccggatcagaaaatctgatggcaccctacaggaacatgacggtatctgcgagatccatgttgctaaatatgctgaaatattcggattgacctctgcggaagccagtaaggatatacggcaggcattgaagagtttcgcggggaaggaagtggttttttatcgccctgaagaggatgccggcgatgaaaaaggctatgaatcttttccttggtttatcaaacgtgcgcacagtccatccagagggctttacagtgtacatatcaacccatatctcattcccttctttatcgggttacagaaccggtttacgcagtttcggcttagtgaaacaaaagaaatcaccaatccgtatgccatgcgtgttacgaatccctgtgtcagtatcgtctgtgttaatgagatcaacagcagaactccaatgcgcctctcatacattgagaaaaagaaaggccgccagacgactcatatcgtattttccttccgcgatatcacttccatgacgacaggatag

SEQ ID NO: 127611 - DNA, 696 bp, Homo sapiens
atgagaaaaagcacacctggtgggcttcctccacagtctggagaggcttctccagatcattccaagtggcttggatttggtggagctacagggaggggtgcacctcgccctctcgtctaccgccttcctctctccccgccacgcttccgcatcgctacgcgtctcctgccccccagtgcacgcggctgccttagtgcatcatttatttctgtactgagaaatacagacgtatttattcgcgataagctcatggagcggcgtaaccgtcgcacaggaaggacagagaaagcgcggatctgggaagtgacggacagaacggtcaggacctggattggggaggcggttgccgccgctgctgctgacggtgtgacgttctctgttccggtcacaccacatacgttccgccattcctatgcgatgcacatgctgtatgccggtataccgctgaaagttctgcaaagcctgatgggacataagtccatcagttcaacggaagtctacacgaaggtttttgcgctggatgtggctgcccggcaccgggtgcagtttgcgatgccggaggtcttccacgcggtcttccagcccgtgggtaataggttttcttggagctttttatctgtgcctgttgggggttctggattggaggcttctgcagcaccctggctgggatacatgggaggctacaaggaaacctga

SEQ ID NO: 127612 - DNA, 2334 bp, Homo sapiens
atgaaactcatggaaacacttaaccagtgcataaacgctggtcatgaaatgacgaaggctatcgccattgcacagtttaatgatgacagcccggaagcgaggaaaataacccggcgctggagaataggtgaagcagcggatttagttggggtttcttctcaggctatcagagatgccgagaaagcagggcgactaccgcacccggatatggaaattcgaggacgggttgagcaacgtgttggttatacaattgaacaaattaatcatatgcgtgatgtgtttggtacgcgattgcgacgtgctgaagacgtatttccaccggtgatcggggttgctgcccataaaggtggcgtttacaaaacctcagtttctgttcatcttgctcaggatctggctctgaaggggctacgtgttttgctcgtggaaggtaacgacccccagggaacagcctcaatgtatcacggatgggtaccagatcttcatattcatgcagaagacactctcctgcctttctatcttggggaaaaggacgatgtcacttatgcaataaagcccacttgctggccggggcttgacattattccttcctgtctggctctgcaccgtattgaaactgagttaatgggcaaatttgatgaaggtaaactgcccaccgatccacacctgatgctccgactggccattgaaactgttgctcatgactatgatgtcatagttattgacagcgcgcctaacctgggtatcggcacgattaatgtcgtatgtgctgctgatgtgctgattgttcccacgcctgctgagttgtttgactacacctccgcactgcagtttttcgatatgcttcgtgatctgctcaaaaccgttgatcttaaagggttcgagcctgatgtacgtattttgcttaccaaatacagcaatagtaatggctctcagtccccgtggatggaggagcaaattcgggatgcctggggaagcatggttctaaaaaatgttgtacgtgaaacggatgaagttggtaaaggtcagatccggatgagaactgtttttgaacaggccattgatcaacgctcttcaactgatacttcgttatcgacaccagctgccccgatggtggattcgttaattgcgcgcgtaggagtaatggctcgcggtaatgccattactttgcctgtatgtggtcgggatgtgaagtttactcttgaagtgctccggggtgatagtgttgagaagacctctcgggtatggtcaggtaatgaacgtgaccaggagctgcttactgaggacgcactggatgatctcatcccttcttttctactgactggtcaacagacaccggcgttcggtcgaagagtatctggtgtcatagaaattgccgatgggagtcgccgtcgtaaagctgctgcacttaccgaaagtgattatcgtgttctggttggcgagctggatgatgagcagatggctgcattatccagattgggtaacgattatcgcccaacaagtgcttatgaacgtggtcagcgttatgcaagccgattgcagaatgaatttgctggaaatatttctgcgctggctgatgcggaaaatatttcacgtaagattattacccgctgtatcaacaccgccaaattgcctaaatcagttgttgctcttttttctcaccccggtgaactatctgcccggtcaggtgatgcacttcaaaaagcctttacagataaagaggaattacttaagcagcaggcatctaaccttcatgagcagaaaaaagctggggtgatatttgaagctgaagaagttatcactcttttaacttctgtgcttaaaacgtcatctgcatcaagaactagtttaagctcacgacatcagtttgctcctggagcgacagtattgtataagggcgataaaatggcccttaacctggacaggtctcgtgttccagcatacattatacgaagttatattcgatgcggccgcaaggggttcgcgtcagcgggtgttggcgggtgtcggggctggcttaactatgcggcatcagagcagattgtactgagagtgcaccatatgcggtgtgaaataccgcacagatgcgtaaggagaaaataccgcatcaggcgccattcgccattcaggctgcgcaactgttgggaagggcgatcggtgcgggcctcttcgctattacgccagctggcgaaagggggatgtgctgcaaggcgattaagttgggtgaacattaaacaagaagtcagtcagtgtgcaactcagaagataagagaatcctcatcagaaataaacaatgctggcatcctgattcccaacttgcagacttcagaactgtga

SEQ ID NO: 127613 - DNA, 3822 bp, Homo sapiens
  misc_feature (1)...(3822): n = a,t,c or g
atgctggatggcccactgttctccgaggggcctgacagcccccgggagctccaggatgaggagtctggcagctgcctctgggtgcagaagtccaagctattggtgatagaagtgaagactatttcctgtcattatagtcgccgcgccccttctcgacagcccatggacttccaggccagccactgggctcgcgggttccagaaccgcacgtgtgggccgcgcccgggatccccacagccgccgccccgccggccctgggcctccagggtgctgcaggaggcgaccaactggcgggcggggcccctggccgaggtccgagctcgggagcaagagaaaaggaaagcggcgtcgcaggagcgggaggccaaggagaccgagcgaaaaaggcgcaaggctggtggggcccgacggagccccccgggtcgaccccgcccggagccccgcaacgcccctcgggtggcccagctggcagggctccctgctcccttgcggccggagcgcctggcgcctgtggggcgagcgccccgtccatccgcgcagccgcagagcgacccagggtcggcgtgggcggggccctggggaggtcggcggcccgggcccccaagctacgaggctcacctgctgctgagaggttctgccgggaccgccccacgacgccgctgggaccggccgccaccctacgtggctccaccttcttacgaaggcccccataggaccttggggactaagagaggccccgggaactctcaggtgcccacttcatcagccccagctgcgactccagccaggacagacggagggcgcacaaagaagaggctggatcctcggatctaccgggacgtcctcggggcttggggtctccgacaggggcaaggtctcttggggggatccccaggctgtggagcggccagagcaaggccagagcccggcaagggggtcgtggagaaaagcctggggctggctgctgctgacctgaacagtggtagcgacagccatccccaagccaaagctacagggagcgcaggcaccgagatagctcctgcggggtctgcaactgcggctccctgtgccccgcatcccgctcccagatccaggcaccacctcaagggctcgagggaagggaaagaaggagaacagatctggtttcccaaatgctggattccctcccctaaaaagcagccgccccgccatagccagacactccccagaccctgggctcccggaggcaccggatggagagaatctctgggtcttggagagggggcaggaccggagaccctggagggttggaaggcgacccgccgtgcccacaccttgccccgcagttcccagggcctgtcccgtggggaaggcgtctttgtcattgacgccacgtgcgtagtgatacgatcccaatatgttccaaccccccgaacccagcaggtgcagcttttgccctctggggtgacacgcgtggtgggggattcccccagccaatcgaagcccggcaaggaggagggtgaaggggccacggtctttccttccccttgtcaaaagcggctgtcgagcagtcgccttttacaccagcccggcgggggccgcgggggcgaagctgagggcgggaggccgggggactccacactggaggagcgcactttccgcatcttggggctcccggcccccgaagtaaacctgcgggacgcccccacgcagccaggtagcccagagcaccaagccttaggcccagcagcttcgggagcccagggcagagccgaggggtcggaagtggcggtggtccagcggcgcgccggccggggctgggcgcggaccccagggccctacgccggggccctgcgagaagccgtgtcccgtatccgccgccacacagcccctgactcggacacggacgaagctgaggagctcagcgtccatagcggctcctctgatggaagcgacacagaagccccgggcgcctcctggcggaatgagaggaccctgcccgaggttggaaacagttcgccagaggaagatgggaagacagcggaactgagcgacagtgtcggggagatcctagatgtcataagccaaaccgaggaggtcctcttcggngtatttattcgcgataagctcatggagcggcgtaaccgtcgcacaggaaggacagagaaagcgcggatctgggaagtgacggacagaacggtcaggacctggattggggaggcggttgccgccgctgctgctgacggtgtgacgttctctgttccggtcacaccacatacgttccgccattcctatgcgatgcacatgctgtatgccggtataccgctgaaagttctgcaaagcctgatgggacataagtccatcagttcaacggaagtctacacgaaggtttttgcgctggatgtggctgcccggcaccgggtgcagtttgcgatgccggaggattttgccgatttcggaaccaccatcaaacaggattttcgcctgctggggcaaaccagcgtggaccgcttgctgcaactctctcagggccaggcggtgaagggcaatcagctgttgcccgtctcactggtgaaaagaaaaaccaccctggcgcccaatacgcaaaccgcctctccccgcgcgttggccgattcattaatgcagctggcacgacaggtttcccgactggaaagcgggcacgccttacatatctccctcatcacaccaagtttccctactgaggggaagagccagtttgtgctgcaactaagaccttcgttacgaggagcactcttgagtttgctggatcactacgaatggaactgttttgtcttcctgtatgacacagacagggnagtaatggctcgcggtaatgccatttctttgcctgtatgtggtcgggatgtgaagttactctttgaagtgctccggggtgatagtgttgagaagacctctcgggtatggtcaggtaatgaacgtgaccaggagctgcttactgaggacgcactggatgatctcatcctttcttttctactgactggtcaacagacaccggcgttcggtngaagagtatctggtgtcatagaaattgccgatgggagtcgccgtcgtaaagctgctgcacttaccgaaagtgattatcgtgttctggttggcgagctggatgatgagcagatggctgcattatccagattgggtaacgattatcgcccaacaagtgcttatgaacgtggtcagcgttatgcaagccgattgcagaatgaatttgctggaaatatttctgcgctggctgatgcggaaaatatttcacgtaagattattacccgctgtatcaacaccgccaaattgcctaaatcagttgttgctctcccctctcaccccggtgaactatctgcccggtcaggtgatgcacttcaaaaagcctttacagataaagaggaattacttaagcagcaggcatctaaccttcatgagcagaaaaaagctgggacggtttttcgccttttgacgttggagtccacgtctttaatagtggactcttgtcccaaactgaaacaacactcaaccttatctcgggttattcttttgatttataagggattttgccgatttcggaaccaccatcaaacaggattttcgcctgctggggcaaaccagcgtggaccgcttgctgcaactctctcagggccaggcggtgaagggcaatcagctgttgcccgtctcactggtgaaaagaaaaaccaccctggcgcccaatacgcaaaccgcctctccccgcgcgttggccgattcattaatgcagctggcacgacaggtttcccgactggaaagcgggcagtgagcgcaacgcaattaatgtga

SEQ ID NO: 127614 - DNA, 2451 bp, Homo sapiens
tcaggaatcttgtagcatatatatagggctgtccctgtgctcctcggtcaatcgaagttgccctgtggtcaactgcgcgagattactggtgtaaaggacagccacatcttggtctgtgttcattaggtgtctgtccatgtggactaatccggtccacttaacgtacaccgacgaagattcagtgtcccggtgccgggcagccacatccagcgcaaaaaccttcgtgtagacttccgttgaactgatggacttatgtcccatcaggctttgcagaactttcagcggtataccggcatacagcatgtgcatcgcataggaatggcggaacgtatgtggtgtgaccggaacagagaacgtcacaccgtcagcagcagcggcggcaaccgcctccccaatccaggtcctgaccgttctgtccgtcacttcccagatccgcgctttctctgtccttcctgtgcgacggttacgccgctccatgagcttatcgcgaataaatactgccgggcctcttgcgggatatcgtccattccgacagcatcgccagtcactatggcgtgctgctagcgctatatgcgttgatgcaatttctatgcgcacccgttctcggagcactgtccgaccgctttggccgccgcccagtcctgctcgcttcgctacttggagccatgtcagctgtccttgctccaggatgctgtttttgacaacggatgttttattgcctttgatgttcattaagaagcttggcgcaaatgttgcctttttatcctcgaagaagcctctgtttgtcatgtagcttgtgataaccacattgttgcctttggcttgcggcactgcgaagtgagagtaagtgaatgtcacatcgtttggatcaagacccatttgcagcacaagccctgttttgttcagcggcttgtaagggccggttaaagagtttgatacataaccaagcatgtaaatatcgtttgagttaataccatcgatcgtcatttttgaaccgcgtgaatcagtgaacaagtaccatttgccgttcattttgaaaacattcgcgcgctcgatttcatcagttaccgtgtttgaagtgatcagcggcttcattacttttttcaatgtgtaatcattatttaactctatgataccgagggcgccgttcgctaactcagcatcgcgttttttagcgctctgctgaagcttctggctttctttacggaagaagttcgtgccgccgccgtagtacgctttgttaaataaagattcttcgccttggtatccgttttctgttcccgtgttggcttcgaatacaaggtatttatggcctttgtcttcaacgtagtgagggtctctcagcgtatggttgtcgccggatgtataattgccttcatcgataaactgctgaacgttctgatatgtttttccgtctccgtcaaaaatcgttttgtgatcttccactccgttgattttgagtgtgtcatcagattttgacacatttacctgcgctgttgtcaggctttgtttgccgtaatgtttaccggaatagtcagtgtagaataaacggatttttccgtcagatgtaaaggtgcagtaaccggacctaacttcatctgattgtggagcatggactgtataagccattacccttaccacaaacattaaatgcaaacattctgtatcatctaaataatgcaaattaactgccatgttcctcaatttaacattaacataatttgattcaagacttacgatactgacacagggattcgtataaacgcatggcatacggattggtgatttcttttgtttcactaagccgaaactgcgtaaaccggttctgtaacccgataaagaagggaatgagatatgggttgatatgtacactgtaagccctctggatggactgtgcgcacgtttgataaaccaaggaaaagattcatagcctttttcatcgccggcatcctcttcagggcgataaaaaaccacttccttccccgcgaaactcttcaatgcctgccgtatatccttactggcttccgcagaggtcaatccgaatatttcagcatatttagcaacatggatctcgcagataccgtcatgttcctgtagggtgccatcagattttctgatctggtcaacgaacagatacagcatacgtttttgatcccgggagagactatatgccgcctcagtgaggtcgtttgactggacgattcgcgggctatttttacgtttcttgtgattgataaccgctgtttccgccatgacagatccatgtgaagtgtgacaagtttttagattgtcacatggctgtaaaaggacagaccacatcatggttctgtgttcattaggttgttctgtccatgctgacataatccgctccacttcaacgtaacaccgcacgaagatttctattgttcctgaaggcatattcaaatcgttttcgttaccgcttgcaggcat

SEQ ID NO: 127615 - DNA, 2259 bp, Homo sapiens
  misc_feature (1)...(2259): n = a,t,c or g
atggagtggggcaagttcaaaagactagtcttaccaagtcaaggcaagtcaaaaccagaacaaaggtgccaatacaggcacaccgtgggtgatcaggccacgcttccactcagatccagagtagagaaacgaaatggagaggcagagggaagaatctaccgaaaactatgggatgttgccctgctctgttgtgtccaggaggtcattaatggggaaaggaaacctctgagagcactgactgaagtgaaatcgggatttaggctcagggaggacagcgataagttcgacgccaacgatccgatcctgaaagatcagacgcaagaatggtccggttctgcaacctttacatctgacggaaaaatccgtttattctacactgactattccggtaaacattacggcaaacaaagcctgacaacagcgcagaacgttcagcagtttatcgatgaaggcaattatacatccggcgacaaccatacgctgagagaccctcactacgttgaagacaaaggccataaataccttgtattcgaagccaacacgggaacagaaaacggataccaaggcgaagaatctttatttaacaaagcgtactacggcggcggcacgaacttcttccgtaaagaaagccagaagcttcagcagagcgctaaaaaacgcgatgctgagttagcgaacggcgccctcggtatcatagagttaaataatgattacacattgaaaaaagtaatgaagccgctgatcacttcaaacacgtgtgacaatctaaaaacttgtcacacttcacatggatctgtcatggcggaaacagcggttatcaatcacaagaaacgtaaaaatagcccgcgaatcgtccagtcaaacgacctcactgaggcggcatatagtctctcccgggatcaaaaacgtatgctgtatctgttcgttgaccagatcagaaaatctgatggcaccctacaggaacatgacggtatctgcgagatccatgttgctaaatatgctgaaatattcggattgacctctgcggaagccagtaaggatatacggcaggcattgaagagtttcgcggggaaggaagtggttttttatcgccctgaagaggatgccggcgatgaaaaaggctatgaatcttttccttggtttatcaaacgtgcgcacagtccatccagagggctttacagtgtacatatcaacccatatctcattcccttctttatcgggttacagaaccggtttacgcagtttcggcttagtgaaacaaaagaaatcaccaatccgtatgccatgcgtttatacgaatccctgtgtcagtatcgtaagccggatggctcaggcatcgtctctctgaaaatcgactggatcatagagcgttaccagctgcctcaaagttaccagcgtatgcctgacttccgccgccgcttcctgcagcattttctggctcatgctggctgtcccaaaggcacccagaacttcacgtttagaatgaaatttatcatcttctccattaaaaaagttttacctcctgttgacacaatcttagctcatgaccccgttatccatacttgtcatctgagagagtcctttggtagtgtctctccttcatctccaaaatctaatcggttaccatgccctgaagtgatcttatttcattatggtgaaagttggaacctcttacgtgccgatcaacgtctcattttcgccaaaagttggcccagggcttcccggtatcaacagggacaccaggatttatttattctgcgaagtgatcttccgtcacaggtatttattcgcgataagctcatggagcggcgtaaccgtcgcacaggaaggacagagaaagcgcggatctgggaagtgacggacagaacggtcaggacctggattggggaggcggttgccgccgctgctgctgacggtgtgacgttctctgttccggtcacaccacatacgttccgccattcctatgcgatgcacatgctgtatgccggtataccgctgaaagttctgcaaagcctgatgggacataagtccatcagttcaacggaagtctacacgaaggtttttgcgctggatgtggctgcccggcaccgggtgcagtttgcgatgccggagtctgatgcggttgcgatgctgaaacattatcctgagataaatgccttggccctttatttgaaatgtggaactgagtggatatgctngttttgtctggtaaacagagaagctggctggtattccctggagaagcgaaccaaacaatga

SEQ ID NO: 127616 - DNA, 5360 bp, Homo sapiens
  misc_feature (1)...(5360): n = a,t,c or g
atgaaactcatggaaacacttaaccagtgcataaacgctggtcatgaaatgacgaaggctatcgccattgcacagtttaatgatgacagcccggaagcgaggaaaataacccggcgctggagaataggtgaagcagcggatttagttggggtttcttctcaggctatcagagatgccgagaaagcagggcgactaccgcacccggatatggaaattcgaggacgggttgagcaacgtgttggttatacaattgaacaaattaatcatatgcgtgatgtgtttggtacgcgattgcgacgtgctgaagacgtatttccaccggtgatcggggttgctgcccataaaggtggcgtttacaaaacctcagtttctgttcatcttgctcaggatctggctctgaaggggctacgtgttttgctcgtggaaggtaacgacccccagggaacagcctcaatgtatcacggatgggtaccagatcttcatattcatgcagaagacactctcctgcctttctatcttggggaaaaggacgatgtcacttatgcaataaagcccacttgctggccggggcttgacattattccttcctgtctggctctgcaccgtattgaaactgagttaatgggcaaatttgatgaaggtaaactgcccaccgatccacacctgatgctccgactggccattgaaactgttgctcatgactatgatgtcatagttattgacagcgcgcctaacctgggtatcggcacgattaatgtcgtatgtgctgctgatgtgctgattgttcccacgcctgctgagttgtttgactacacctccgcactgcagtttttcgatatgcttcgtgatctgctcaagaacgttgatcttaaagggttcgagcctgatgtacgtattttgcttaccaaatacagcaatagtaatggctctcagtccccgtggatggaggagcaaattcgggatgcctggggaagcatggttctaaaaaatgttgtacgtgaaacggatgaagttggtaaaggtcagatccggatgagaactgtttttgaacaggccattgatcaacgctcttcaactgctgccccgatggtggattcgttaattgcgcgcgtaggagtaatggctcgcggtaatgccattactttgcctgtatgtggtcgggatgtgaagtttactcttgaagtgctccggggtgatagtgttgagaagacctctcgggtatggtcaggtaatgaacgtgaccaggagctgcttactgaggacgcactggatgatctcatcccttcttttctactgactggtcaacagacaccggcgttcggtcgaagagtatctggtgtcatagaaattgccgatgggagtcgccgtcgtaaagctgctgcacttaccgaaagtgattatcgtgttctggttggcgagctggatgatgagcagatggctgcattatccagattgggtaacgattatcgcccaacaagtgcttatgaacgtggtcagcgttatgcaagccgattgcagaatgaatttgctggaaatatttctgcgctggctgatgcggaaaatatttcacgtaagattattacccgctgtatcaacaccgccaaattgcctaaatcagttgttgctcttttttctcaccccggtgaactatctgcccggtcagttattgacagcgcgcctaactggggtatcggcacgattaatgtcgtatgtgctgctgatgtgctgattgttcccacgcctgctgagttgtttgactacacctccgcactgcagtttttcgatatgcttcgtgatctgctcaagaacgttgatcttaaagggttcgagcctgatgtacgtattttgcttaccaaatacagcaatagtaatggctctcagtccccgtggatggaggagcaaattcgggatgcctggggaagcatggttctaaaaaatgttgtacgtgaaacggatgaagttggtaaaggtcagatccggatgagaactgtttttgaacaggccattgatcaacgctcttcaactgataatgaaggtgcgcctgttattccaaaacatacgctcaatactcaaccggttgaagatacttcgttatcgacaccagctgccccgatggtggattcgttaattgcgcgcgtaggagtaatggctcgcggtaatgccattactttgcctgtatgtggtcgggatgtgaagtttactcttgaagtgctccggggtgatagtgttgagaagacctctcgggtatggtcaggtaatgaacgtgaccaggagctgcttactgaggacgcactggatgatctcatcccttcttttctactgactggtcaacagacaccggcgttcggtcgaagagtatctggtgtcatagaaattgccgatgggagtcgccgtcgtaaagctgctgcacttaccgaaagtgattatcgtgttctggttggcgagctgcatgatgagcagatggctgcattatacagattgggtaacgattatcgcccaacaagtgcttatgaacgtggtcagcgttatgcaagccgattgcagaatgaatttgctggaaatatttctgcgctggctgatgcggaaaatatttcacatcttcatattcatgcagaagacactttcttgcctttctatcttgggaaaaaggacgatgtcacttatgcaataaagcccacttgttggccggggcttgacattattccttcttgtctggctctgcacggtattgaaattgagttaatgggcaaatttgatgaaggtaaactgcccaccgatccacacctgatgctcggactggccattgaaactgttgctcatgactatgatgtcatagttattgacagcgcgcctaacctgggtatcggcacgattaatgtcgtatgtgctgctgatgtgctgattgttcccacgcctgctgagttgtttgactacacctccgcactgcagtttttcgatatgcttcgtgatctgctcaagaacgttgatattaaagggttcgagcctgatgtacgtattttgcttaccaaatacagcaatagtaatggctctcagtccccgtggatggaggagcaaattcgggatgcctggggaagcatggttctaaaaaatgtggtacgtgaaacggatgaagttggtaaagcggttatcaatcacaagaaacgtaaaaatagcccgcgaatcgtccagtcaaacgacctcactgaggcggcatatagtctctcccgggatcaaaaacgtatgctgtatctgttcgttgaccagatcagaaaatctgatggcaccctacaggaacatgacggtatctgcgagatccatgttgctaaatatgctgaaatattcggattgacctctgcggaagccagtaaggatatacggcaggcattgaagagtttcgcggggaaggaagtggtttttcctcgccctgaagaggatgccggcgatgaaaaaggctatgaatcccttcacccgtttatcaaacgtgcgcacagtccatccagaggaatttacagtgtacatatcaacccatatctcattcccttctttatcgggttacagaaccggtttacgcagtttcggcttagtgacaaccaaagaaatcaccaatccgtatgccatgcgttctctacgaatccctgtgtcagtatcgtaagccggatggctcaggcatcgtctctctgaaaatcgactggatcatagagcgttaccagctgcctcaaagttaccagcgtatgcctgacttccgccgccgcttcctgcaggtctgtgttaatgagatcaacagcagaactccaatgcgcctctcatacattgagaaaaagaaaggccgccagacgactcatatctttttcgatatgcttcgtgatctgctcaagaacgttgatcttaaagggttcgagcctgatgtacgtattttgcttaccaaatacagcaatagtaatggctctcagtccccgtggatggaggagcaaattcgggatgcctggggaagcatggttctaaaaaatgttgtacgtgaaacggatgaagttggtaaagatacttcgttatcgacaccagctgccccgatggtggattcgttaattgcgcgcgtaggagtaatggctcgcggtaatgccattactttgcctgtatgtggtcgggatgtgaagtttactcttgaagtgctccggggtgatagtgttgagaagacctctcgggtatggtcaggtgctgtatcccagggaggtgagagttttatctatatgcccctgactggggctgctgcctttctttcagagatgccctgcccagagaggaggaatctaaagaagcagtgtggctacagtggctttgctgcatgcggttatcaatcacaagaacgtaaaaatagcccgcgaatcgtccagtcaaacgacctcactgaggcggcatatagtctctcccgggatcaaaaacgtatgctgtatctgttcgttgaccagatcagaaaatctgatggcaccctacaggaacatgacggtatctgcgagatccatgttgctaaatatgctgaaatattcggattgacctctgcggaagccagtaaggatatacggcaggcattgaagagtttcgcggggaaggaagtggttttttatcgccctgaagaggatgccggcgatgaaaaaggctatgaatcttttccttggtttatcaaacgtgcgcacagtccatccagagggctttacagtgtacatatcaacccatatctcattcccttctttatcgggttacagaaccggtttacgcagtttcggcttagtgaaacaaaagaaatcaccaatccgtatgccatgcgtttatacgaatccctgtgtcagtatcgtaagccggatggctcaggcatcgtctctctgaaaatcgactggatcatagagcgttaccagctgcctcaaagttaccagcgtatgcctgacttccgccgccgcttcctgcaggatcataactcttcaccagaaagggaacaaaactggatggagaatgagtttgacgaactgacagaagtaggcttcagaaggtgggtaataacaaactcctccgagctaaaggagcatgttctaacccaatgcaaggaagctaagaaccttgataaaaggttacaggaactgctaactagaataagcaatttagagaacatagatgacctgatggagctcaaaaacacagcacaagaacttcatgaaacatacacaagtatcaatagccaaactgatcaagcagaagaaaggatatcagagattggagatcaacttaatgaaataaacatgaagaccagattagaggagaaaaaaaaaggaaagggaacgaacaaaggcctccaagaaccactttggngatga

SEQ ID NO: 127617 - DNA, 4966 bp, Homo sapiens
  misc_feature (1)...(4966): n = a,t,c or g
ctatgggggatcctctagagtcgacctgcaggcatgcaagcgatctaaacactccagttgaaccacgagacatgtccaggttaagcaccattttatcgcccttatacaaatactgtcgctccaggagccaaactgatgtcgtgagcttaaactagttctggatgcagatgacgttttagccacagaagttaaaagagtgataacttcttcagcttcaaatatcaccccagcttttttctgctcatgaaggttagatgcctgctgcataagtaattcctctttatctgtaaaggctttttgaagtgcatcacctgaccgggcagatagttcaccggggtgagaaaaaagagcaacaactgatttaggcaatttggcggtgttgatacagcgggtaataatcttacgtgaaatattttccgcatcagccagcgcagaaatatttccagcaaattcattctgcaatcggcttgcataacgctgaccacgttcataagcacttgttgggcgataatcgttacccaatctggataatgcagccatctgctcatcatccagctcgccaaccagaacacgataatcactttcggtaagtgcagcagctttacgacggcgactcccatcggcaatttctatgacaccagatactcttcgaccgaacgccggtgtctgttgaccagtcagtagaaaagaagggatgagatcatccagtgcgtcctcagtaagcagctcctggtcacgttcattacctgaccatacccgagaggtcttctcaacactatcaccccggagcacttcaagagtatacttcacatcccgaccacatacaggcaaagtaatggcattaccgcgagccattactccggaatagtcagtgtagaataaacggatttttccgtcagatgtaaaggttgcagaaccggaccattcttgcgtctgatctttcaggatcggatcgttggcgtcgaacttatcgctgtctttaaagacacggcccgcgtttttccagctgtcgattgagttgtcgccgaccttttgataaaacatgtagattgatgtgtcatcagcgtctttcgggcttcccgcaagagcaaacacaacgtgatagccgttgtattcagctactgttccgtcagcgttttgcagcggccagctgtcccacacatcaagtccttttgcagactcaatatttttaatcgttgattgatcgaattgaggcacttggtatttttcgttttgctgctgtttagggatcattccacagttagcgacgacatgttcaatccttgaccttgacggcaaagaatatactcgtagactcacgcgaatagtcgcatcaccaatataaagtggatccgtgatcccagtccgataatcagaccgaaaacacaagtggtatcctggtcccagactaataatcagaccgacgatacgagtaggaccgctgatcccagacgacgatacgagaggcccgtagtcacagactaataatagaccgccgatacgagatggaccatggtccccgcctaataaactggacgacgatacgatatggaccgtggtcccagtctttatggcagcaaccccgatcaccggtgtaaatacgtcttcagcacgtcgcaatcgcgtaccaaacacatcacgcatatgattaatttgttcaattgtataaccaacacgttgctcaacccgtcctcgaatttccatatccgggtgcggtagncgccctgctttctcggcatctctgatagcctgagaagaaaccccaactaaatccgctgcttcacctattctccagcgccgggttattttcctcgcttccgggctgtcatcattaaactgtgcaatggcgatagccttcgtcatttcatgaccagcgtttatgcactggttaagtgtttccatgagtttcattctgaacatcctgaccgggcagatagcttcaccggggtgagaaaaaagagcaacaactgatttaggcaatttggcggtgttgatacagcgggtaataatcttacgtgaaatattttccgcatcagccagcgcagaaatatttccagcaaattcattctgcaatcggcttgcataacgctgaccacgttcataagcacttgttgggcgataatcgttacccaatctgaataatgcagccatctgctcatcatccagctcgccaaccagaacacgataatcactttcggtaagtgcagcagctttacgacggcgactcccatcggcaatttctatgacaccagatactcttcgaccgaacgccggtgtctgttgaccagtcagtagaaaagaagggatgagatcatccagtgcgtcctcagtaagcagctcctggtcacgttcattacctgaccatacccgagaggtcttctcaacactatcaccccggagcacttcaagagtaaacttcacatcccgaccacatacaggcaaagtaatggcattaccgcgagccattactcctacgcgcgcaattaacgaatccaccatcggggcagctggtgtcgataacgaagtatctttaccaacttcatccgtttcacgtacaacattttttagaaccatgcttccccaggcatcccgaatttgctcctccatccacggggactgagagccattactattgctgtatttggtaagcaaaatacgtacatcaggctcgaaccctttaagatcaacgttcttgagcagatcacgaagcatatcgaaaaacttgagaacattgccttctaataggtttggaccctggagttgtaattctgaacaagtctgtgggatattcactgttggctccttcagctgcactctccagacttctccactctgctccgagatccaagaggttgccttatgtggtctataccaataggctcccttgccatctggttctgccttgagtgacaggaccttgactgatccagtgccccaggacttccacagctttgtcacctcattgactctcactttatcatggggggatcctctagagtcgacctgcaggcattcattgtngcagctatgatcggtcacagcaaaaggatacaaagcaaaatcagcaaagggtaaaggagtattgggtgaagtccaggggaaatgaggcacaagcttccaagaggcctctcccttataagatgaataggaatcttcagaccagtaaggtaggaagagtattcggacattaatcgtgccgatacccaggttaggcgcgctgtcaataactatgacatcatagtcatgagcaacagtttcaatggccagtcggagcatcaggtgtggatcggtgggcagtttaccttcatcaaatttgcccattaactcagtttcaatacggtgcagagccagacaggaaggaataatgtcaagccccggccagcaagtgggctttattgcataagtgacatcgtccttttccccaagatagaaaggcaggagagtgtcttctgcatgaatatgaagatctggtacccatccgtgatacattgaggctgttccctgggggtcgttaccttccacgagcaaaacacgtagccccttcagagccagatcctgagcaagatgaacagaaactgaggttttgtaaacgccacctttatgggcagcaaccccgatcaccggtggaaatacgtcttcagcacgtcgcaatcgcgtaccaaacacatcacgcatatgattaatttgttcaattgtataaccaacacgttgctcaacccgtcctcgaatttccatatccgggtgcggtagtcgccctgctttctcggcatctctgatagcctgagaagaaaccccaactaaatccgctgcttcacctattctccagcgccgggttattttcctcgcttccgggctgtcatcattaaactgtgcaatggcgatagccttcgtcatttcatgaccagcgtttatgcactgcaggaagcggcggcggaagtcaggcatacgctggtaactttgaggcagctggtaacgctctatgatccagtcgattttcagagagacgatgcctgagccatccgggcttacgatactgacacagggattcgtataaacgcatggcatacggattggtgatttcttttgtttcactaagccgaaactgcgtaaaccggttctgtaacccgataaagaagggaatgagatatgggttgatatgtacactgtaaagccctctggatggactgtgcgcacgtttgataaaccaaggaaaagattcatagcctttttcatcgccggcatcctcttcagggcgataaaaaaccacttccttccccgcgaaactcttcaatgcctgccgtatatccttactggcttccgcagaggtcaatccgaatatttcagcatatttagcaacatggatctcgcagataccgtcatgttcctgtagggtgccatcagattttctgatctggtcaacgaacagatacagcatacgtttttgatcccgggagagactatatgccgcctcagtgaggtcgtttgactggacgattcgcgggctatttttacgtttcttgtgattgataaccgctgtttccgccatgacagatccatgtgaagtgtgacaagtttttagattgtcacacagagcagacaggttgagcttcacaccagcctcaaggggtggagtgtagctgaccccagtcaaccagtggttgactttggtagaaatgaaagcaatgggtttcaattgaaatttagctgcaaggccaaaacgagtgcagctggtacttgatgtccaagccaggtttattaaagcatcaagttcttcacaaactttttgataaactgatcctccaaattctgccccatcattgacattagtgtgcagctggaagtccccagtcctgtagcccactgcaaagttattctttgtctgctttgacttggtgctgttaaagctcatctggtacccagcaagctgagccatgaattgcaagtccagcaaaatcaaagttaacat

SEQ ID NO: 127618 - DNA, 3201 bp, Homo sapiens
  misc_feature (1)...(3201): n = a,t,c or g
atgaaactcatggaaacacttaaccagtgcataaacgctggtcatgaaatgacgaaggctatcgccattgcacagtttaatgatgacagcccggaagccaccccaataacccggcgctggagaatagatgaaacagcggatttagatagggtttcttctcaggctatcagagatgccgagaaagcagggcgactaccgggcacccgggatatggaaattcgaggacggcttgagcaacgtgttggttatacaattgaagaaattaatcatatgcgtgatgatacttcgttatcgacaccagctgccccgatggtggattcgttaattgcgcgcgtaggagtaatggctcgcggtaatgccattactttgcctgtatgtggtcgggatgtgaagtttactcttgaagtgctccggggtgatagtgttgagaagacctctcgggtatggtcaggtaatgaacgtgaccaggagctgcttactgaggacgcactggatgatctcatcccttcttttctactgactggtcaacagacaccggcgttcggtcgaagagtatctggtgtcatagaaattgccgatgggagtcgccgtcgtaaagctgctgcacttaccgaaagtgattatcgtgttctggttggcgagctggatgatgagcagatggctgcattatccagattgggtaacgattatcgcccaacaagtgcttatgaacgtggtcagcgttatgcaagccgattgcagaatgaatttgctggaaatatttctgcgctggctgatgcggaaaatatttcacgtaagattattacccgctgtatcaacaccgccaaattgcctaaatcagttgttgctcttttttctcaccccggtgaactatctgcccggtcaggtgatgcacttcaaaaagcctttacagataaagaggaattagttaagcagcaggcatctaacttacaaagcagaaaaaaatacagcaagatggccaggccactctatactgtattcaaggaaacccagagggcaactactcatctagtagaatcccacaccagtggcagaaacagccttcaaaacaataaagcaggccctagtacaagcgccagccttaagctttcccacaggacaaaacttctcttatttgtcatagagagagcaggagtagctcttgcactccttactcagacttgtgggacaaccccagaaccagtggcatatctaaattattacccgctgtatcaacaccgccaaaatgccctaaatcagttgtgcttcttttttctcacccccggtgaactatctgcccggtcaggtgatgcacttcaaaaagcctttacagataaagaggaattacttaagcagcaggcatctaaccttcatgagcagaaaaaagctggggtatttattcgcgataagctcatggagcggcgtaaccgtcgcacaggaaggacagagaaagcgcggatctgggaagtgacggacagaacggtcaggacctggattggggaggcggttgccgccgctgctgctgacggtgtgacgttctctgttccggtcacaccacatacgttccgccattcctatgcgatgcacatgctgtatgccggtataccgctgaaagttctgcaaagcctgatgggacataagtccatcagttcaacggaagtctacacgaaggtttttgcgctggatgtggctgcccggcaccggnatcacaaaacgatttttgacggtgacggaaaaacatatcagaacgttcagcagtttatcgatgaaggcaattatacatccggcgacaaccatacgctgagagaccctcactacgttgaagacaaaggccataaataccttgtattcgaagccaacacgggaacagaaaacggataccaaggcgaagaatctttatttaacaaagcgtactacggcggcggcacgaacttcttccgtaaagaaagccagaagcttcagcagagcgctaaaaaacgcgatgctgagttagcgaacggcgccctcggtatcatagagttaaataatgattacacattgaaaaaagtaatgaagccgctgatcacttcaaacacggtaactgatgaaatcgagcgcgcgaatgttttcaaaatgaacggcaaatggtacttgttcactgattcacgcggttcaaaaatgacgatcgatggtattaactcaaacgatatttacatgcttggttggcccagggcttcccggtatcaacagggacaccaggatttatttattctgcgaagtgatcttccgtcacaggtatttattcgcgataagctcatggagcggcgtaaccgtcgcacaggaaggacagagaaagcgcggatctgggaagtgacggacagaacggtcaggacctggattggggaggcggttgccgccgctgctgctgacggtgtgacgttctctgttccggtcacaccacatacgttccgccattcctatgcgatgcacatgctgtatgccgacttttttcatgctgcttctcgcctcttctctctggtgttcaaactgctaatctctcaggcccttgagtatgcaggtttctcttatctcaaagcctttgcaattgccggtccctctgcttataaatcccttcctgagtctttggatgctcaggggagactctgttctcaggctccacatgggcagtacctgaactgcaggcgcctcccctcacccaacaggtgcaatgctgcaggactccagatccgaggtctcacagattcaaataagcagaaaatcaccaagaacatattgcttaatgatattatccaggataacttccccaatctagcaaggcaggccaacattcaaattcaggaaatacagagaatgccacaaagatactcctcgagaagagcaactccaagacacataattgtcagattcaccaaagttgaaatgaaggaaaaaatattaagggcagacagagagaaaggtcaggttacccacaaagggaagcccatcagactaccagcggatctctcagcagaaactctacaagccagaagagagtgggggccaatattcaacattcttaaagaaaagaattttcaacccagaatttcatatccagccaaattaagcttcataagtgaaggagaaataaaatactttacagacaagcaaatgctgagagattttgtcaccaccaggcctgccctacgagagctcctgaagtaa

SEQ ID NO: 127619 - DNA, 4851 bp, Homo sapiens
atgcagggcatgcaagccctagctaggacagttgatggtaaggaagaaagcctcaaccttgatcaagcttttcaatgggctggaaaaagttcttcttttgggacctgtcccaataaatttcgatcgtcgattaaccccgctggagatagaatattaagcggggcctgttatccaaaactacgtcaatactcaaccggtggagaaacttcgtattcgacaccagctgccccgatggtggattcgttaattgcgcgcgtaggagtaatggctcccggtaatgccattactttgcctgtatgtggtcgggatgtgaagtttactcttgaagtgctccggggtgatagtgttaagaagacctctcgggtatggtcaggtaatgaacgtgaccaggagctgcttactgaggacgcactggatgatctcatcccttcttttctactgactggtcaacagacaccggcgttcggtcgaagagtatctggtgtcatagaaattgccgatgggagtcgccgtcgtaaagctgctgcacttaccgaaagtgattatcgtgttctggttggcgagctggatgatgagcagatggctgcattatccagattgggtaacgattatcgcccaacaagtgcttatgaacgtggtcagcgttatgcaagccgattgcagaatgaatttgctggaaatatttctgcgctggctgatgcggaaaatatttcacgtaagattattacccgctgtatcaacaccgccaaattgcctaaatcagttgttgctcttttttctcaccccggtgaactatctgcccggtcaggtgatgcacttcaaaaagcctttacagataaagaggaattacttaagcagcaggggggatcctctagagtcggcgacaactcaatcgacagctggaaaacgcggggccgtgtctttaaagacagcgataagttcgacgccaacgatccgatcctgaaagatcagacgcaagaatggtccggttctgcaacctttaccatggacggacaaattccgtttattctaccaggcatatttccggtaaccattccggcaaaccaaagcctgccaccggcgcaggtaattgtgtcaaattctgttgaccacctcaaaatcaccggggtggaagatcacaaaccgatttttgccggagccggaaaaccatatcagaaccttcgccagtttatcgatgaaggcaattatacatccggcgacaaccatacgctgagagaccctcactacgttgaagacaaagcccataaataccttgtattcgaagccaacacgggaacagaaaacggataccaaggcgaagaatctttatttaacaaagcgtactacggcggcggcacgaacttcttccggggatcctctagagtcgacctgcaggcatgctgaagaacacatcgacagcaccacaacaacgaatctatcatacactgacaaacacacagcacaaaacgattcacacccagggacagctaaaacacaaacgacaataacagatcaccacgaccacagccacaaacagtggctccaattgccgagccgagcaggactggccgcggaccaaagcggtcggacagtgctccgagaacgggtgcgcatagaaaattgcatacaaacgcactatagccgctcagcaagcaacgcccaagcgcccaggccagtacgcggcaatgaacccaagccatatgccatacaaacataccagggtgacggagcagaggaagacgatgagacttacagccccaatttagaccgcgtaaccaccaaaaagacacaccgtggttgccaagcaaagatggcgggagtatcccctgaattcaaccacagtgaccccttatgcctcatgccaccagaagttagcgtgagccttggtgttcccaatcagtatctctggacttctcaaaccacaaatccacctcgcactggggatgggagagcagaaggctccaaggcacacaaggaccttgatgaggagataagccttattcctacagttaatgtgaggaaaaacctgtttttcctggaaatgcctactttggccgacacaaatattttcccgccacgcggcggtccaatttccctacgacacactaaggggccgtgtgacaatctaaaaacttgtcacacttcacatggatctgtcatggcggaaacagcggttatcaatcacaagaaacgtaaaaatagcccgcgaatcgtccagtcaaacgacctcactgaggcggcatatagtctctcccgggatcaaaaacgtatgctgtatctgttcgttgaccagatcagaaaatctgatggcaccctacaggaacatgacggagtaatggctcgcgctaatgccattactttgccctgtatgtggtcgggatgtaaagtttactcttgaagtgctccggggtgatagtgttgacaagacctctcgggtatggtcaggtaatgaacgtgaccaggagctgcttactgaggacgcactggatgatctcatcccttcttttctactgactggtcaacagacaccggcgttcggtcgaagagtatctggtgtcatagaaattgccgatgggagtcgccgtcgtaaagctgctgcacttaccgaaagtgattatcgtgttctggttggcgagctggatgatgagcagatggctgcattatccagattgggtaacgattatcgcccaacaagtgcttatgaacgtggtcagcgttatgcaagccgattgcagaatgaatttgctggaaatatttctgcgctggctgatgcggaaaatatttcacgtaagattattacccgctgtatcaacaccgccaaattgcctaaatcagttgttgctcttttttctcaccccggtgaactatctgcccggtcaggtgatgcacttcaaaaagcctttacagataaagaggaattacttaagcagcaggcatctaaccttcatgagcagaaaaaagctggggtgatatttgaagctgaagaagttatcactcttttaacttctgtgcttaaaacgtcaggggattttgccgatttcggaaccaccatcaaacaggattttcgcctgctggggcaaaccagcgtggaccgcttgctgcaactctctcagggccaggcggtgaagggcaatcagctgttgcccgtctcactggtgaaaagaaaaaccaccctggcgcccaatacgcaaaccgcctctccccgcgcgttggccgattcattaatgcagctggcacgacaggtttcccgactggaaagcgggcagcataggcttggttatgccggtactgccgggcctcttgcgggatatcgtccattccgacagcatcgccagtcactatggcgtgctgctagcgctatatgcgttgatgcaatttctatgcgcacccgttctcggagcactgtccgaccgctttggccgccgcccagtcctgctcgcttcgctacttggagccactatcgactacgcgatcatggcgaccacacccgtcctgtggatctacccactaggattttgccgatttgggaccccccatcaaacaggattttcgccggttggggcaacccagcgtggaccggcttgctgcaactctctcagggcccagccggtgaagggcaatcagctgttgcccgtctcactggtgaaaagaaaaacccacccctggcgcccaatacgcaaaccgcctctccccgcgcgttggccgatttcattaatgcagcgggcacgacaggtttccccgactggaaagcgggcagaggccggatgtcgtgcgtcgaattgtgacaacgcgaaatgagattcgcgcggagtccattgcgatagtgtggacgtagaatgtcgacgggccaggcggtccgccgaggcttacccaaataggcaaggggggcaggaaggaagaacggcgagtatgggcaaaagaacaggctggtaaagggttggaagcctcattttcttgtttttgcatcctcccatccccaggacccagtaccttcaagcgttggctgtacggattaccagctcctgaattgcaggcctcttttccataaccagaaagacttgtaagtgcttctgtttccttccccataaactccccaggacccagtaccttcaagcgttggctgtacggattaccagctcctgaattgcaggcctcttttccataaccagaaagacttgtaagtgcttctgtttccttccccataaactcccggtgccgggcagccacatccagcgcaaaaaccttcgtgtagacttcggttgaactgatggacttatgtcccatcaggctttgcagaactttcagcggtataccggcatacagcatgtgcatcgcataggaatggcggaacgtatgtggtgtgaccggaacagagaacgtcacaccgtcagcagcagcggcggcaaccgcctccccaatccaggtcctgaccgttctgtccgtcacttcccagatccgcgctttctctgtccttcctgtgcgacggttacgccgctccatgagcttatcgcgaataaatacctttgaaattacccatgaaatccgcacgctgacaccatcagtggtaccagcagtaaggtgttttctctttctttttcctgcagttccacaaaacctctcgaatctagattcatttgtgctgatggagaatatatccagcccagaagcaatcacagggccacgcttcaagaaaccggctcggtcgcggggctcgccggacaggccaatgaaccgtgggtacaaggtggagtttgtcttgggcagtaggaggacagcccgggcacccaggggcccaattccaggggaaagccatctcccttctggaattgcccaactccgggggaaaaccat

SEQ ID NO: 127620 - DNA, 4171 bp, Homo sapiens
ctagagtcgattggcaggatgatacaccttaaaggcctgacagattgggaattcctgctctccataaagcctgttggcaatactcagtgtgtaatcagtcttgatcctgtctaatttggagagaagctgcccaaagtagcagctgaccagtccgctctcattgtttaaggacccagcctttttaacttggatagtcacaggatcataccgaatgattcgccctcccccagatggaggtgcttgagtgttaaacaagagcagttcctggtgtgagtgggccactataaaagagggaaggtgaaggtccgagaagtgagaggcgctggcaacaggaatggtgaagtggtacagggtggcggtagcagctggggtggacaggaagaccatatgcagagtcacggagggacctgtggttggggacagagcagcacagcgtgatggtctaagtttccaaaggggagcattgaaggtgactttaacattgttgtagtcacatataggagaatgtaagagattattatgaaacaatgtagtaaatgtacaatagggaattctagataagcacagcagagaagcaaccagctccttttcaggtcctttcctgagactgattcggctggaagggagtaggtcccgccaaatgaagaagctttccgagacaacagccccagtggctgcagctgcctgggtaccgttttcatccacctccacaaaggttttgtggataatttttgacaagtacaaattgggacttggagagattccagtaagatcagccctcgtttcatcaaagatatccgtaatgcccatgtcttgtaaaatggaattgagatcatagctgtcttccagggtgaaccgggggaaggacaggaccaccgattcttctgacatgttttctgagctgctccaggccaccattttttcataggtgattttcctttcaagcgtcagcagcagcggcgcaaccgcctccccaatccaggtcctgaccgttctgtccgtcacttcccagatccgcgctttctctgtccttcctgtgcgacggttacgccgctccatgagcttatcgcgaataaatacctgtgacggaagatcacttcgcagaataaataaatcctggtgtccctgttgataccgggaagccctgggccaacttttggcgaaaatgagacgttgatcggcacgtaagaggttccaactttcaccataatgaaataagatcaatatgtttattgcggcattattcacaatagcaaagactttggaaccaacccaaaatgtccaacaatgatagactggattaagaaaaggggatcctctagagtcgcatcatccagctcgccaaccagaacacgataatcactttcggtaagtgcagcagctttacgacggcgactcccatcggcaatttctatgacaccagatactcttcgaccgaacgccggtgtctgttgaccagtcagtagaaaagaagggatgagatcatccagtgcgtcctcagtaagcagctcctggtcacgttcattacctgaccatacccgagaggtcttctcaacactatcaccccggagcacttcaagagtaaacttcacatcccgaccacatacaggcaaagtaatggcattaccgcgagccattactcctacgcgcgcaattaacgaatccaccatcggggcagctggtgtcgataacgaagtatcagttgaagagcgttgatcaatggcctgttcaaaaacagttctcatccggatctgacctttaccaacttcatccgtttcacgtacaacattttttagaaccatgcttccccaggcatcccgaatttgctcctccatccacggggactgagagccattactattgctgtatttggtaagcaaaatacgtacatcaggctcgaaccctttaagatcaacgttcttgagcagatcacgaagcatatcgaaaggggatcctctagagtcgacctggatgtccaggcagaagtctactgcaggaatggagcccttatgaaaaacttctacaagggcagtgcagaaggcaaacgtggggttggagccctcacacaaagtgccacttgggccactgcctagtgaagctgtgagagaagagccactgtgctccagaccccagaatggtagatctaccaacagcttgcaccatatgcctgcaggcatgcaagcttcttgaccgggcagatatttccccgggtgagaaaaaagagcaacaactgatttagccaatttggcggtgttgatccagcggataataatcttacgtgaaatattttccgcatcagccagcgccgaaatatttccagcaaattcattctgcaatcggcttgcataacgctgaccacgttcataagcacttgttgggcgataatcgttacccaatctggataatgcagccatctgctcatcatccagctcgccaaccagaacacgataatcactttcggtaagtgcagcagctttacgacggcgactcccatcggcaatttctatgacaccagatactcttcgaccgaacgccggtgtctgttgaccagtcagtagaaaagaagggatgagatcatccagtgcgtcctcagtaagcagctcctggtcacgttcattacctgaccatacccgagaggtcttctcaacactatcaccccggagcacttcaagagtaaacttcacatcccgaccacatacaggcaaagtaatggcattaccgcgagccattactcctacgcgcgcaattaacgaatccaccatcggggcagctggtgtcgataacgaagtatcttcaaccggttgagtattgagcgtatgttttggaataacaggcgcacgcttcattatctaatctcccagcgtggtttaatcagacgatcgaaaatttcattgcagacaggttcccaaatagaaagagcatttctccaggcaccagttgaagagcgttgatcaatggcctgttcaaaaacagttctcatccggatctgacctttaccaaacttcatccggtttacggacaacattttttaaaaccatgctttcccaggccatcccgaatttggctccttcatccacggtgactgagagccattactattgctgtatttggtaagcaaaatacgtacatcaggctcgaaccctttaagatcaacgttcttgagcagatcacgaagcatatcgaaaaacccagcttttttctgctcatgaaggttagatgcctgctgcttaagtaattcctctttatctgtaaaggctttttgaagtgcatcacctgaccgggcagatagttcaccggggtgagaaaaaagagcaacaactgatttaggcaatttggcaagagttgatacagcgggggataatcttacgtgaaatattttccgcatcagccagcgcagaaatatttccagcaaattcattctgcaatcggcttgcataacgctgaccacgttcataagcacttgttgggcgataatcgttacccaatctggataatgcagccatctgctcatcatccagctcgccaaccagaacacgataatcactttcggtaagtgcagcagctttacgacggcgactcccatcggcaatttctatgacaccagatactcttcgaccgaacgccggtgtctgttgaccagtcagtagaaaagaagggatgagatcatccaatgcgtcctccataagcagctcctggtcacgttcattacctgaccatacccgaaaagtcttctcaacactatcaaccccgagcacttcaagaagtaaattcacatcccgaacccgtgaaatattttccgcatcagccagcgcagaaatatttccagcaaattcattctgcaatcggcttgcataacgtcttttctgggggtgagcacttgttgggcgataatcgttacccaatctggataatgggggcatctgctcatcatacagctcgccaaccagaacacgataatcactttcggtaagtgcagcagctttacgacggcgacttccatcggcaatttctatgacaccagatactcttctacccaacgccggtgtctgttgaccagtcagtagaaaagaagggatgagatcattcagtgcgttctcagtaagcagcttctggtcacgttcattacccgaccatacccgagaggtgtttttaacactatcacccccgggca

SEQ ID NO: 127621 - DNA, 4787 bp, Homo sapiens
atggacgatatcccgcaagaggcccggcagtaccggcataaccaagcctatgcctacagcatccagggtgacggtgccgaggatgacgatgagcgcattgttagatttcatacacgggtcaccgtcgacagcgacacacttgcatcggatgcagcccggttaacgtgccggcacggcctgggtaaccagtgtgacaatctaaaaacttgtcacacttcacatggatctgtcatggcggaaacagcggttatcaatcacaagaaacgtaaaaatagcccgcgaatcgtccagtcaaacgacctcactgaggcggcatatagtctctcccgggatcaaaaacgtatgctgtatctgttcgttgaccagatcagaaaatctgatggcaccctacaggaacatgacggtatctgcgagatccatgttgctaaatatgctgaaatattcggattgacctctgcggaagccagtaaggatatacggcaggcattgaagagtttcgcggggaaggaagtggttttttatcgccctgaagaggatgccggcgatgaaaaaggctatgaatcttttccttggtttatcaaacgtgcgcacagtccatccagagggctttacagtgtacatatcaacccatatctcattcccttctttatcgggttacagaaccggtttacgcagtttcggcttagtgaaacaaaagaaatcaccaatccgtatgccatgcgtttatacgaatccctgtgtcagtatcgtaagccggatggctcaggcatcgtctctctgaaaatcgactggatcatagagcgttaccagctgcctcaaagttaccagcgtaagcctaacaacagccgccgcttcctgcaggtctgtgttaatgagatcaacagcagaactccaatgcgcctctcatacattgagaaaaagaaaggccgccagacgactcatatcgctatcagagatgccgagaaagcagggcgactaccgcacccggatatggaaattcgaggacgggttgagcaacgtgttggttatacaattgaacaaattaatcatatgcgtgatgtgtttggtacgcgattgcgacgtgctgaagacgtatttccaccggtgatcggggttgctgcccataaaggtggcgtttacaaaacctcagtttctgttcatcttgctcaggatctggctctgaaggggctacgtgttttggttcgtgaaagggtaaccacccccaagggaacaggcctcaatgtatcagggatggggtaccagatctttaatattcatgcagaagacactctcctgcttttctatcttggggaaaaggacgatgtcacttatgcaataaagcccacttgctggccggggcttgacattattccttcctgtctggctttgcaccgtattgaaactgagttaatgggcaaatttgatgaaggtaaactgcccaccgatccacacctgatgctccgactggccattgaaactgttgctcatgactatgatgtcatagttattgacagcgcgcctaacctgggtatcggcacgattaatgtcgtatgtgctgctgatgtgctgattgttcccacgcctgctgagttgtttgactacacctccgcactgcagtttttcgatatgcttcgtgatctgctcaagaacgttgatcttaaagggttcgagcctgatgtacgtattttgcttaccaaatacagcaatagtaatggctatcagtccccgtggatggaggagcaaattcgggatgcctggggaagcatggttctaaaaaatgttgtacgtgaaacggatgaagttggtaaaggtcagatccggatgagaactgtttttgaacaggccattgatcaacgctcttcaacaagtgcctggagaaatgctcttgcagcgaaccggtttacgcagtttcggcttagtgaaacaaaagaaatcaccaatccgtatgccatgcgtttatacgaatccctgtgtcagtatcgtaagccggatggctcaggcatcgtctctctgaaaatcgactggatcatagagcgttaccagctgcctcaaagttaccagcgtatgcctgacttccgccgccgcttcctgcaggattttcgcctgttggggcaaaccagcgtggaccgcttgctccaactctctcagggccagtcggtgaagggcaatcagctgttgcccgtctcactggtgaaaagaaaaaccaccctggcgcccaatacgcaaaccgcctctccccgcgcgttggccgattcattaatgcagctggcacgacaggtttcccgactggaaagcgggcaggattttgccgatttcggaaccaccatcaaacaggattttcgcctgctggggcaaaccagcgtggaccgcttgctgcaactctctcagggccaggcggtgaagggcaatcagctgttgcccgtctcactggtgaaaagaaaaaccaccctggcgcccaatacgcaaaccgcctctccccgcgcgttggccgattcattaatgcagctggcacgacaggtttcccgactggaaagcgggcaggattttgccgatttcggaaccaccatcaaacaggattttcgcctgctggggcaaaccagcgtggaccgcttgctgcaactctctcagggccaggcggtgaagggcaatcagctgttgcccgtctcactggtgaaaagaaaaaccaccctggcgcccaatacgcaaaccgcctctccccgcgcgttggccgattcattaatgcagctggcacgacaggtttcccgactggaaagcgggcagtttcccatgaaatataagcctttcaagggcttcaaggaatccaaggtttgcacttccaggcatttccaggcttattctgctggaactctaattcctccatcctttcctaactgccacatctgggattttgccgatttcggaaccaccatcaaacaggattttcgcctgctggggcaaaccagcgtggaccgcttgctgcaactctctcagggccaggcggtgaagggcaatcagctgttgcccgtctcactggtgaaaagaaaaaccaccctggcgcccaatacgcaaaccgcctctccccgcgcgttggccgattcattaatgcagctggcacgacaggtttcccgactggaaagcgggcaaaaatttcgtaacggacaccagtgcgcccgaaggggggattggttaattgcgcgcgagggagaaaaggctcgcggaaaggccaatacttggctggtacgtggcggggatgtgaagtttactcttgaagtgctccggggtgaaagtgttaagaagacctttcgggtaaggccaggtaatgaacgtgaccaggagctgcttactgaggacgcactggatgatctcatcccttcttttctactgactggtcatcagacaccggcgttcggtcgaagagtatctggtgtcatagaaattgccgatgggagtcgccgtcgtaaagctgctgcacttaccgaaagtgattatcgtgttctggttggcgagctggatgatgagcagatggctgcattatccagattgggtaacgattatcgcccaacaagtgcttatgaacgtggtcagcgttatgcaagccgattgcagaatgaatttgctggaaatatttctgcgctggctgatgcggaaaatatttcacgtaagattattacccgctgtatcaacaccgccaaattgcctaaatcagttgttgctcttttttctcaccccggtgaactatctgcccggtcagggatttgccggatttcggaacccaccatcaaacaggattttcgcctgctggggcaaaccagcgtggaccgcttgctgcaactctctcagggccaggcggtgaagggcaatcagctgttgcccgtctcactggaaacagctatgaccatgattacgaattcgagctcggtacccattgagaatatgtttttcgtctcagccaatccctgggtgagtttcaccagttttgatttaaacgtggccaatatggacaacttcttcgcccccgttttcaccatgggcaaatattatacgcaaggcgacaaggtgctgatgccgctggcgattcagacaaaaacagcatatccactcagttccacatttccatataaaggccaaggcatttattctcaggataattgtttcagcatcgcaaccgcatcagactccggcatcgcaaactgcacccggtgccgggcagccacatccagcgcaaaaaccttcgtgtagacttccgttgaactgatggacttatgtcccatcaggctttgcagaactttcagcggtataccggcatacagcatgtgcatcgcataggaatggcggaacgtatgtggtgtgaccggaacagagaacgtcacaccgtcagcagcagcggcggcaaccgcctccccaatccaggtcctgaccgttctgtccgtcacttcccagatccgcgctttctctgtccttcctgtgcgacggttacgccgctccatgagcttatcgcgaataaatacctgtgacggaagatcacttcgcagaataaataaatcctggtgtccctgttgataccggaaagccctgggccaaccagaactcgcgctggcccgcaagcctgtgcgcagccccagttcccgcacgcgcctctccctccacacctccccgcaagctgagggagccggctccggccttggccagcccagaaaggggctcccacagtgcagcggcgggttgaagcgctcaagtgcggccagagtgggcgccaaggccaaggaggcaccgagagcgagcgaggg

SEQ ID NO: 127622 - DNA, 1187 bp, Homo sapiens
atgcctgcaagcggtaacgaaaacgatttgaatatgccttcaggaacaatagaaatcttcgtgcggtgttacgttgaagtggagcggattatgcctttggactggcagagggaactgcctggagaccatggagaggcttccacatggagcccaaaacgttccagtgttctgggcagtgcagtaagatgcacctctgcgtgcctatcccacaaggctctgcgttttgtcttaggcagaggacccccgctgtatctgttcgttgaccagatcagaaaatctgatggcaccctacaggaacatgacggtatctgcgagatccatgtgactgagaaagccctggcagttccccatgtcctttgccgtgcccaacaaggatatacggcaggcattgaagagtttcgcggggaaggaagtggttttttatcgccctgaagaggatgccggcgatgaaaaaggctatgaatcttttccttggtttatcaaacgtgcgcacagtccatccagagggctttacagggtacatatcaacccatatctcattcccttctttatcgggttacagaaccggtttacgcagtttcggcttagtgaaacaaaagaaatcaccaatccgtatgccatgcgtttatacgaatccctgtgtcagtatcgtaagccggatggctcaggcatcgtctctctgaaaatcgactggatcatagagcgttaccagctgccctcaaagataccagcgtatgcctgacttccgccgccgcttcctgcaggtctgtgttaatgagatcaacagcagaactccaatgcgcctctcatacattgagaaaaagaaggccgccagacgactcatatccctggggacagttcacccccaatcacagctggtacttggccctgaggggccagtggaacaatccactagcttggttccagttccccaggccttgagcacaccacccaggggtatggagatgagagccatggccttatctcaacaggggaaagagctctcactgtcagaacacagacaagcatgtagtgtgggtttgtgtggtgatgagggaggtggtcgctgctccctttgtgagactggaccagggaggagaactgcagtttctgccatggggagcctagcagtccagaaacctgaatggctcagcaatctggatatggatggcttggaaccagcctaa

SEQ ID NO: 127623 - DNA, 2569 bp, Homo sapiens
ctatcctgtcgtcatggaagtgatatcgcggaaggaaaatacgatatgagtcgtctggcggcctttctttttctcaatgtatgagaggcgcattggagttctgctgttgatctcattaacacagacctgcaggaagcggcggcggaagtcaggcatacgctggtaactttgaggcagctggtaacgctctatgatccagtcgattttcagagagacgatgcctgagccatccggcttacgatactgacacagggattcgtataaacgcatggcatacggattggtgatctctgttgtttcactaagccgtaaactgcgtaaaccggttctgtaacccgataaagaagggaatgagatatgggttgatatgtacactgtaaagccctctggatggactgtgcgcacgtttgataaaccaaggaaaagattcatagcctttttcatcgccggcatcctcttcagggcgataaaaaaccacttccttccccgcgaaactcttcaatgcctgccgtatatccttactggcttccgcagaggtcaatccgaatatttcagcatatttagcaacatggatctcgcagataccgtcatgttcctgtagggtgccatcagattttctgatctggtcaacgaacagatacagcatacgtttttgatcccgggagagactatatgccgcctcagtgaggtcgtttgactggacgattcgcgggctatttttacgtttcttgtgattgataaccgctgtttccgccatgacagatccatgtgaagtgtgacaagtttttagattgtcacaccggtgccgggcagccacatccagcgcaaaaaccttcgtgtagacttccgttgaactgatggacttatgtcccatcaggctttgcagaactttcagcggtataccggcatacagcatgtgcatcgcataggaatggcggaacgtatgtggtgtgaccggaacagagaacgtcacaccgtcagcagcagcggcggcaaccgcctccccaatccaggtcctgaccgttctgtccgtcacttcccacacccgcgctttctctgtccttcctgtgcgacggttacgccgctccatgagcttatcgcgaataaatacctgctccgtgtaggagccaggatgctgccagaggagaaggcagagtgctgcttcagggaggccctgaaccatggcgggggggtccattccatgcaggagccgttcccatacagggagtcgttcccatggggcactccatcccatgcgagttctaaggtggtccgggagcttgagctttgctccactctccaggtgatcctggtgcacacgtgcattgaagagctgcgcccaggatgctctctgcctagtgcacatgggcattgaagagctgtcccccgggatgctctccgccaattgtttcagcatcgcaaccgcatcagactccggcatcgcaaactgcacccggtgccgggcagccacatccagcgcaaaaaccttcgtgtagacttccgttgaactgatggacttatgtcccatcaggctttgcagaactttcagcggtataccggcatacagcatgtgcatcgcataggaatggcggaacgtatgtggtgtgaccggaacagagaacgtcacaccgtcagcagcagcggcggcaaccgcctccccaatccaggtcctgaccgttctgtccgtcacttcccagatccgcgctttctctgtccttcctgtgcgacggttacgccgctccatgagcttatcgcgaataaatacctgtgacggaagatcacttcgcagaataaataaatcctggtgtccctgttgatccagaagccctgggccaacatctctttcaggcacaccaattagttgtagatccagtctctttacacaatcccatatttcttggaggttttgttcgttccttttcattcttttttctctattcttgtctgtctgccttatttcagaaacacagtcctcaaactctgagattctttcctccacttggtcttttctgctattaatacttgtgattgcattatgaaattcttgtattgtgtttttcagctccatcaggttcattacattcttctctatactggctattttgtctgtcacttcctgcaatattttatgatttttagctttcctgcattgggttacaatgtgctccttaagatcagtgaagattgtgtttatccacattctgaattctacttctgtcatttcagccatctcagcctcaccccggttctgaacccttacagagtggcagtcattttgccggaaagcccagtgccacagtaggtaaagctcctgggcctccatgcatgcctgagtgtcctgggcctccatgcatgcctgagtggctgttctgccaagactccatgcagctctgtgtgtcagactgaaggcccattctttgttctcatctattttgacctgatgatcagcatcagcccacacagtcaaccacttccttctcaaaacacttacttccctgggcttttctatcaccgaactcctaattttcctctgattcacttcccatttgttctgagagtcctttgtcat

SEQ ID NO: 127624 - DNA, 2310 bp, Homo sapiens
atgaaactcatggaaacacttaaccagtgcataaacgctggtcatgaaatgacgaaggctatcgccattgcacagtttaatgatgacagcccggaagcgaggaaaataacccggcgctggagaataggtgaagcagcggatttagttggggtttcttctcaggctatcagagatgccgagaaagcagggcgactaccgcacccggatatggaaattcgaggacgggttgagcaacgtgttggttatacaattgaacaaattaatcatatgcgtgatgtgtttggtacgcgattgcgacgtgctgaagacgtatttccaccggtgatcggggttgctgcccataaaggtggcgtttacaaaacctcagtttctgttcatcttgctcaggatctggctctgaaggggctacgtgttttgctcgtggaaggtaacgacccccagggaacagcctcaatgtatcacggatgggtaccagatcttcatattcatgcagaagacactctcctgcctttctatcttggggaaaaggacgatgtcacttatgcaataaagcccacttgctggccggggcttgacattattccttcctgtctggctctgcaccgtattgaaactgagttaatgggcaaatttgatgaaggtaaactgcccaccgatccacacctgatgctccgactggccattgaaactgttgctcatgactatgatgtcatagttattgacagcgcgcctaacctgggtatcggcacgattaatgtcgtatgtgctgctgatgtgctgattgttcccacgcctgctgagttgtttgactacacctccgcactgcagtttttcgatatgcttcgtgatctgctcaagaacgttgatcttaaagggttcgagcctgatagaagcctgatagatgtggtcggagtgattaatagcaacctgtctccagagataaaagagtggcgagtgagacgcattgccctgactccacttctaattctgtgttgttatatgcggctgtttggccaagcggaggcaccacacccacagcaccgtatctggctgcaagccctggatttcctgggtcaccaagataagattctttcagtggaaaagaaaatgatctggggcagtggtatttacccagagcagggttgtaagctggagaaggcacaggaaaggcgtgttggtgcaggtttcacccctgttcctgcaatgccattatctggtgctctcccagtgagaaattcatcagtaggacaggatgcccaggaattgatcttatttcattatggtgaaagttggaacctcttacgtgccgatcaacgtctcattttcgccaaaagttggcccagggcttcccggtatcaacagggacaccaggatttatttattctgcgaagtgatcttccgtcacaggtatttattcgcgataagctcatggagcggcgtaaccgtcgcacaggaaggacagagaaagcgcggatctgggaagtgacggacagaacggtcaggacctggattggggaggcggttgccgccgctgctgctgacggtgtgacgttctctgttccggtcacaccacatacgttccgccattcctatgcgatgcacatgctgtatgccggtataccgctgaaagttctgcaaagcctgatgggacataagtccatcagttcaacggaagtctacacgaaggtttttgcgctggatgtggctgccccggcccggatccctaaacagcagcaaaacgaaaaataccaagtgcctcaattcgatcaatcaacgattaaaaatattgagtctgcaaaaggacttgatgtgtgggacagctggccgctgcaaaacgctgacggaacagtagctgaatacaacggctatcacgttgtgtttgctcttgcgggaagcccgaaagacgctgatgacacatcaatctacatgttttatcaaaaggtcggcgacaactcaatcgacagctggaaaaacgcgggccgtgtctttaaagacagcgataagttcgacgccaacgatccgatcctgaaagatcagacgcaagaatggtccggttctgcaacctttacatctgacggaaaaatccgtttattctacactgactattccggtaaacattacggcaaacaaagcctgacaacagcgcaggtaaatgtgtcaaaatctgatgacacactcaaaatcaacggagtggaagatcacaaaacgatttttgacggagacggaaaaacatatcagaacgttcagcagtttatcgatgaaaggcattatacatccggcgacaaccatacgctgagagaccctcactac

SEQ ID NO: 127625 - DNA, 6259 bp, Homo sapiens
atgaaactcatggaaacacttaaccagtgcataaacgctggtcatgaaatgacgaaggctatcgccattgcacagtttaatgatgacagcccggaagcgaggaaaataacccggcgctggagaataggtgaagcagcggatttagttggggtttcttctcaggctatcagagatgccgagaaagcagggcgactaccgcacccggatatggaaattcgaggacgggttgagcaacgtgttggttatacaattgaacaaattaatcatatgcgtgatgtgtttggtacgcgattgcgacgtgctgaagacgtatttccaccggtgatcggggttgctgcccataaaggtggcgtttacaaaacctcagtttctgttcatcttgctcaggatctggctctgaaggggctacgtgttttgctcgtggaaggtaacgacccccagggaacagcctcaatgtatcacggatgggtaccagatcttcatattcatgcagaagacactctcctgcctttctatcttggggaaaaggacgatgtcacttatgcaataaagcccacttgctggccggggcttgacattattccttcctgtctggctctgcaccgtattgaaactgagttaatgggcaaatttgatgaaggtaaactgcccaccgatccacacctgatgctccgactggccattgaaactgttgctcatgactatgatgtcatagttattgacagcgcgcctaacctgggtatcggcacgattaatgtcgtatgtgctgctgatgtgctgattgttcccacgcctgctgagttgtttgactacacctccgcactgcagtttttcgatatgcttcgtgatctgctcaagaacgttgatcttaaagggttcgagcctgatggcacacaggcaaagatgacacaaggtgaacgcaggaacgtccccaaacaagaatacatatctcgtgggtatttcacccttaaagaaaccgtgatcgatacaagcaatggaagcaggatttctttcacgactcgtataaccggcaaagacgtagtaagaaccaccagcattgtaatgctggctaaagtcactttcctgagctgtataacgatgagcgattttactttttctggctatgaattggcctgctttgtaacacactccggtctatcccgtagcgccgggcatatcctgtcgcaatgtgcaaatctcgcggcaacaaccagtgaatacttcattcacaagcctcaccgcctgatcgcggcagaaactggttatagccaatcaaccgtcgttcgtgcattccgtgaagctgtaaacaaaggaattctgtctgtagagattgttatcggcgatcaccgtgaacgtcgcgctaacctgtaccggtttacaccatcctttttggccttcgcacaacaagccaaaaatgcgctgatagaaagcaaattaaagatctcttcagcggcaaccaagtgtgacaatctaaaaacttgtcacacttcacatggatctgtcatggcggaaacagcggttatcaatcacaagaaacgtaaaaatagcccgcgaatcgtccagtcaaacgacctcactgaggcggcatatagtctctcccgggatcaaaaacgtatgctgtatctgttcgttgaccagatcagaaaatctgatggcaccctacaggaacatgacggtatctgcgagatccatgttgctaaatatgctgaaatattcggattgacctctgcggaagccagtaaggatatacggcaggcattgaagagtttcgcggggaaggaagtggttttttatcgccctgaagaggatgccggcgatgaaaaaggctatgaatcttttccttggtttatcaaacgtgcgcacagtccatccagagggctttacagtgtacatatcaacccatatctcattcccttctttatcgggttacagaaccggtttacgcagtttcggcttagtgaaacaaaagaaatcaccaatccgtatgccatgcgtttatacgaatccctgtgtcagtatcgtaagccggatggctcaggccttcgtctctctgaaaatcggctggatcatagaagcgtaccagctggctcaaagttcccagcgtatgcctgactttcgccggcggcttgctgcaggtcttgtgttaatgaaatccaacagccggaactccgaagccgccttctcatgcattgggaaaaaagaaagggcgcccagaaccactcatatctttaatgatgacagcccggaagcgaggaaaataacccggcgctggagaataggtgaagcagcggatttagttggggtttcttctcaggctatcagagatgccgagaaagcagggcgactaccgcacccggatatggaaattcgaggacgggttgagcaacgtgttggttatacaattgaacaaattaatcatatgcgtgatgtgtttggtacgcgattgcgacgtgctgaagacgtatttccaccggtgatcggggttgctgcccataaaggtggcgtttacaaaacctcagtttctgttcatcttgctcaggatctggctctgaaggggctacgtgttttgctcgtggaaggtaacgacccccagggaacagcctcaatgtatcacggatgggtaccagatcttcatattcatgcagaagacactctcctgcctttctatcttggggaaaaggacgatgtcacttatgcaataaagcccacttgctggccggggcttgacattattccttcctgtctggctctgcaccgtattgaaactgagttatggggcaaattgatgaaggcagatccttcatgcctgggcctccacccaccacccactggggcggtcaagccagtagcaggtcagcaactctctggacagagctgcgaagggcaactgaaagcctctctgccactgcccctgcagtggaactacccatgctaccctcagactaataaaggagcaaagaccctacgtgccttatgcacacctccaacaagctgtagtcgacccaaggagaggaggccacatggttcttattatgttgtacgtgtaacgggtgacgttggtaaaggtcagatccggatgagaactgttgttgaacaggccattgatcaacgctcttcaactggtgcctggagaaatgctctttctatttgggaacctgtctgcaatgaaattttctatcgtctgattaaaccacgctgggagattagatgggggaagcgtgcgcctgttattccaaaacatacgctcaatactcaaccggttgaagatacttcgttatcgacaccagctgccccgatggtggattcgttaattgcgcgcgtaggagtaatggctcgcggtaatgccattactttgcctgtatgtggtcgggatgtgaagtttactcttgaagtgctccggggtgatagtgttgagaagacctctcgggtatggtcaggtaatgaacgtgaccaggagctgcttactgaggacgcactggatgatctcatcccttcttttctactgactggtcaacagacaccggcgttcggtcgaagagtatctggtgtcatagaaattgccgatgggagtcgccgtcgtaaagctgctgcacttaccgaaagtgattatcgtgttctggttggcgagctggatgatgagcagatggctgcattatccagattgggtaacgattatcgcccaacaagtgcttatgaacgtggtcagcgttatgcaagccgattgcagaatgaatttgctggaaatatttctgcgctggctgatgcggaaaatatttcacgtaagattattacccgctgtatcaacaccgccaaattgcctaaatcagttgttgctcttttttctcacccccgtcaggcaccgtgtatgaaatctaacaatgcgctcatcgtcatcctcggcaccgtcaccctggatgctgtaggcataggcttggttatgccggatctggctctgaaggggctacgtgttttgctcgtggaaggtaacgacccccagggaacagcctcaatgtatcacggatgggtaccagatcttcatattcatgcagaagacactctcctgcctttctatcttggggaaaaggacgatgtcacttatgcaataaagcccacttgctggccggggcttgacattattccttcctgtctggctctgcaccgtattgaaactgagttaatgggcaaatttgatgaaggtaaactgcccaccgatccacacctgatgctccgactggccattgaaactgttgctcatgactatgatgtcatagttattgacagcgcgcctaacctgggtatcggcacgattaatgtcgtatgtgctgctcacgccctgattgttcccacgcctgctgagttgtttgactacacctccgcactgcagtttttcgatatgcttcgtgatctgctcaagaacgttgatcttaaagggttcgagcctgatgtacgtattttgcttaccaaatacagcaatagtaatggctctcagtccccgtggattgaggagcaaatatcggatgcctggggaagcatggttctaaaaaatgttcacgccatagtgactggcgatgctgtcggaatggacgatatcccgcaagaggcccggcagtaccggcataaccaagcctatgcctacagcatccagggtgacggtgccgaggatgacgatgagcgcattgttagatttcatacacgggtcaccgtcgacagcgacacacttgcatcggatgcagcccggttaacgtgccggcacggcctgggtaaccagcggaatggtggtgtcctgattgaagacaaattcgagtgcttcttctccctcactgcggtctttgctacaagagcctactatgctgtctatcatttgacgggtgccagacactcagacatcgtggtcgcacacgggtacgctggttgcaatgtcaggtttgttgcacttctgggcacaaataccaccttggagacctacttatctaatcaaggttctaatggcttttcttgtctgcattttggagaggatgtgggacaggagaggatccccatctgcgagatccatgttgctaaaatatgctgaaatattcgggattgaccttcgcggaaagcaataaagaatatccgccaggcattgaagagtttcgcggggaaggaagtggttttttatcgccctgaagaggatgccggcgatgaaaaaggctatgaatcttttccttggtttatcaaacgtgcgcacagtccatccagagggctttacagtgtacatatcaacccatatctcattcccttctttatcgggttacagaaccggtttacgcagtttcggcttagtgaaacaaaagaaatcaccaatccgtatgccatgcgtttatacgaatccctgtgtcagtatcgtaagccggatggctcaggcatcgtctctctgaaaatcgactggatcatagagcgttaccagctgcctcaaagttaccagcgtatgcctgacttccgccgccgcttcctgcaggtctgtgttaatgagatcaacagcagaactccaatgcgcctctcatacattgagaaaaagaaaggccgccagacgactcatatctgtgacaatctaaaaacttgtcacacttcacatggatctgtcatggcggaaacagcggttatcaatcacaagaaacgtaaaaatagcccgcgaatcgtccagtcaaacgacctcactgaggcggcatatagtctctcccgggatcaaaaacgtatgctgtatctgttcgttgaccagatcagaaaatctgatggcaccctacaggaacatgacggtatctgcgagatccatgttgctaaatatgctgaaatattcggattgacctctgcggaagccagtaaggatatacggcaggcattgaaaagtttcgcggggaaagaagtggttttttatcgccctgaagaggatgccggcgatgaaaaaggctatgaatcttttccttggtttatcaaacgtgcgcacagtccatccagagggctttacagtgtacatatcaacccatatctcattcccttctttatcgggttacagaaccggtttacacaatttcggcttattgaaacaaaagaaatcaccaatccgtatgccatgcgtttatacaaatccctgtgtcaatatcgtaaaccggatggctcaaggcatctctctttgaaaatcgactggatcatagagcggttccagctgccctcaaattaccaaccgatgcctgactttccccgccgtttcctgcaggtatga

SEQ ID NO: 127626 - DNA, 6173 bp, Homo sapiens
  misc_feature (1)...(6173): n = a,t,c or g
ccatggatatccgcgcctgttccggtggacgtggtggagggtgcaatggactctgtgacggttcttagctttggtggtttaatgctctatttttgtgctggttggcctcctgccaggaggtggtgctttccagaaagcatcagctgtggtagtatggagagggaccagtggtgggggctccaagtagcgaagcgagcaggactggccggcggccaaagcggtcggacagtgctccgagaacgggtgcgcatagaaattgcatcaacgcatatagcgctagcagcacgccatagtgactggcgatgctgtcggaatggacgatatcccgcaagaggcccggcagctttgcagaactttcagcggtataccggcatacagcatgtgcatcgcataggaatggcggaacgtatgtggtgtgaccggaacagagaacgtcacaccgtcagcagcagcggcggcaaccgcctccccaatccaggtcctgaccgttcttgtgacaatctaaaaacttgtcacacttcacatggatctgtcatggcggaaacagcggttatcaatcacaagaaacgtaaaaatagcccgcgaatcgtccagtcaaacgacctcactgaggcggcatatagtctctcccgggatcaaaaacgtatgctgtatctgttcgttgaccagatcagaaaatctgatggcaccctacaggaacatgacggtatctgcgagatccatgttgctaaatatgctgaaatattcggattgacctctgcggaagccagtaaggatatacggcaggcattgaagagtttcgcggggaaggaagtggttttttatcgccctgaagaggatgccggcgatgaaaaaggctatgaatcttttccttggtttatcaaacgtgcgcacagtccatccagagggctttacagtgtacatatcaacccatatctcattcccttctttatcgggttacagaaccggtttacgcagtttcggcttagtgaaacaaaagaaatcaccgatccgtatgccatgcgtttatacaaataccctgtgtcagtatcgggctttcgtaaatggggggggagaagaaaaggctcgcggaaagcccatactttgccggtatggggtcgggatgtgaagttaactctgaaagtgctccggggtgatagtgttgagaagacttttcgggtagggtcaggtaatgaacgtgcccagaagctgcttactgaggacgcactggatgatctcatcccttcttttctactgactggtcaacagacaccggcgttcggtcgaagagtatctggtgtcatagaaattgccgatgggagtcgccgtcgtaaagctgctgcacttaccgaaagtgattatcgtgttctggttggcgagctggatgatgagcagatggctgcattatccagattgggtaacgattatcgcccaacaagtgcttatgaacgtggtcagcgttatgcaagccgattgcagaatgaatttgctggaaatactctctgcgctggctgatgcggagtgtgacaatctaaaaacttgtcacacttcacatggatctgtcatggcggaaacagcggttatcaatcacaagaaacgtaaaaatagcccgcgaatcgtccagtcaaacgacctcactgaggcggcatatagtctctcccgggatcaaaaacgtatgctgtatctgttcgttgaccagatcagaaaatctgatggcaccctacaggaacatgacggtatctgcgagatccatgttgctaaatatgctgaaatattcggattgacctctgcggaagccagtaaggatatacggcaggcattgaagagtttcgcggggaaggaagtggttttttatcgccctgaagaggatgccggcgatgaaaaaggctatgaatcttttccttggtttatcaaacgtgcgcacagtccatccagagggctttacagtaaccggtttacgcagtttcggcttagtgaaacaaaagaaatcaccaatccgtatgccatgcgtttatacgaatccctgtgtcagtatcgtaagccggatggctcaggcatcgtctctctgaaaatcgactggatcatagagcgttaccagctgcctcaaagttaccagcgtatgcctgacttccgccgccgcttcctgcagtgcataaacgctggtcatgaaatgacgaaggctatcgccattgcacagtttaatgatgacagcccggaagcgaggaaaataacccggcgctggagaataggtgaagcagcggatttagttggggtttcttctcaggctatcagagatgccgagaaagcagggcgactaccgcacccggatatggaaattcgaggacgggttgagcaacgtgttggttatacaattgaacaaattaatcatatgcgtgatgtgtttggtacgcgattgcgacgtgctgaagacgtatttccaccggtgatcggggttgctgcccataaaggtggcgtttacaaaacctcagtttctgttcatcttgctcaggatctggctctgaaggggctacgtgttttgctcgtggaaggtaacgacccccagggaacagcctcaatgtatcacggatgggtaccagatcttcatattcatgcagaagacactctcctgcctttctatcttggggaaaaggacgatgtcacttatgcaataaagcccacttgctggccggggcttgacattattccttcctgtctggctctgcaccgtattgaaactgagttaatgggcaaatttgatgaaggtaaactgcccaccgatccacacctgatgctccgactggccattgaaactgttgctcatgactatgatgtcatagttattgacagcgcgcctaacctgggtatcggcacgattaatgtcgtatgtgctgctgatgtgctgattgttcccacgcctgctgagttgtttgactacacctccgcactgcagtttttcgatatgcttcgtgatctgctcaagaacgttgatcttaaagggttcgagccctgatgtacgtattttgcttcccaaatacagcaatagtaatggctctcagtccccgtggatggaggagcaaattcgggatgcctggggaagcatggttctaaaaaatgttgtacgtgaaacggatgaagttggtaaaggtcagatccggatgagaactgtttttgaacaggccattgatcaacgctcttcaactgatacttcgttatcgacaccagctgccccgatggtggattcgttaattgcgcgcgtaggagtaatggctcgcggtaatgccattactttgcctgtatgtggtcgggatgtgaagtttactcttgaagtgctccggggtgatagtgttgagaagacctctcgggtatggtcaggtaatgaacgtgaccaggagctgcttactgaggacgcactggatgatctcatcccttcttttctactgactggtcaacagacaccggcgtttcggtccaaaaagatcctggtgtcatagaaattgccgatgggagtcgccgtcgtaaagctgctgcacttaccgaaagtgattatcgtgtttctggttggcgaactggatgatgagcacatggctgcattatccagattgggtaacgattatcgcccaacaagtgcttatgaacgtggtcagcgttatgcaagcccgattgcagaatgaatttgctgggaaatatttcttgcgctggctgatgcggaaaatatttcacgtaagattattacccgctgtatcaacaccgccaaattggcctaaatcagttgttgctcttttttctcaccccggcgaactatctgcccggtcaggtgatgcacttcaaaaagcctttacagataaagaggaattacttaagcagggggccttttacccttattgaccggataaaagctggggtgatatttgaggctgacgaaagtatcactcttttaacttctgtgcttaaaacgtcatctgcatcaagaactagtttaagctcacgacatcagtttgctcctggagcgacagtattgtattatcgtcgataaaatgtttatcacagttaaaattgctaaacgcagtcaggcaccgtgtatgaaatctaacaatgcgctcatcgtcatcctcggcaccgtcaccctggatgctgtaggcataggcttggttatgccggtactgccgggcctcttgcgggatatcgtccattccgacagcatcgccagtcactatggcgtgctgctagcgctatatgcgttgatgcaatttctatgcgcacccgttctcggagcactgtccgaccgctttggccgccgcccagtcctgctcgcttcgctacttggagccactatcgactacgcgatcatggcgaccacacccgtcctgtggatctacccactacttgctgaaatatcagtcctgggagtaggtaaagcgtttggtattaagnataacccatatcttcatattcatgcagaagacactctcctgcctttctatcttgggcaaaaggacgatgtcacttatgcaataaagcccacttgctggccggggcttgacattattccttcctgtctggctctgcaccgtattgaaactgagttaatgggcaaatttgatgaaggtaaactgcccaccgatccacacctgatgctccgactggccattgaaactgttgctcatgactatgatgtcatagttattgacagcgcgcctaacctgggtatcggcacgattaatgtcgtatgtgctgctgatgtgctgattgttcccacgcctgctgagttgtttgactacacctccgcactgcagtttttcgatatgcttcgtgatctgctcaagaacgttgatcttaaagggttcgagcctgatgacgatgtcacttatgcaataaagcccacttgctggccggggcttgacattattccttcctgtctggctctgcaccgtattgaaactgagttaatgggcaaatttgatgaaggtaaactgcccaccgatccacacctgatgctccgactggccattgaaactgttgctcatgactatgatgtcatagttattgacagcgcgcctaacctgggtatcggcacgattaatgtcgtatgtgctgctgatgtgctgattgttcccacgcctgctgagttgtttgactacacctccgcactgcagtttttcgatatgcttcgtgatctgctcaagaacgttgatcttaaagggttcgagcctgatgtacgtattttgcttaccaaatacagcaatagtaatggctctcagtccccgtggatggaggagcaaattcgggatgcctggggaagcatggttctaaaaaatgttgtacgtgaaacggatgaagttgggatttggctctgtgactcaagcttgtatgcaccggggtgtgacaatctaaaaacttgtcacacttcacatggatctgtcatggcggaaacagcggttatcaatcacaagaaacgtaaaaatagcccgcgaatcgtccagtcaaacgacctcactgaggcggcatatagtctctcccgggatcaaaaacgtatgctgtatctgttcgttgaccagatcagaaaatctgatggcaccctacaggaacatgacggtatctgcgagatccatgttgctaaatatgctgaaatattcggattgacctctgcggaagccagtaaggatatacggcaggcattgaagagtttcgcggggaaggaagtggttttttatcgccctgaagaggatgccggcgatgaaaaaggctatgaatcttttccttggtttatcaaacgtgcgcacagtccatccagagggctttacagtgtacatatcaacccatatctcattcccttctttatcgggttacagaaccggtttacgcagtttccgcttagtgaaacaaaagaaatcaccaatccgtatgccatgcgtttataccaattcctgtgtcagtatcggaagccggatggctcaggcatcgccaccatccctgacactcttgccataaggcttcctgtttaccactcagctcctgcaatttccatgtcctctatcttctctttactaaaacccatatccccaaccctctttacacatcattaccacctcatctcctactttgtcaaaaaaagtacagagtatgaacctcacaggaaaagcccctctgaaaacgatctgctggttagggaatga

SEQ ID NO: 127627 - DNA, 2884 bp, Homo sapiens
  misc_feature (1)...(2884): n = a,t,c or g
tcagggtgctggcttttcaagttccttaagaatggcctcaattttctctatacactcagttggaacacgagacctgtccaggttaagcaccattttatcgcccttatacaatactgtcgctccaggagcaaactgatgtcgtgagcttaaactagttcttgatgcagatgacgttttaagcacagaagttaaaagagtgataacttcttcagcttcaaatatcaccccagcttttttctgctcatgaaggttagatgcctgctgcttaagtaattcctctttatctgtaaaggctttttgaagtgcatcacctgaccgggcagatagttcaccggggtgagaaaaaagagcaacaactgatttaggcatttggcggtgttgatacagcgggtaataatgtgaaatattttccgcatcagccagcgcagaaatatttccagcaaattcattctgcaatcggcttgcataacgctgaccacgttcataagcacttgttgggcgataatcgttacccaatctggataatgcagccatctgctcatcatccagctcgccaaccagaacacgataatcactttcggtaagtgcagcaacnccctttccagcaaattcattctgcaatcgtcttgcataacgctgaccacgttcataagcacttgttgggcgataatcgttacccaatctggataatgcagccatctgctcatcatccagctcgccaaccagaacacgataatcactttcggtaagtgcagcagctttacgacggcgactcccatcggcaatttctatgacaccagatactcttcgaccgaacgccggtgtctgttgaccagtcagtagaaaagaagggatgagatcatccagtgcgtcctcagtaagcagctcctggtcacgttcattacctgaccatacccgagaggtcttctcaacactatcaccccggagcacttcaagagtaaacttcacatcccgaccacatacaggcaaagtaatggcattaccgcgagccattactcctacgcgcgcaattaacgaatccaccatcggggcagcatgagggagccactgcatggcagaccggaaggtgagaaccaggcccaagaagagcagggtctggtccaatgggaagctagtgtccagtgtgagtgctgaaggggcatgtttctggtggtgtttcaaatgggcaaggctggaatcatagagcagcattcccatgtcccccgaaggctcagatagagcaccaggcagtgtaaagggctctgagttcatgggatatgcttcttctaacacccatgggcatgtgggcttctggtcctcagggctgcttattttcactttcgggcaacggacaaccttcaccaccttggagaccctcactgggtgggcagcaccttggaagcatctctccttcaggaaatcacacacgacattgacggctgatttgacatcagcaccaaaggtggtgtcgggaaggaggtaatcctctatgaacttgtccagcgtccaggctgggatgctcctgagtccgtgctccatgctaagtctggagcttcctgggtctcccagcctgatttgaggcagctggtaacgctctatgatccagtcgattttcaaaagagacgaaggcttaacccttccgggcatccgatactgacacagggatttgtaataagcgccatggcatacggatgggtgatttcttttgtttccctaagccgaaaactgcgttaaccgggttctgtaccccgataaagaagggaatgagatatggggggaatatgtccactgaaaagccctctggatggcctgtgcgcccgtttgataacccaaggaaaagattcatagcctttttcatcgccggcatcctcttcagggcgataaagaaccacttccttccccgcgaaactcttcaatgcctgccgtatatccttactggcttccgcagaggtcaatccgaatatttcagcatatttagcaacatggatctggcaggatgccggtcatgttcctgtagggtgccatcagatgttctgatttggtcagcgccgagatacagcatacgtttttgatcccgggagagagtatatgccgcctcagtgaggtcgtttgactggacgattcgcgggctatttttacgtttcttgttgattgataaccgctgtttccgccatgacagatccatgtgaaagtgtgacaagttttttagaatgtcacactaaataaaaaagagtcaataagcaggggataactttgtgaaaaaacagcttcttctgagggcaatttggtaccaggggtaaaggggaatttggtcacaagacaggactggtcatttggagggtgattttggcaccactggaagggggcaatttgtcacaacacctttctctaaaaacaacatggataaaggccttacaaggcgctctaaaacagaagatctaaaaactatagaaaccataattataaaaacatccccgcggataagcggataaccccaagggaaagttttttcaggcatcgtgtgtaagcagaatatataagtgctgttccctggtgcttcctcgctcactcgagggcttccgccttgcgctcgactgcgcgagcactactggctgtaaaggacagaccacatcatggttctgtgttcattaggatgttctgtccattgctgacataatccgctccacttcaacgtaacaccgcacgaagatttctattgttcctgaaggcatgttcaaatcgtttttgttaccggttggaggcatatgacagccattccttcttataaccgttcaaagctccgtgaaataaaaggcggtctctaccatatgggaattttccgacggttcttggcttctaaggaaacccccactttttgttacat

SEQ ID NO: 127628 - DNA, 7903 bp, Homo sapiens
atgcaggaacaacagcaagcctccagcctgatcaggagcggcaatgggcgcctccctggatcaggagcacagcggacaccctgccatatccggagggatggaagtcagcggcgggtctgcgatgactgcaaacagcagtggtggaaggcaaaatacaacataccatctggcttgcatgcttgcactgcgactctagaagaaacccatattttagactcgggggcacatgtgcaagttttttacaagggtcaactgcatgtcatgagagttccatgtacagattattttgacacccagaagaaccccaacttgtcacacttacatggatctgtcatggcggaaacagcggttatcaatcacaagaaacgtaaaaatagcccgcgaatcgtccagtcaaacgacctcactgaggcggcatatagtctctcccgggatcaaaaacgtatgctgtatctgttcgttgaccagatcagaaaatctgatggcaccctacaggaacatgacggtatctgcgagatccatgttgctaaatatgctgaaatattcggattgacctctgcggaagccagtaaggatatacggcaggcattgaagagtttcgcggggaaggaagtggttttttatcgccctgaagaggatgccggcgatgaaaaaggctatgaatcttttccttggtttatcaaacgtgcgcacagtccatccagagggctttacagtgtacatatcaacccatatctcattcccttctttatcgggttacagaaccggtttacgcagtttcggcttagtgaaacaaaagaaatcaccaatccgtatgccatgcgtttatacgaatccctgtgtcagtatcgtaagcccgatggctcaagcatcgtctctctgaaaatcgactgggacatagaaccgtaccccgctggcctaaaagagcagattaagtctgatgttttcttgttaagttcctgtgtggaagttctccccaatgctgaaattgggttcttaaaatgtctagctattattggattatgggctgtttctctcttcagctacaataattgctttatatgtacaccggcgttcggtcgaagagtatctggtgtcatagaaattgccgatgggagtcgccgtcgtaaagctgctgcacttaccgaaagtgattatcgtgttctggttggcgagctggatgatgagcagatggctgcattatccagattgggtaacgattatcgcccaacaagtgcttatgaacgtggtcagcgttatgcaagccgattgcagaatgaatttgctggaaatatttctgcgctggctgatgcggaaaatatttcacgtaagattattacccgctgtatcaacaccgccaaattgcctaaatcagttgttgctcttttttctcaccccggtgaactatctgcccggtcaggtgatgcacttcaaaaagcctttacagataaagaggaattacttaagcagcaggcatctaaccttcatgagcagaaaaaagctggggccataaacacacaactggttgaaaccctgctctctgactctagaagaatccccgacttcatgtctaaaacaccaaaagcaatggtaacaaaagctaaaattgacaaatgggatctaattaaactaaagagcttctgcacagcaaaagaaactaccatcagagtgaacaggcaacctacagaatgggagaaaattttcgcaacctactcgtctgacaaagggctaatatccagaatctacaaagaactcaaacaaagttacaggaaaaaaacaaccctgtcaacaagtggtggccatgagaagtggagacgaaatctgaaactcaatgttgctctgctgatatggttttgctgtgaccccacccaaatttcatttttaattgtagctgccaaaattcccatgtcatgtgagggatctggtgggagaagaaaccccatgataaccaggcaaacaggatctggagtggacctccagcaaactccagcagacctgcagaagagggactttactggtagaaggaaaactaacaaacagaaaggaatagcaccaacatcaacaaaaattacgtccacatggaaacctcatccaaaggattgcaactcctcaccagcaagggaacaaaactggatggagaatgagtttgacaaattgacagaagtaggcttcagaaggtggacaataacaaactcctccaagctaaaggagcgtgttctaacccaatgcaaggaagcaacgaaccttgcaaaaaggttagagaaattgctaactagaataaccagtttagaaaagaacaaaaatgacctgatggagctgaaaaacacagcacaagaacttcgtgaagcatacaccagtatcagcggccgaatcaatcaagcagaacaaaggacatcagagattgaagatcaacttaatgaaataaagcgcagaggcgtctccgtgtgtccacaaccatcagaagacaccccgaggagtactgccagggtcccaaaggggatggtccccttccggccccgggtccccttggtcactccacccagagagaaaaaagaagctccttggcttgcatgccttcgcactagggctctaaggatcctcatagaccctccgagccaggtgtgggatatagtctcgtgtgatgcggagaatgaaaccaagttggaaaacactctgcaggatattatccaggagaacttccccaatctagcaaggcaggccaacgttcagattcaggaaatacagagaacgccacaaagatactcctcaagaagagcaactccaagacacataattgtcagattcaccaaagttgaaatgaaggaaaaaatgttaagggcagccagagagaaaggtcgggttaccctcaaagggaagcccatcagactaacagcggatctctcggcagaaaccctacaagccagaagagagtgggggccaatattcaacacccttaaagaaaagaattttcaacccagaatttcatatccagccaaaataagcttcataagtgaaggagaaataaaatactttacagacaagcaaatgctgagagattttgtcaccagcaggcctgccctagaagacctcctgaaggaagcgctaaacatggaaaggaacaaccggttggttaaatccctcgcttgggcaagccagaacggcttccggtccccggccttgttgccactgtccctaatgctttgtgctcccctacaagaggcagatggaacaaatctgggatggctggctcactgtggcctgctgtgcactggtgaccaccctagtggccttggcaaacctggccggcacggcgctgaccgtcaccatccagagggactggatcgtgagctgacgggtgacaacagaggccagctggttggaggagcgactcaagccttcgcgaaagaaaataaccaaaaagcatacaaagaaacgtacggcgtctctcatattacacgccatgatatgctgcagatccctaaacagcagcaaaacgaaaaataccaagtgcctcaattcgatcaatcaacgattaaaaatattgagtctgcaaaaggacttgatgtgtgggacagctggccgctgcaaaacgctgacggaacagtagctgaatacaacggctatcacgttgtgtttgctcttgcgggaagcccgaaagacgctgatgacacatcaatctacatgttttatcaaaaggtcggcgacaactcaatcgacagctggaaaaacgcgggccgtgtctttaaagacagcgataagttcgacgccaacgatccgatcctgaaagatcagacgcaagaatggtccggttctgcaacctttacatctgacggaaaaatccgtttattctacactgactattccggtaaacattacggcaaacaaagcctgacaacagcgcaggtaaatgtgtcaaaatctgatgacacactcaaaatcaacggagtggaagatcacaaaacgatttttgacggagacggaaaaacatatcagaacgttcagcagtttatcgatgaaggcaattatacatccggcgacaaccatacgctgagagaccctcactacgttgaagacaaaggccataaataccttgtattcgaagccaacacgggaacagaaaacggataccaaggcgaagaatctttatttaacaaagcgtactacggcggcggcacgaacttcttccgtaaagaaagccagaagcttcagcagagcgctaaaaaacgcgatgctgagttagcgaacggcgccctcggtatcatagagttaaataatgattacacattgaaaaaagtaatgaagccgctgatcacttcaaacacggtaactgatgaaatcgagcgcgcgaatgttttcaaaatgaacggcaaatggtacttgttcactgattcacgcggttcaaaaatgacgatcgatggatgccagcctacgtgttctgaggctttgcagaactttcaacggtataccggcatacagcatgtgcatcgcataggaatggcggaacgtatgtggtgtgaccggaacagagaacgtcacaccgtcagcagcagcggcggcacccgcctccccaatccaggtcctgcccgttctgaacattttgaggcatttcagtcagttgctcaatgtacctataaccagaccgttcagctggatattacggcctttttaaagaccgtaaagaaaaataagcacaagttttatccggcctttattcacattcttgcccgcctgatgaatgctcatccggagttccgtatggcaatgaaagacggtgagctggtgatatgggatagtgttcacccttgttacaccgttttccatgagcaaactgaaacgttttcatcgctctggagtgaataccacgacgatttccggcagtttctacacatatattcgcaagatgtggcgtgttacggtgaaaacctggcctatttccctaaagggtttattgagaatatgtttttcgtctcagccaatccctggtcttccttagagctagcagtgatcatgggaccaattctggccaataagtgtgacaatctaaaaacttgtcccccttccacatggatctgtcatggcggaaaccagcgggttatcaattcccaagaaacggtaaaaataggccctctaatcgtccagtcaaacgccgtcactgaggcggcatatagtctctcccagggatcaaaaacgtatgctgtattctgttcgttgaccagttcaaaaaatttgatggcaccctacaagaaccatgccggtatctgcgagatcccatgttgcttaaatatgttgaaatatttcggattgccctttgcggaagccagtaaggatatagcggccagccattgaagagtttcgcggggaaggaaagtggttttttatcgccctaaagaggatgccggcgataaaaaaggctatgaatcttttccttggtttatcaaacgtgcgcacagtccatccagagggctttacagtgtacatatcaacccatatctcattcctcttctttatcgggtttacagaaccggtttacgcagtttcggcttagtgaaacaaaagaaatcaccaatccgtatggccatggcgttaatacgaaatccctgttgtcagtatccgtaagcccgggatgggctcaaggcatcgtctcttctgaaaatcgactggatcatagagcgttaccagcctgcctcaaaattaccagcggtatgccttgacttccgccggccgcttcctggcagggctgtgtttattggagatcaacaggcagaacttccaatgccgccctttattaccttgaagaaaaagaaaggccgccagacgactcatatcgatctggctctgaaggggctacgtgttttgctcgtggaaggtaacgacccccagggaacagcctcaatgtatcacggatgggtaccagatcttcatattcatgcagaagacactctcctgcctttctatcttggggaaaaggacgatgtcacttatgcaataaagcccacttgctggccggggcttgacattattccttcctgtctggctctgcaccgtattgaaactgagttaatgggcaaatttgatgaaggtaaactgcccaccgatccacacctgatgctccgactggccattgaaactgttgctcatgactatgatgtcatagttattgacagcgcgcctaacctgggtatcggcacgattaatgtcgtatgtgctgctgatgtgctgattgttcccacgcctgctgagttgtttgactacacctccgcactgcagtttttcgatatgcttcgtgatctgctcaagaacgttgatcttaaagggttcgagcctgatgtacgtattttgcttaccaaatacagcaatagtaatggctctcagtccccgtggatggaggagcaaattcgggatgcctggggaagcatggttctaaaaaatgttgtacgtgaaacggatgaagttggtaaagctgccccgatggtggattcgttaattgcgcgcgtaggagtaatggctcgcggtaatgccattactttgcctgtatgtggtcgggatgtgaagtttactcttgaagtgctccggggtgatagtgttgagaagacctctcgggtatggtcaggtaatgaacgtgaccaggagctgcttactgaggacgcactggatgatctcatcccttcttttctactgactggtcaacagacaccggcgttcggtcgaagagtatctggtgtcatagaaattgccgatgggagtcgccgtcgtaaagctgctgcacttaccgaaagtgattatcgtgttctggttggcgagctggatgatgagcagatggctgcattatccagattgggtaacgattatcgcccaacaagtgcttatgaacgtggtcagcgttatgcaagccgattgcagaatgaatttgctggaaatatttctgcgctggctgatgcggaaaatatttcacgtaagattattacccgctgtatcaacaccgccaaattgcctaaatcagttgttggtcttttttctccaccccggtgaactatctgcccggtcaggtgatgcacttcaaaaagcctttacagataaaggaggatttacttaagcagcaggcatctaaccttcatggagcagaaaaaagctggggtgatatttgaagctgaagaagttatcactcttttaacttctgtgcttaaaacgtcatctgcatcaagaactagtttaagctcacgacatcagtttgctcctggagcgacagtattgtataagggcgataaaatggtgcttaacctggacaggaagagcaaatgctttcacctattttgcaactgtcattaccatcctgatttcatataccttcgtctgtagtaggggatcctctacagtagacctggattcatgcccccatgtcgtaggagtaagtttcgcggggaaggaaggggttttttatcgccctgaagaggaggccggcgatgaaaaaggctatgatccttttccttggtttatcaaacgtgtgcacagtccatccagagggctttacagtgtacatatcaacccatatctcattcccttctttatcgggttacagaaccggtttacgcagtttcggcttagtgaaacaaaagaaatcaccaatccgtatgccatgcgtttatacgaatccctgtgtcagtatcgtaagccggatggctcaggcatcgtctctctgaaaatcgactggatcatagagcgttaccagctgcctcaaagttaccagcgtatgcctgacttccgccgccgcttcctgcaggtctgtgttaatgagatcaacacaagaactccaatgcgcctctcatacattgagaaaaagaaaggccgccagacgactcatatcgtattttccttccgcgatatcacttccatgacgacaggatag

SEQ ID NO: 127629 - DNA, 2062 bp, Homo sapiens
  misc_feature (1)...(2062): n = a,t,c or g
atgggcaaagacttcatgactaaaacaccaaaagcaatggcaacaaaagccaaaattgacaaatgggatctaattaaactaaagagcttctgcacagcaaaagaaactaccatcagagtgaataggcaacttacagaatgggagaaaatttttgcagtctactcatctgacaaagggctaatatccagaatctacaaagaacacaaacaaatttacaagaaaaaaacaaacaaccccatcagcaactgggcgaaggatatgaacagacacttctcaaaagaagacatttatgcaggcaacagacacatgaaaaaatgctcatcaccactggccatcagagaaatgcaaatcaaaaccacaagccagtggatgtttggggttttgggggtgtcagtagagcacctttgcttgcctagcagcggtgaagcatttgctatggaaaagaagcaaagctgcaagttcagcagattgttactatttatcctcagaggtatgttttaccctagtttctacaaaaacactcttatgatgttcacaattggatcccagtatcacagttaccacccagatcaccaggacctgggtaggttacctgtgggttttactacttatgtagtagaagtgggaagactcccacaacagagacagtttgaaaaggcctgctttgccagcaacccgtttcccaaagaaggaaccggatttattcgcaacttcgtcaccctgcggcttgagggtaaaacatccccccaagtgatcttatttcattatggtgaaagttggaacctcttacgtgccgatcaacgtctcattttcgccaaaagttggcccaggggcttcccggtatcaacagggacaccaggatttatttattctgcgaagtgatcttccgtcacaggtatttattcgcgataagctcatggagcggcgtaaccgtcgcacaggaaggacagagaaagcgcggatttggggaagtggacggacagaacggtcaggaacctggatatgtcgaggcgggttgcccgcgcgctgctgctgacggtgtgacgtttttttgttcggctccccccaacatacggttccgcccattcctatgcgaatgcacatggctgttatgcccggtaataccgctgtatagttctgcaaagcctgatgggacataagtccatcagttcacacggaagtctacacgaaggtttttgcgctggatgtggctgcccggcaccgggtgcagtttgcgatgccggagtctgatgcggttgcgaatgctgaaacaattattcctaagaaataaatgccttggctctttatatggaaaatggggaactgaggggataatgctggttttggtctgtttaacaaagaaaacgggctgtgatacccattgagaagcgaacggaaccagtcggggaaaatctccccttattggggaagatccggattatttaatctaaggaccctggggtaccgtttataggaaagaatggttctgtcatgatgcctgcaagccggtaacgaaaacgatttgaatatgccttcaggaacaatagaaatcttcgtgcggtgttacgttgaagtggagcggattatgtcagcaatggacagaacaacctaatgaacacagaaccatgatgtggtctgtccttttacgcccagtaatgctcccccaaattcgagcgacagggcgaagccctcgagtgagcgaggaatcaccagggaacagcacttatatattctgcttacacacgatgcctgaaaaaacttgccttggggttatccacttatccacggggatatttttataattattttttttataggttttagaacctctagaggcgaccctgcagcatgccagcttgggactgggcgggcgtttaaaacggccggaacgggaaaaaaccggggggtcccaaattaaatggctttggaaaaanaagggncaagccatacaaagaggggaatatcttgaggtatcattgtttacggggcgaccgtaagtatcggctagtggcggtgaagaatcgggaaggatacttaaactctgctggttcttcggtgtgcc

SEQ ID NO: 127630 - DNA, 999 bp, Homo sapiens
gacgaccggtcaggacctggattggggagtgtggctgccgccgctgctgctgacggtgtgacgttctctgttccggtcacaccacatacgttccgccattcctatgcgatgcacatgctgtatgccggtataccgctgaaagttctgcaaagcctgatgggacataagtccatcagttcaacttatgtctacacgaaggtttttgcgctggatgtggctgcccggcaccgggtgcagggtccttataacagggaaacaggaggttcagagagaagacagaaacaggagttggaattacgtactttgaaaatagaaggaggggccataaaccaaagaaagtatgtggcctttagaagagagaaaaaccaacacggcgaacagcaaaacggataccaaggcgaagaatctttatttaacaaagcgtactacggcggcggcacgaacttcttccgtaaagaaagccagaagcttcagcagagcgctaaaaaacgcgatgctgagttagcgaacggcgccctcggtatcatagagttaaataatgattacacattgaaaaaagtaatgaagccgctgatcacttcaaacacggtaactgatgaaatcgagcgcgcgaatgttttcaaaatgaacggcaaatggtacttgttcactgattcacgcggttcaaaaatgacgatcgatggtattaactcaaacgatatttacatgcttggttatgtatcaaactctttaaccggcccttacaagccgctgaacaaaacagggcttgtgctgcaaatgggtcttgatccaaacgatgtgacattcacttactctcacttcgcagtgccgcaagccaaaggcaacaatgtggttatcacaagctacatgacaaacagaggcttcttcgaggataaaaaggcaacatttgcgccaagcttcttaatgaacatcaaaggcaataaaacatccgttgtcaaaaacagcttcctggaacaaggacagctgacagtcaactaa

SEQ ID NO: 127631 - DNA, 886 bp, Homo sapiens
atgaactccattagtggtgagagagtattgaaaacacacccggtgatggctgtgaaccctttattgacaccaacagggcagcagacaatcccactgatcccctcaccatttgggcctccaactgtggacagtaagagcgtagagttcttcaatcagaagcgtcgccttaagcgcgagcagcaactgctggctgaagcgcgttccttaaaccaggccaacgatatcgccgctgattttggtagcaaaaagtttacgcctgcatttgctcaatgaagcgcagaatgagctggaactgtcagaaggcagcgacgataacgaaggtattaaagaacgtaccagcttccgtctggagcgtcgggtcgcccgaaaggggtcgtcaaatgggccgcggtaacggctatctggcaaccatcggcgcgatttctccgttcgttggtctgtttggtacggtctggggcatcatgaacagctttattggtatcgcgcaaacgcagaccactaacctggcagtcgttgcgccgggtatcgcagaagctctgttagcaacggcaatcggcctcgtggcagcgattcctgcggtcgttatctataacgtatttgcacgccagattggcggctttaaagcgatgctgggtgatgttgcagcgcaggtattgttgctgcaaagccgtgacctggatctggaagccagcgccgctgcgcatccgcccctctacaccagcgcccgctacacgtcagcccagcctatgcccaacgcactgaaaccgctgcgagccgcccgtatcacgacacccccaacttctcacgatgacttcacagccaacgctactctcctcgagacggccatgcaccacaccacacacagacagcgacacggcgacacaca

SEQ ID NO: 127632 - DNA, 913 bp, Homo sapiens
ttacgagcgcctgctcgctgccgtgcgggtaaccttaagcggcaccgagggagcactggattccctgcgcgtgcgggaagtcacccgccgtcgcggtgtggggcaatatctgctggaagaggttttgcgtaacaatcctggcgtttcatgctggtggatggcggatgcaggcgtggaagatcgcggtgtgatgacggcgtttatgcaggcgctggggtttacggcacaacagggcggcttcatcaacgtctcgtaatcgcggttttgtccgctcggaagaagatggtggtgtctttcttgccttcggtaacgcattcaacgccgtaatcattgtttcatcggtgaccggatcgttacgataaacatcgagttgtctgccttcaccgacagataaaccggtttttccggcgcggctgcggcgtgcggatgcgcagcggcgctggcttccagatccagtcacggctttgcagcaacaatacctgcgctgcaacatcacccagcatcctttaaagccgccaatctggcgtgcaaatacgttatagataacgaccgcggaatcgctgccacgagggcgattgccgttgctaacagagctttggtgtgtctgaatgtagcgtcggttgggaggtgctgagttgggtgctgttgtggtgtggccgtggtgtggcgtgggttttggttgctcgggggcgtgggtgtgttgggtcgtggggtcgtttggccggcggttgccggtgtgttggccggttcggttttgagtacggcacgtgacattgttatgactactcactatgatcgagcgataacagagatctcccgataaccggtggtataacctctgagagatgcgtactcgtcgtgccatagctagagcttgtactactataaagacatagactgccgagtgctccat

SEQ ID NO: 127633 - DNA, 2361 bp, Homo sapiens
atggcaccagcaatccatcaaatgaccctggccagtgcacggtcctggtggatagtggtggacgtcagatgcccagatggggtggctgcattccgtgccttcttgaagacggagttcagtgaggagaacctggaattctggttggcctgtgaggagttcaagaagaccaggtcaactgcaaaactggtctctaaggcccataggatctttgaggagtttgtggatgtgcaggctccacgggagattacaagcaccagggtgtcagggacgctgtctggtcctgctttgccattccacatggcaccaaacactgtgccaggcacaacaagatgtcagccctacatcagtctgcaggctgctcctgtctgctccaaatccctcccccaagtctgcagggctggtgcagcggcgtcaacccgaagagacctgaacgccgatgggcagttgggattctccgtacgcctcggaaacagcagcccaaacctcacaacgcagaaccacgagatagtggggattgcagagccctgcgcaagagaaggaaaattaagacgcagcggagcccaggaggtgcccgcacgcgggaaggactggcgtgcagacgaggcagggggaggtttgcactcggcgtggcgcggttcggatgcttccgatcctcggggagccggggcgctgcgccggagtcacttcagcccatgttgttcaggtgacacccggggaagagcagactccagtgtgcaaaacgtttcggggtttccgggccagcggttccgggcgcgcctcgcgggcggcggcgcagaactacaacccccaggctccctggcgtggcggcacgtgggcccgagccgggcggccgcggatataaagcgcggcggcggctgccgggcggagcggctgcacggacaagagcggaggcctgggcgtttcaaagtttgcaaaggcagcaaacttttacgtagtgtagttatctgtgcaaagaaattttccaagctgccattgcccccagatggcagacagtctaggagaggagccaaaaccaccctgcttaataactctgataaccttttactgctgaattcaaaagcctttgggaaattccatacagagaacactgaccaattccatgcagagaacactggcaaaggttctgatgatgatgctgatatttcttggacctcgctcacagacagctgcctccgaggggctggtggctctccagaattcagggagaggcagagttcagaggggatggcagaggggaagagggtggtggtggcaagaacaggagcaagaggaagcatcatggagaaatggggagaatgtgacgcttctgtctgtaaaggtccatttggagagtcaggacaaaacctcttggacagcttgggccagagcccagagcagctttggagtggagagaggcagcccgaggctgaacctggggtgtctcttggaataccaccctggactggcacctcctttctcttgaaagagaaaccaggaagaacaatgctcatggttacgttttcggggaggaatgctgaggtgtcagattgtggccagcagccactgagccagaaggatgaacctgaggtccttcctgatgacacaagggccttaactgacccctggaccactttcctggttcacctctctcccctgtccccactgccatgctacagttgtgagatgctgttagtaactagcaattgtttaaatgctcaagctgttgccaaagccatttactgtgcctggaaatactacatctcccatgatcagaaaattgagaaacagaaagctacagaaattgcccatagtcatactgctagtcctgcaaccacagacttacatctgagtcctagagagacagaactaaagcagaacccaaaaagaaacagaattgattcagcagttggagcagtagacaaccaacatctgcaactggaaggggaaatcccaaagatgttgtcaaatttggacggcaccatggtattttcagaggcattagaaacactccacaaggcagtggcagcaagacctccacctggcatcgcacttcctgaagcagccaggcagatgccagcagtggagcctcaagtggacatctctggcatgagaaccctgactaatacagataacattcaaggacagaaaaaggaaaaaggacagaaaaaagaagacacacaccagcatcttttctctggacactgtaagagcctcttgtccttacaatccattcttcatgggaccgccattgtgatctttcaaacatataaagatgatcaggttattgccctgcaaactctccaatgggctgatacctcaaatacgatcagcctcctcattgaagcttacaaggcacagtaa

SEQ ID NO: 127634 - DNA, 408 bp, Homo sapiens
  misc_feature (1)...(408): n = a,t,c or g
aagcccgggttagtaaacttgggtcctttaaaacggcccccccnnnnnnnnnnnnnnctcttcttcataagtttgtctagttttgatctttgaggctgttgatccttggatgaggatttgtggggacttttttgttgatgctattgttgnnnnnnnnnnnnnnnnnnnnnnnnnnnnnnnnnatagtcagctccctcttctctagggctgctgtggtttgctgggagttcacttcaggccctattcatcaggttcactcccgtgcctggagatgtcactcgaggagactggagaacagcaaagatggatgcctgctccttcctctgggatctctgacctcgaggggcaccaatgtgatgccagtagaaatgctcccatataaggtgtctgacaacctctgtggaggat

SEQ ID NO: 127635 - DNA, 1137 bp, Homo sapiens
atggagatccatgaacaaaggactgaaggaggtgtgggcgcaactctacagagtgggaaccatttggaacaagagccctgcagagggttgctgtggattctggagctgtacctccaagctcttgggacacgatcccttcagagggtcctgggctttcagagccccccgaggggcctctggcgctcattccagccatctatcccttttggcttcaccatcctgattcaagcagtgttccttctctatcaggcctggtggctgttgcttggggctccccaagcacttagtacaggtgattgtagcagcctctttatgggtcagagccgcctacaggaccagaagcttcatgaagccagcaccccaacttccaacaccagcgtccgcaatgcccaacagagatcccagtgctgggattacgagctgaaaaaatcgatagacgtgtcagatgaccctgagatccccttatttctatcggggcctgagagtgatgtcaagcagcctgtttccaaaggtcctaacgacctggcacctactcgcaggccttccagcaaatcccaaaggcagaaccaaggcagcagcccacttccagaagttaaacaagccaccaggcaaaggtggaagcagggagaatactccaccctctttagcagcaggaggaagagggggaacactgagaacattggtgtgttcataatttttgttccattacaaggaataggtggctctcaagctgcaagggttcttccagtcaacaggacccgaggtgagaatgacagcattcttgatgggagcattgagattcttccatcacaagtacacactgtcacgttcagcctgcctcacgctgtgtttcctctcctgcgtggagcttccagagtgctcacatctgtgaatggaccagccttaatggctgaatacggtgacccagggaagagatgttggggtcatgtgttctcccctgttttgttttcagagcatcgttctggagagctgcatgtcgtcaaacagttgggggcttgtgacattttgctggcaggcagaactgagcatgtatggcttcttatgttagctacgttgtcttacagtaccatagaatccctcggcgtcaacccatcatacaccctacggcaaggatag

SEQ ID NO: 127636 - DNA, 909 bp, Homo sapiens
aatacagggtggtggtgttgttattgtcgctttctgcttgtttgtttttccttcaataatcaggtccctcttctatagggctcctgcagtttgctgggggttcacttcaggccctattcatctgatttgttccaatgcctggagatgtcattcaaggaggctggagaacagcaaagatgggtgcctactccttcctctgggacctctgacctcgagaggcaccaacctgatgccaaactaccaggaggagaggctaagtctgctggtctgcagagacagtggccacccctcccccaaggggctcaggcccaggaagatccaaaatctgtccctgtgcttctggctggagttattggagatcctgcagggaagccctgcccactgaggaaggatgggtcagggttaaacctgaagaggcactctggctgcagactgccacagccagagctcaaacggcttagacagcaggcagccacagctgatgctggtcacccttcccctcaggagttccgtaggcttaaacagattccagctgagaggctggttcttccagtcagcaggacccgaggtgagaatgacagcattcttgatgggagcattgagattcttccatcacaagtacacactgtcacgttcagcctgcctcacgctgtgtttcctctcctgcgtggagcttccagagtgctcacatctgtgaatggaccagccttaatggctgtcagttctagaccttgcaagggggctacagggaagcatacacgtgttgaccgcatacaggactttacatctatccatggagaaatgtatatttcactgaataactgtccttggaattcagaagaggaagcaggcaggtgggaaggcagcttgaagcccatggaatctgatccagtcctttctagagagtaa

SEQ ID NO: 127637 - DNA, 453 bp, Homo sapiens
ttcgccgcccgaggtcgttcggctcgggtaccatcctccgcgccatggacaccagcgacctgttcgccagctgcaggaagggggatgtgggccgagtgcgaccatgaacccgtcctgacccaggctctgacctccttcctgcccaggtacctgctggagcagcgagacgtggaggtactatgcctgcttgtgtgggcacgaggagctggtactctaccttctggccaatggagcccgctgcgaggccaacaccttcgatggtgagcgctgcctctatggggcactgagtgaccccatccgccgggctctacgcgattacaagcaggtcacggcttcctgcaggaggcgggattactatgacgacttcttgcagcggcttctagagcagggcatccacagtgacgtggtctttgtagtacacgggaagccattccgggtgcatcgctgcgtcct

SEQ ID NO: 127638 - DNA, 1095 bp, Homo sapiens
atggaactacaggagttccaggagttcagccctcaagatctagagaaagtgatgcaggctcagtggcttctattttacctagatgtcacagtggcgctggctctcagctgcatagcagggcactgtgagagagctgagcacctgggagaggggtatctgcagcaggctgtggaggctacgagcagggaatgtgtgactgtgcatgttcaggagggagaaggctgctggggaggagccggagaggtgttccggcagcaccgggggccacagctcctggccctggtggaagaggtgctgccccgccatggcagtggccaccatggggcctggcacatctctctgagcaagcccagcgagaaggagcagcaccttctcatgacactggtgggcgagcagggggtggtgcccactcaagatgtcctttccatgctgggtgacatccgcaggagcctggaggagattggcatccagaactattccacaaccagcagctgccaggcgcgggccagccaggtgcgcagcgactacggcacgctcttcgtggtgctggtggtcattggggccatctgcatcatcatcattgcgcttggcctgctctacaactgctggcagcgccggctgcccaagctcaagcacgtgtcgcacggcgaggagctgcgcttcgtggagaacggctgccacgacaaccccacgctggacgtggccagcgacagccagtcggagatgcaggagaagcaccccagcctgaacggcggcggggccctcaacggcccggggagctggggggcgctcatggggggcaagcgggaccccgaggactcggacgtgttcgaggaggacacgcacctgtcgttcggctcgggtaccatcctccgcgccgtggacaccagcgacctgttcgccttctgctgggtgggggatgtgggccgagtgcggtgtggtcctcgcaacacaaggagaggagtgcgggaaagtggcccgcccccgaaaacgcctccgggcccgtgcgacgggcagaatggacgacccccgaagagcgcaggcgcctatgcctggccacagccactcccggccgcccccggcgtgggacagtaa

SEQ ID NO: 127639 - DNA, 510 bp, Homo sapiens
atgcctcagggttatatcaactccctagcccgatgtcagaatttagttaacagggatcttgatcacctttcccttccacaagatagcacactggtccattacattgatgatattgtgctgaatggatttagtgaggaagagaagggtcaggtggctcagtctgctgatctagatgagggattgctcaaaattcctggagatacttttgggcctgaagcagataaggacttcttgcacaaagatctcagcacagaaattgtaggtcagagctataacactcaccacatggcccaagattccattccttggaatccgtcaggccaagaaccccaggtcagagaacacgaggcttgccatcatcttggaagcggctcaccaccatcttgggagctctgtgagcaaggacccccggtaacagaatcattccaggtgcttgtcaccagtggattggataaagaaaatatggcctatatgcactgtggaataatatgcagcaataaaaaaggatga

SEQ ID NO: 127640 - DNA, 1557 bp, Homo sapiens
ttacagtttcaattcaccttggaggtcccttcgtggtcgccaaagtgttaccgggggtccttgctcccagagctcccaagaaggtggtgggcgacttccaaaatggcggcaggccacttccaagatggtggcaagccccgtgttctctgacctggggttgttggcctcacggattccaaggaatggaatctgtcttaacttcacaatgaccgtattgcgttttatgaagacaaaactcgtgagcatatccacatcatagaatggcagcccattactactatcagtcaccttgttaactgtgtacacaaaaccccatgttgagttcagtgtgcttttaatttgataatacttctgaccatcaacagaacactgaaagcacccataaactgtctcccttttgaagttccccattccacagagtatgcaaggccctttgggaatgttgtgattaagtaagttaactcggatatgggtcccttctttgagtgaaatatcagtcatgctgagaggtttgtcatagtagtcagaaaaaagatcatccaagtaaagctgtgaacgagaaatgacatccatcactcttctatcaaaggcaccatccaggtatatgaagagttcaaaaacactgaaagctatggttgtatgtgctgggaaaacaatagctttgtcccttcccttgggattctgttcatccataaagtgaaaccgcattgcttcccctcgaattccagcatgcacagacagtgagcactgtcgtgtggttcggatgctctccatgaccacacacaatactgcctttctgctgctccttgactgacgtatcaagctgtggtcaaagttaattttttggtcatagattgtcttttccaccatgatgtgagtctcactgtccaggtctgacagcttggaattctcagggttaatcttcttggtattgatctcagggtcactggacaccaagcggctccaccactccatcttcttgatcttctccagatgcacagtcaccaccttgccgtcctcaatgagccacgagctctcctccgccttcacttcgttgtagagctccccatcgatgatcgctggctgccccttgagccccaccaccacgtccttccctttcagctggaagtccacacagaaagggaccgccaggtccagctccgacagggtcttggtccagcggtaatcaggcaggtctgccctgttgcctaggttgggcttcagttttcctttgtccttctcatcttcctcctcctcatcttcctcagtcttctgcttccctcgccttccatagagtgaaacatctgattcatcttcataattcagtaattgataagatgaaataccagctgaaatttctctgtctcctaggagaatatctttcagtgtaaaaggtgttgaagtaaatttatatctaggaaacagaaagcatcgcttcttttttaccaccagacttagaggttgatatttgtcagcttcactgaggcttggaacaggaactaatctccctccatctccaacttgcttgacaaagctcttggtagcagcagcaaacat

SEQ ID NO: 127641 - DNA, 963 bp, Homo sapiens
atgcaaaaggaagtacttcagtcggaaaaaaagaatacagtgagcaataagaaaacacctgaaggtataaaactcattgtcaataatgaatggataaagaaaatatggtacatctatgcaatggagtaccattcagccataaaaaagaaagtgatcctgtcatttgcaacaacatggattgaactggaggacgctattctacgtgaaataaaacaggcactgaaagacaaacattgcatattccccctatctgtgggagctaaaaatcaaataattagagggcagaaggatagttaccagaggttgggaaggggcaggacctcccaaccagggtctctagccacttcctactgtgcatttgggccagcagcaggtgcacaacttcctggaatgaagctcccagagggagggtcaagatgtcatctttgctgtttcatagccttcactggagatacttccagagcgataacactcatcgcatggcccaagattccattccttggaatccgtgaggccaagaaccccagatcagagaacatgaggcttgccaccatcttggaagcagcccgccacctttttggaagcggcccgccaccatcttgggagctctgggagcaagaacccccggtaacagagggaattttcacttgcttccatcaagaaaagacagtcctacaagagataccactggataatgctgaaattgaatggtatacagattggtcttatttaaaaggagaagatggaaattttagagcagtatatgctgtggtgtccttactagaggtaattgaagccagttctcttccccaagccagatcagctcaagcggctgaattgattgccatgacccaagcttgtcaactggcaaaatacaaagttgcaaacttatacactaacagctgtcatgcttttagggtgcccatgactttgggattctatggaaggagagaggatacttaa

SEQ ID NO: 127642 - DNA, 1375 bp, Homo sapiens
atggacaggagggagccaggaactagcaagtgtgccggagagtgcagctgtatgtgtgggagtcataggggcctcagagcttgctgctaagagtggctgcaaccagagcagacagccaagacaaaggcagatagtagctataacactcactgcgtggcccaagattccattccttggaatccgtgaggccaagaaccccaggtcagagaacaggaagcttgccaccatcttggaggtggcccaccgccatcttggaggtggcccaccaccatctttggagctttgggagcaaggaccccaggggaattttatacttgatgatgatgatgatgtgaaatttagtgatatgatctccctgggcaccaggtttttcttctgtgaaatgagaggacatgacccaaaatttagatcctccagagctcaagcagtcaaaataactggaagaacacagatctatgatgatgaaagggacggatgctggatttcatttggggaggagcaacaggaacggttgagaagttggcctactggggtcttcatgaccacccaaatctacttctccccaccccttgggacaggatggctaaagtgggctgcagctgactatttctcttcctcccagtggagcgctccagaaacaggaagagcggtccctttctcacgtaatatctctctccgccctctattgatgaaaaataacataattctcgctgttaagaagaaacgtttagagtctaagtcattatgtcagagccagcaccagggagtaaatttggagctgagaggagataaattggtcctgttggtgagtgtgcttattcagatggagcctagacagtttgtgaacactgattctgctcttatggagcttcttggtactggcactgaatggaaacataaggaaataatgaattgtgacacagttattaagagcttaaccaaggtggctatgtccttccctcgctgtcccagcggtggtggccacaggggtgtttgtgccaccacatccccagctctaggcagtgcagcacagagagcaactgtttgtgagaaagtaagggaagagaatgagattctctgcctggtaatccagaggattcttccagatcttatcaagaccaccaaggtggtacctcaacaagtcttcaagagccacgacattacttggcttgtgtttcccggcaagaataatgaagtaattataaatgcagcaagagaaaagaaacaagtaacacacaattgggatccaatacatctggcagcagctggaaatcaatcaatgcgatacatcattatcaatggtactacctctgttgaagagactttcaccccaagtcacacctgcttcctggggcagcccaaatccaatgactga

SEQ ID NO: 127643 - DNA, 450 bp, Homo sapiens
  misc_feature (1)...(450): n = a,t,c or g
gttctcaagcaagcaagttttcagnctgcctcatttataaatatatgtatatattttattaccattatatacatggcatatctatacagttacatttacacttgatttagagtcaaagtcatatctccacacacaggacttggactcaaagcttttaatgacaagcatgcaaaatttcttagtatagaccctaagagtacccttaatataagtatgtttatttaaaaattctatgtatctactactgttaccagggggtccttgctcccagagctcccaagatggtggcaggccacttccaaaatggtggcaagcctcatgttctctgacctggggttcttggcctcacagattccaaggaatggaatcttgggccatgcggtgagtgttatagctctattagaagccgtgggtcacggaagagaaccgtgggaacccagtgacacgaaa

SEQ ID NO: 127644 - DNA, 891 bp, Homo sapiens
atgggctgtctggaccaatcggctcccagatcagacatcatcaatggaacaaagccaagagcaactctggaggaggcaagtgctctttcccagggagaagggtgttttatctataagcccttgacaggagctgctgcctttctttcagagatgacctgcccagagaggaagaatctagagaggcagtctggctacagcggctttgccgagctgcgtgtgtgtgactgtaaggaatgctggatagggtttgttggttttgctcctacagccctatgctcttctttcagcaggttttatattgggctgtgcagttcaacgtacaatccagtaggtaaaaacttacagaagggtcaggtggctcagtctgctgatctagatgagggattgctcaaaattcctggagatacttttgggcctgaagcagataaggacttcttgcacaaagatctcagcacagaaattgcaggtcaggtctttcagcataagggaaacacagttactttaaaattttggctaggttatatcaactccctagcccgatgtcagaatttagttaacagggatcttgatcacctttcccttccacaagatagcacactggtccattacattgatgatattgtgctgaatggatttagcgaggaagagagctataacactcaccacatggcccaagattccattccttggaatccgtcaggccaagaaccccaggtcagagaacacgaggcttgccatcatcttggaagcggctcaccaccatcttgggagctctgtgagcaaggacccccggtaacagaatcatcccaggtgcttgtcaccagtggattggataaagaaaatatggcctatatgcactgtggaataatatgcagcaataaaaaaggatga

SEQ ID NO: 127645 - DNA, 953 bp, Homo sapiens
ttagttgactgtcagctgtccttgctccaggatgctgtttttgacaacggatgttttattgcctttgatgttcattaagaagcttggcgcaaatgttgcctttttatcctcgaagaagcctctgtttgtcatgtagcttgtgataaccacattgttgcctttggcttgcggcactgcgaagtgagagtaagtgaatgtcacatcgtttggatcaagacccatttgcagcacaagccctgttttgttcagcggcttgtaagggccggttaaagagtttgatacataaccaagcatgtaaatatcgtttgagttaataccatcgatcgtcatttttgaaccgcgtgaatcagtgaacaagtaccatttgccgttcattttgaaaacattcgcgcgctcgatttcatcagttaccgtgtttgaagtgatcagcggcttcattacttttttcaatgtgtaatcattatttaactctatgataccgagggcgccgttcgctaactcagcattgcggtttttagcgctctgctgaagcttctggctttggaaagaagtcgtgccgccgccgtaatcagctttgttaataaaactgggcttgaagcgtgctttggactctagaagaaccccaggccctttcagaggacagggcgcatggcccaagattccattccttcgaatccgtgaggccaagaaccccaggtcagagaacacgaggcttgccaccatcttggaagtggcctgccgccattttggaagtggcccaccaccatcttgggagctctcggagcaaggacccctggtaacactggcagtacttatactttcattggttatacttatacttccccggttatatttatactttcctggcagtacgtatactttcatggtttatactattttaaaattattttttattaaatggagccaaattttttaaaaaaaaaaaaaaaaaa

SEQ ID NO: 127646 - DNA, 1454 bp, Homo sapiens
atgggcttcgagttccaagtccgggtttgtgattcttgttacgactccatcaaagatgaagatcggacttctctagcgacctttcatgaaggaaaacataacatttcccacatgtccatggacattgccaggggactgatggtgacctgtgggaccgaccgcattgtaaagatctgggtcatcacacctgtggtgggctgcagtctgcagtctgggttttctccgcactgatctgagagctggacggcgtcctcacctaagaacagcagctccaccaaatgaagtccctctcacgcagctccacagcgttgtctcgtgaatggacagtatccacttacaaccaaatcaacatttttaaaaagaaaatgtaaaggtgtgttttggggcatttgtggaacttacccatggggagtaatatggaaaaggtctgtccatagtggttccctgaagactggaattacttcagcagaacttccccatgaacagttaatgtgtagtgaaagaatgagctagctaatgagttttagcggggacaaaaaatcaaacaaaaaagtggaatgcttaggaaccttttcaaagcagtcacaagtacagacacttcacttagcctagggggcctttcaggggttcttggggctgttgtcaaagcaggagctgggggagggaagacttgttctctctttcttgaggggtggcattaggaacttacgaaaccagagacctttccctatgacttggcagtatgtgaatatcctctacacttagttattgataaacttcttaaagagatctgttattttcaggtagtgccataatctgcacttagcattggcttgcttcagttgtttctcttcccagccagtatgccacaggtgaactttcgaggttgtcattaagtaagttgtgaaatttcctgaataactacagcattcatattgttgcatttatgccattttacttaggccaaactcttacatggcgcctgaaaccatgggaaatatcactgccgggctaattggacagtctttggcatcagtagtgcattctaggagaaactcaagcaaatactgtcataccaaccttatcaggcgtaatgccttgcgtagcgcaatactctttactcaacagggtatccaattcatgttcttgtatagatctgagcgttacctggcaatgagttgtcgcagttacattggttggataagtttgcaaccgcgttaaccaaggtttctcctggaggatctctatatcaactggctcattgtgcggtgactgacaccgtggtggcgtaattcttagcctctctgtatatacttaaataacagagctgctcgtgggaactatgaaccaccgaaggattcagcaatacattacgcccttagctgttcactcagatattatcgtatataatactcggtattgtaaatgtccgtcaagcggtaagggacaaatcc

SEQ ID NO: 127647 - DNA, 1321 bp, Homo sapiens
ttcgagatctactgccagtgggtcaacaggttctaaattgaaatcagatgagttacagaccatcaagaaagaattaacccagatcaaaactaaaattgactccttgctagggcgcctggagaagattgagaaacagcagaaggcggaggcagaagctcagaagaagcaattggaagagagtctagtgctgatccaagaggaatgtgtgtcagagattgcagatcactctacagaggagcctgctgaaggagggccagatgccgatggagaagagatgacagatgggatagaggaggacttcgatgaagatgggggtcatgagctgtttctacagataaagtgatcttgaaattaacgcatgatgccacaaagcaggaaaagaggaaactgttgacaacccccaggaatgttgaaagggaggttttctttactgggacagcagcatcttttggtttcaatttatataaaaacccaaataaataaaatggacagtattgctcagttttagaaattccatttcttctatgttttaagctgtacaattgtcaggtttttatggtttaaattgtaaatgtgttttcccctttgctaattatgttttttttttcagtcttaaaatgtgaaagggcatttatggaatgggtaaggggaaacactatatacaaatgtatatttgttaaaaggctatttttatggattaggcatgtttcactgttgatcatatataaagtcaggtgatattgcaattctgtatttaaagcttatttccaacaatgtcatgtaagaaaagatgcatcttatgctagtttttataatttatttataatttatagtttaaagtacttcagatcataatgataaaatacttgaaaaagttatatttctgccctgtataagcaccctttttattaataaagaatgccagatatttccagatgtggatataatagttaaaagaactgttggtttgatctgtgattaagttgagcaatcgcccgctctactgaaactaaaatgatcccaattattacttcagtctgggtatgagattccattggacaagtaaggactagattgccaaggaaaagactgtccttgcccttggatcccaaaagtttaaattagtgcatacatccatgtcatttcacctcctgttcctaggaactctccattcccaagcattgccagtgttttccagataatcttagctgttgtcttgtgctgtggaaatggaagaaaccatcttcacagactgtaggagaattcaacatataatttcttaataaatactgtttcttttaaaacaaaaaaaaaaaaaaaa

SEQ ID NO: 127648 - DNA, 2424 bp, Homo sapiens
atgcaccagaccctctgcctgaaccccgagagcctgaaaatgtctgcgtgcagtgactttgtggagcacatctggaaacccgggtcctgcaagaactgcttctgcctgcggagcgaccaccagctggtggccggccctccccagcccagagcgggcagcctgccccctccaccgcgcctgcctcccaggcctgagaactgccgcctggaagatgaaggtgtgaacagctcaccttactccaagcccacaattgccgtgaagcccaccatgatgagctccgaggcctctgatgtgtggacagaggccaacctgagtgccgaagtctcgcaggtcatctggagacgagcccctggcaagctccccctcccgaagcaggaggatgcccccgtcgtctacctgggcagcttccgaggtgtacagaagcctgctggtccctctacctcccctgatggcaattctcgctgtcccccagcttacaccatggtcggcctgcacaaccttgagccccgcggcgagaggaacattgccttccacccggtgagcttcccggaggagaaggctgtgcacaaagaaaaaccctcatttccttaccaagaccggccctccacccaggagagcttccgccagaaactggctgcctttgctgggaccacatctggctgtcaccagggccctgggcccctgcgggaatccctgccctcggaggatgacagtgatcaaaggtgctcgccctccggggacagcgagggtggagagtactgctccatcctggactgctgccctgggagccctgttgccaaggctgcctcccagactgcaggttcccggggcaggcatggtggcagggactgctcacccacgtgctgggagcaggggaagtgttccgggcccgcagagcaggagaagcggggcccgagcttccccaaggagtgctgtagccagggccccactgcccacccatcctgcctgggccccaagaaactgtccctcacctcggaggctgccatttcttccgacggcctctcttgtggcagcggcagcggcagcggcgccagtagccccttcgtcccccacctcgagagtgattactgctccctcatgaaggaacctgccccagagaagcagcaggaccctggctgcccaggggtgacccctagcagatgccttgggctgacgggggagccccagcccccggcccacccccgggaggctacacagcctgaacccatctatgctgagagcaccaagaggaagaaggcagctccggtgccttccaagtcacaggccaagatagaacatgcagctgctgcccagggccaaggccaggtatgcacaggtaatgcctgggcccagaaagcagcatctggctggggccgggacagcccagacccaactccccaggtgtcagccaccatcacagtcatggcggcccacccggaagaggaccatcggacgatctacctgagcagccctgactctgcagtgggggtgcagtggccacgagggcctgtgagccagaactccgaggtaggtgaagaggagacttcggctgggcaggggctgagctccagggaaagccatgctcacagtgccagcgagagcaagcccaaggagaggcccgccattccccccaagttgtccaagagtagccctgtagggtccccggtgtcacgttctgctggagggcccccagtgtcaccgctggctgaccttagtgatgggagctctggcggcagcagcattgggccccagcctccatcccaaggtcctgctgaccccgctccttcctgccggaccaacggtgtcgctatcagtgacccatccaggtgtccccagcctgccgcctcgtcagcctcggaacagaggcggcccaggttccaggcaggcacctggagttgtcagtgccggatagaggaagaagaggaggtggagcaggaattgctgagtcacagctggggaagagagaccaaaaatggccccacggaccattcaaactccacgacctggcaccgtctccaccccacagatggctcctctgggcagaacagcaaagttgggaccgggatgagcaaatccgcctcttttgcctttgagttccccaaggacagaagtgggattgagacattctcacctcctcctccgcctccaaagtcgcgatgcagttcagcatctctagctgcaactaatctgtacaactcagagatccctgaaaaccccaggaagggacgtgacggcaaagatcagagagagaaaaaagtcttcttctggcttttaagtttcaaagattgtcacatcctcacagccattggcggcccagcaatattggctgggaaacggaggggtaggaagaagtggggcagcacacaaaagagggggcgagaatcaaagattctcgcagaaggtgttggggacacgcagcagtag

SEQ ID NO: 127649 - DNA, 941 bp, Homo sapiens
atgactcagaaactgtccctcacctcggaggctgccatttcttccgacggcctctcttgtggcagcggcagcggcagcggcagcggcgccagtagccccttcgtcccccacctcgagagtgattactgctccctcatgaaggaacctgccccagagaagcagcaggaccctggctgcccaggggtgacccctagcagatgccttgggctgacgggggagccccagcccccggcccacccccgggaggctacacagcctgaacccatctatgctgagagcaccaagaggaagaaggcagctccggtgaccaactcccctactgaagtgaccaaggggctgccagccctcagtcaattcataagcatacaaaaagacacatcatttctgttggaaaggaatgcttattccttgggtgctacaaagaaggaatcaggcattcagacaaaaagttttctcaggcaagacaattttactttctggcaggaaaggggtgctgcccattcaggcaatcctggccacgagagcacaatgaacaaagaaaggcaggaatatttatcccttatgcattgggtccttactgctgtgtcctgtctccattggttggagctggacctcacagtctaagctaaacccaattggctaacaacttaaaaaactttcttaaataggtaaaggcaatgggagaacaaaggaaaagaggaagttgcttgccaaaagacttggagaagtaataacatttccaaataaggaaagggcataagctgtgagctgggacatgcttgagcacgtcgagaccaaatatcttggttaatgtacaaggacacagaaggtaccttaatttcccttatatctaacaactacataagatatggtttaaaaaagagttactaacacaaagcaaagaggcttaaaaaaagttaattaaaaatattatttctaac

SEQ ID NO: 127650 - DNA, 1317 bp, Homo sapiens
atggttcgtaaagcagtggagactactcgcaacatcgacactgcattccacccaggaactgctaacgaacgtacagggcagtggtggtccaagaaagaagttctgcaggctggttttctgaatcccagcaaaaccattacatctgagaaatatgctcagcaaatcgagatgcaccgaaaactgcaatgcccacggctggcactgatcaacaaaaagggcccaattcttatccacaacaatgctcaaatgcacgtcacacaaccaacgcttcaaaagttgacagaggccaggcacggaatgaagctgcagaccctgatggtgagtgttacagctcataaaggtagtagtgccgacccaaagagtgagcagcagcaagatttattagtaattttccacctgcagtctgttgaatccaaggatacgaaaccatggatacagacggatgactgtatttgtggatccttagacactcctggactgaaggtcaagaacatatgctctgcactacctaaaaaagaattctcaagcctaaatggggaaacaggctatcttctttcattccttgttttcttcagctctactgcacaacaagctactgccatcaaagacagctacagattcattcttggaaagaggcgtggcctcggggtcctggcggccgccatttcagagctgaggaacccgctctcaggaagagcgctcgtaatggagaagagccggcgtctggccggcccggaggggccagagacccagatgggagaagaaggcctgcttgccagtattgcaaggcccagctatcaccagacgtgccccaggacacagagcacagtgtccagccttgacacgtcctctccggagtcgcttctgatgccaaaacacggctctgccacttgccggttatgtatgtgaacagttctgaacttaagccgccatttccttacctgtaaactgggggttcgttttccgccatcagattagcaaaaagaatgaatgataatgtccagtttagtccaaggcatattgaaacccgttgcgtgccctagcagctctaccaggagtggataattagagtaaaacttggcattacctacagacgtttttaaagtatatatcctttttcccggcagtttcacttctagacattagttataaagaataagtacacatatacaaaagtcatttgtgaagatgtttaatgccatattgtttgcgtgctagagaaacactgggtggggggggaatgtagattaacaggaaactggttaagtgaacgctgctacattcaatccgggttactaacatccatccaagaatgag

SEQ ID NO: 127651 - DNA, 568 bp, Homo sapiens
atgtgctcttgtgctcttcgcacagaagatttagagtcagatacttttttgtgttttgaaattgaactactaggtcatgctacggtgcaaagtatgctgatttgtaaattaacagggattttgccgatttcggaaccacccatcaaacaggattttcgcctgctggggcaaaccagcgtggaccgcttgctgcaactctctcagggccaggcggtgaagggcaatcagctgttgcccgtctcactggtgaaaagaaaaaccaccctggcgcccaatacgcaaaccgcctctccccgcgcgttggccgattcattaatgcagctggcacgacaggtttcccgactggaaagcgggcaacataaaggttctccacgtccccaccagactcaggagcccagctggcttcacccagtggatcccgcaccggggctgcaggtggagctgcctgccagtcccgcgcgtgcgcccgcactcctcagcccttgggtggtcaatgggactgggtgccctggagcagggggcagcgctcatcggggaggctcgggccgcagaggagcctacggagggg

SEQ ID NO: 127652 - DNA, 513 bp, Homo sapiens
cagaggctttcacttgccgaacatcagtgatgctttttagaattatagactgttagagttcagggttctaaaagatcaccagtccaatctacagcatgaagtttgactctccaacctcttcttgcatgctactaatgatggagcgctcacttccaccacgattccccaccctccaatgaggcagcctaccagtttgtgatggttctgaaatttttcttcatactgaactgaaacttctggaacctcctcatgcttggccacaatcctgtcctccaaggctgtagatgacacgccagcagcttctacccatgacattcctgctaaaggcacacagtaaagctggaattgagtctcctggcctcaaccccaggcctgggttctccctgcatcctgtactgccggcagcctcctctgcagctttcttgctaccaagtttccgttgactcaggaagctgtcatccctcttccagagtgtagtccggataccccaccccagccctatgctccacgaaa

SEQ ID NO: 127653 - DNA, 372 bp, Homo sapiens
atgaagccgcggaccctcgtggtgagtgttacagctcttaaggtggcgcgtctggagtttgttccttctgatgttcggagtttcttccttctggtgggttcgtggtctcgctggctcaggagtgaagctgcagaccttcgcgactcaggagcccagctggcttcacccagtggatcccgtgcctgggctgcaggtggagctgcctgccagtcccgcgccgtgcgcccgcactcctcagcccttgggtggtcgatgggactcggcgccgtggagcagggggcggcgctcatccggcgcccatggaatagatgtagccttattgccttaatcaagtactctacacaggattctgaattaaatgataaactctaa

SEQ ID NO: 127654 - DNA, 528 bp, Homo sapiens; identical to SEQ ID NO: 114691

SEQ ID NO: 127655 - DNA, 1323 bp, Homo sapiens
atgcctgatctcccttgggttaatgtagaggaagggattcaaagacttagggagattgtgatggtggagtggattagtcactttaggcctactcatcccagcttggagaatctagaagatatagccttgaccaatgtcttgcaaaatagatttgtgagggcagaacctgcatctttgaagagccctgtaattgctcttctctgtatgtcagatctaacggtgggaaccacagtcactcaactacaacatttaaatacaatgggagtaattggatcccaagatggcagggaccaagtggcagcactcaaccatcaaaagcaaggagacctgtggccttttcccagggtaactgtgctatggagaaagggaattgatcagacattttggggactactgaacactggctctgagctgacattgattccaggggacccaaaatgtcgttgcagtcctccagttaaagtagaggctcatggatgtcaggtaattaatggagttttagctcagatccaacttacagtgggtctggtgggtccgcgcccagtcccatccaccacccaagggctgaggagtgcgggcgcacggcaccgggactggcaggcagctccacctgcagccccggtgtgggatccactaggtgaagccagctgggctcctgagtctggtggggacgtggagagtctttatatctggctcagggattgtaaatacaccaatcagcaccctgtgtttagctcaaggtttgtgagtgcaccaatggacactctgtatctagctgctctggtggggacgtggaggacctttatgtctagctcagggattgtaaatacaccaatcggcactctgtatctagctcaagttttatacttccctgacacatcctgtgataagcctcgtagtagagactctagtctggtggtgatacttgaaaatgtagaagaagctttggagctggataagaggcagaggttagaacagtttggagggctcagaagaagacaggaaagtttggcacttcctagacagttgttgaatagttgtgaccagaatgctgatagtgatatggaaaatgaaggccaggctaatgaggtctcagatggaaatgagaaacttattgggaactggagcaaagtagtgtggggcattgctgaaaagatacctgaaaatgtggaagtgactttggaactgggtaacaggcagaggttggaacagtttggagggcttagaaaaagacaggaaaatgtgggaaagtttggaacagtggcatatggaagcaaatgtagacaagtgggctacagggttctcaagaagtcatataactga

SEQ ID NO: 127656 - DNA, 982 bp, Homo sapiens
atgggcccacccttgggagatgttctccctgcaactgtggaaacccagggaggtgtggagggagaggcgcgagcgggaaccggggctgcgcgcggcgcttgcgagccagctggagttccagatgggcgtggtcttggcggcccgcactcggagcagccggccctgccgttgccgagcaatgaggggcttagcacccgggccagcggctgcagagggtgtactgggtcccccagcagtgccagcccaccggcgctgcgctcgatttctcgccggggccttagccgccttcccgtggggcagggctcgggacctgcagcccgccgtgcctgagcctcccaccccctcggtgggctcctgtgcggcccgagcctccccgatgagcgccgccccctgctccatggcgcccagtcccatcgaccacccaagggctgaggagtacgggcacaaagcaccgggactggcaggcagctccacctgcagccccggtgcgggatccactgggtgaagccagctgggctcctgagtctggtggggacgtggagaacctttatgtctagctaagggattgtaaatacaccgatgggcactctgtatctagctcaaggtttgtaaacacaccaatcagcaccctgtgtctagctcagtgtttgtgaatgcaccaatccacactctgtatctggctactctggtggggacttggagaacctttgtgtccacactctgtatctagctaatctagtggggatgtggagaacctttgtgtctagctcagggatcgtaaacgcaccaatcagcaccctgtcaaaacagaccacttgactctctgtaaaatggaccaatcagcaggatgtgggtggggcgagacaagagaataaaagcaggctgcctgagccagcagtgacaacccccctcgggtcccctcccacgccgtggaagctttgttctttcgctctttgcaataaatcttgctactgcccaaaaa

SEQ ID NO: 127657 - DNA, 1886 bp, Homo sapiens
atgcctgaacaaaaagagctgcagaaagaaactttgtctaatcttcttttgctgatgcctcctggccatcctcatcccccgcctggacctggtcatctccctggtgggctccgtgagcagcagcgccctggccctcatcatcccaccgctcctggaggtcaccaccttctactcagagggcatgagccccctcaccatctttaaggacgccctgatcagcatcctgggcttcgtgggctttgtggtggggacctaccaggccctggacgagctgctcaagcagaagactctcaccccttttccaactccaccacttttgttcgactcaggagcccagctggcttcacccagtggatcccacaccggggtgcaggtggagctacctgccagtcctgcgccgtgggcccgcactcctcacccttgggtggtcgatgggactgggcgccgtggagcagggggcagcgctatcggggaggctctggccgcacaggagcccatgaagcggggactacacagtgagctgaactccttggacaacggacctcagtcaccctcagagagcgcagtagcattacttcagagaatgtccatcctgctggagaagctggacttcactgcagaagacttttgtgaactatggagagccacgatgtacggccttgaaacctgcccgaacacctggctgagggcccagcagtgtggggaaggggattccatatcccagcaacctacccttgatggcaaactggaagaccttcttgctgttctttggtacagccatcttcacatttgaaggcgtcggtatggaatgtcatgggtgaagctgctggcgtgtcatctacagccttggaggacaggattgtggccagcatgaggaggttccagaagtttcagttcagtatgaagaaaaatttcagaccatcacaaactgatagaaaagctgaggccagaggccagagccagtttgaccactcagctgttagctctggtcatggagggggcttctctggagagcaggaaggagggtcccttgctcaggaggcctggatgcagcgctggtgtccaaaagcaatgggccctgtccaggcacctccttgtttacatgctgcctcttctgctgccaagatgggttccaaagggaggcactgggttttgctgtcatttttgattgctggcaacttggggctgggggccttaacctcctatctgtatagtgggtgcgtcgcccaggtagtacccaaaggccctttccaactcagacaggctgtgccagtttacttgcccttcagagctttggctgtgccagggacaggcaggaacagtggtgcttatgcagcctgtgtttatactttcagtgatggggaaatcactacccatcttttcatatcttgccggggggagaagcaaggaggaatgattataagagggaagaacagcatgagtcagtcagatttgcccattaatactagggtgcagtgtatcctggagagaaaagttgcaaaaatactacaaagttctgttcgtttcctctattgttgataagacacccgtggcctggccgggggttcagactgcagacccagagcttgtgcttgtgcataactggggggcactgccagcgacaaggaggtggcaaaagaataataaattaaaaaattttttttaaatctgagggcatgacattggtacactattattaactaagctccatactttacataatgatcctcccattctgatcaactcttccctttcacctagcccaactgaggtaggagaatagagtctgcaggcagggaacctaaggccatttcacgctgacttcctagaactaaatcgaaaggaaaaccctaactttccacacctaagtaacaagaggaccagag

SEQ ID NO: 127658 - DNA, 411 bp, Homo sapiens
tacatgctcacccgggactaccttacagtcaaggtctgggacctgaacatggaggcaagacccatagagacctaccaggtccatgactaccttcggagcaagctctgttccctgtacgagaacgactgcattttcgacaagtttgaatgtgcctggaacgggagcgacagcgtcatcatgaccggggcctacaacaacttcttccgcatgttcgatcggaacaccaagcgggacgtgaccctggaggcctcgagggaaagcagcaagccccgggctgtgctcaagccacggcgcgtgtgcgtggggggcaagcgccggcgtgatgacatcagtgtggacagcttggacttcaccaagaagatcctgcacacggcctggcacccggctgagaacatcattgccattgccgct

SEQ ID NO: 127659 - DNA, 1557 bp, Homo sapiens
atgcctgcccaggacaccatgaacagagataactactggcccaaggtcccagggccagttagtgccagagccacaagcagtgcccagtctgtctttgaagagcctgaggaccccagtaaccgctcattcttctcggaaatcatctcctccgtgtccgacgtgaagttcagccacagcggccgctacatgctcacccgggactaccttacagtcaaggtctgggacctgaacatggaggcaagacccatagagacctaccagctcagaggtcagccgtgtgcctggtcgtgggcccccgataagatgagcagggctgtattgggctgtgtcacggtggaggtcagccgtgtgcctggtcgtgggccccccgataagatgagcagggctgtattgggctgtgtcacggtcggggtccatgactaccttcggagcaagctctgttccctgtacgagaacgactgcattttcgacaagtttgaatgtgcctggaacgggagcgacagctggctctgctctgcccggctggaacctctgtccttgtttgcctcccgcaatgggtggggtgccctggggggctactatgactcaacctgttctgagcccttcactggggacctcagcgtcatcatgaccggggcctacaacaacttcttccgcatgttcgatcggaacaccaagcgggacgtgaccctggaggcctcgagggaaagcagcaagccccgggctgtgctcaagccacggcgcgtgtgcgtggggggcaagcgccggcgtgatgacatcagtgtggacagcttggacttcaccaagaagatcctgcacacggcctggcacccggctgagaacatcattgccatcgccgccaccaacaacctgtacatcttccaggacaagccaacattgaccaattgccagctctgggatcttgcagatgtgattaaggtcatggacctgaagatggaatttagcctggattatccatgtgggacccatctaatcacccaagtccgtgaaagtgtaggaccgttcctggttgtattggagacagctgtagcaacagaaaaaggctcagcaaggcatgacatgaagactcgaccagcgagccccaaggtcttaattactaaactgtatcctggaccttctggctacctggtggggcctcaggcctcggaaggtgacattctgcccaggccccctggcactggcacggacacagatgctcgagagtcaaagaagggatcaaaacaaagagaacgggagctggaccgtggccttgaagatgggaagcaagaaggcacatgggggagtggaaacagcttagagactgagagagcagagcccaagcccgcgagaaaggaagcaaagatgttgccggaaaggggtcccaatccagaccccaagagagggctcttggatctcgtggaagaaagaattcagggcaagtccatggagaaaagtgaaagcaagtttattaggaaagtaaaggaatacaagaatggctactccatggacagagcagcccgagggctgctggttgcccatttttatggttatttctga

SEQ ID NO: 127660 - DNA, 366 bp, Homo sapiens; identical to SEQ ID NO: 126541

SEQ ID NO: 127661 - DNA, 969 bp, Homo sapiens
atgatcccagcctccaacaaggccttcgtggtcaacaacctggtgtcagggactggctacgacttgtgtgtgctggccatgtgggatgacacagccacgacactcacggccaccaacatcgtgggctgcgcccagttcttcaccaaggctgactacccgcagtgccagtccatgcacagccagattctgggcggcaccatgatcctggtcatcgggggcatcatcgtggccacgctgctggtcttcatcgtcatcctcatggtgcgctacaaggtctgcaaccacgaggcccccagcaagatggcagcggccgtgagcaatgtgtactcgcagaccaacggcgcccagccaccgcctccaagcagcgcaccagccggggccccgccgcagggcccgccgaaggtggtggtgcgcaacgagctcctggacttcaccgccagcctggcccgcgccagtgactcctcttcctccagctccctgggcagtggggaggctgcggggctgggacgggccccctggaggatcccaccctccgccccgcgccccaagcccagccttgaccgcctgatgggggccttcgcctccctggacctcaagagtcagagaaaggaggagctgctggactccaggactccagccgggagaggggctgggacgtcggcccggggccaccactcggaccgagagccactgctggggccccctgcggcccgggccaggagcctgctccccttgccgttggagggcaaggccaaacgcagccactccttcgacatgggggactttgctgctgcggcggcgggaggggtcgtgccgggcggctacagtcctcctcggaaggtctcgaacatctggacgaagcgcagcctctctgtcaacggcatgctcttgccctttgaggagagtgacctggtgggggcccgggggacttttggcagctccgaatgggtgatggagagcacggtctag

SEQ ID NO: 127662 - DNA, 1824 bp, Homo sapiens
tcaggaggcctattctacctgttgtcccctccctgattcatgaaatttgaaaaagtccaagactagtccacagtacagcacccgcagcttcctacccagcccaggctggccctgcagtgctcctactcgccttcccaggccggcccaccctacagggctcccaccacctggccaccgctgcagcactgccctggccctggcagcagccagccgccctcctacctctctggcactctgcagtctccatcgctgccaccacgccaaccacagcgaggcaagccgtggtgtccctggctccagcctccagcatgtgcaggtggctactccttctcctggcacggagcaactggatgggcaaagccagaaaagcctagaacaggatgcagagtaactgctccctgatgttggcagtgcagccacggaaagtgcccccaaccagcctcccgccatgggaagtgactcccgggatagcgcccccaagcagaccctagccttgggcagtgacgcccgggtaggtcgcccaaccgccacccaccccgttgccgagagtgcagcaccagatagcgaccctaacatgccccccatctacaccgtctatggcatggagcggattgaggttgctaccctgggctgcagtgcccgtggctgggggcaagttgcaggtgccagcaggtgcttcagtgtccgaggcaggggcaggttgggggcgctatcaggtgctggtgatggggggcagggtgttggggtattgcatggctcagagcagcacgcatggacattcagcatctgtaaggggaccatgcagcagaggctgacagtggagagtgcagtgcacataaagacacgccagtgtttggtgagagggacttgatccagatcagcaaaagcgaagtgactgatgtgcacagcggtgtgcaaatggcgactatgaaacaccattggccacaagtctacagaggtcttggcgctgacctggatgcttcctttgaagctggtaaagttgtccatttataactatgatattggctgctttttttttttttttttgacagagtcttgctctgtcgccccacagttcatcaacaagctgctgacagccctgattgagtgcaccgagtggggccagatcttcatcctggactgcctcaccaactatacgcccaaggacgaccgcgaggcccagaggtgagcgggctgccctttgcttgccagcccagcctgaggacccttgtcctcaggggctccaaccaggcactgggcatggcctggcctgggagctaacagaagcccagggattgcatcaatgaccgtgggcaaagatgtcaggtgtgcaggagtaggcctggtggcagctggaagctggctgacgggagggtttatagctggggtccacttcagtcgcctcatcagcagtttttcctcctccctcctccgcattcttcctggtgcgtcatcttccaaggtgacacatacattgtggctttggcaggactcctgcctgttgggactcaggaagttctcctctatccatctgtgggaagaccccaagtttgatactgaagatgttaaaccatctccaaagtaagtggaaactgaggtgttgcggattcgatgacctggaccctagggtcagtccccacccctttgctgagctcgctcagcagcagctcagtccctgcttgtcaaccaccgacctccatacactccagccccggtccacatcccccaaggctcctcgtgggattcctaagcagcaccagtgcactgactgtcactctactcatttattgaaagaacagtaggcaaaataattgtattatatct

SEQ ID NO: 127663 - DNA, 2272 bp, Homo sapiens
atgtgggaaagtttggaacttcctagagacttgttgaatggttttgaccaaaattctgctagtggtatggacaaagaagtgcaggccaaggtggtctcagatggagatgaggaacttgtcggaaactggagtgaaggatccttagggtgtcgcttcaccagccagaaacctctgtggcaagtgttgcctttgcccaagttttgctcaggcccactgggcttgttctgcccacttgacccagcaggctgtgcttggttttcactactggcccagatcccacggctgccaacggcaagccaggtgcagagcagcaaggggtgcatgagtgagcgagcgcggggtacagtgtgcacagccaggcatggtggctgtggcggggcaggcaggtccaggtgccagtatgggcgccggctccttgctgtggctggaacaggtgtaccacaagtggctcccactacaagcactgtggaacatggtggcacccagaaacttggagatgccggcaactgcagagccacaaagaggatgtcacagccctggcttggggagctcctaagtccaggctccctgaagggctgcagctcttctctcctctcttgtctcctcatcgtcacccacaacatggcgagcagcagggtgtatttgacacagtttgtgttacagcttgtttggtcctgccatttggcaggcagttcctcccgacaactgcagctctcagcagagaagagacccggagtgggtacctcctctctgcaggcaggtcattttgtcgagtgtgcagtcctcagtggagaggagacccaagtgggtagctcttacctgcaggcaggtcgtcctatcatctgccagagtctggctgagtttgcggtttttatgggcttcagaggggaggaaagcaagcaggtccggctgtgccttcccaactgcagccagcatctttgcagcagctgctccagatgggctgcagctgccatcactgggacttggtgccctgtgtcccagctgttccagtaccagttgtggctaaaaggggccaaggttaccattaagaatatcgaaagggagctcatttgcccagcatgcaaggagctgtttacccacccattgattctcccttgccaacatagtatctgtcataaatgtgtaaaagaactcctgctgactctcgatgattcattcaacgatgtgggatcagacaactccaatcaaagcagtcctcgacttcggctcccctcccctagtatggataaaattgaccgaattaacagaccagagcctctggccgttctccggaaggacccctgtgaggccaggcaaaaacgacttgatgggggcccacatgatgtggatcttggagaacgaggaatcaatggtctgtttcgaaacttcactttggaaactattgtggaaagatatcgtcaagcagctagggcagccacagccattatgtgtgacctttgtaaaccaccacctcaagaatccacaaaaagctgcatggactgtagtgcaagttactgcaatgaatgcttcaaaattcatcacccttggggtactataaaagctcaacatgagtatgttggtccaactactaacttcagacccaagtgtaatggagagagggctaaagaagaagcaattacacattttgaaaagctctttgaagttctggaagagaggaaatcatctgttttgaaagcaattgactcctctaagaaactaagattagacaaatttcagactcaaatggaagagtaccagggacttctagagaacaatggacttgtgggatatgctcaagaagtgctaaaggagacagatcagtcttgctttgtgcagacagcaaagcagctccacctcagaatacagaaagccacagaatctttgaagagctttagacctgcagctcagacttcttttgaagactatgttgttaatacctctaaacaaacagaacttcttggagaattatcctttttctctagtggcatagacgtgccagagatcaatgaggaacagagcaaagtttataacaatgccttgataaattggcaccatccagaaaaggataaagctgatagctatgttcttgaatatcggaaaatcaatagagatgatgaaatgtcatggaatgagatagaagtgtgtggaacaagtaaaataattcaagacttggaaaacagtagtacctatgctttcagagtaagagcttacaagggttcaatctgtagtccttgcagcagagaattgattcttcatactcctccagctccag

SEQ ID NO: 127664 - DNA, 1830 bp, Homo sapiens
atgaagtcttcctcactcatggatatcctgactcactggcctggctgttcctggaacaagtcagatgaactcctcagagcttttgcacttacggtgcctcagcctaaactcttccctcagccctgtggatggctgactcctttgcttcaggaaatgtctgatggaaatggtgccatgagggttcatgttcccctctcattacaggaccttaagcaaataaggggagacttaggccaattttctgatgaccccgatagatatatagaaactttccaaaatttaactcaggcgtttgacctcacacagagggatgttatgttgctcctaggtcagacccttactgcagccgaaaagcaggcagttctgcaggcagcagaaaaatgtggcgatgagcagcatgtctcctatagcagaccaaagagagaaaaggggatgggaaagtaccttcaaagtgacaatggctccgtgtttaaggcagctgtcacacaaggggtctcaaaagcactagacatagaatatcatctacgttgtgcttggagaccccagtctgcaggaaagccacaactggtactggaacagctgggacacagggcaccaagtcccagtgatggcagctgcagcccatctggagcagctgctgcaaagatgctggctgcagttgggaaggcacagccggacctgcttgctctgcagagccagcgggacccaggaacaggcaggagcccttctcccttccgagttggtgcggagggagccccatgctcctgggtgcaattgcagccacccagctgtggactagggcattcctatgctctcgggggcccaggatgcctctcttcccccacatgctcagaagtgcctgctcctactgcttggcctctccccattcccagtgcccactctgactttggagaaaagctgtggccaagcccgggcactgacatgacctggccaggcccacccatggccacccatgggccaatcagcacacacttcctcccctctgaagcccataaaaaccgcaaactcagccagactctggcagatgataggacgacctgcctgcaggtaagagctacccacttgggtctcctctccactgaggactgcacactcgacaaaatgacctgcctgcagagaggagttgtccatgtagctcattcttcctggacacagtacaggaactctggacctgccaaatggcaggaccaaacaagctgtaacacaaactgtgtcaaatacaccctgctgctcgccatgttgtgggtgacgatgaggagacaagagaggagagaagagctgcagcccttcagggagcctggacttaggagctccccaagccagggctgtgacatcctctttgtggctctgcagttgccggcatctccaagtttctgggtgccaccatgttccacagtgcttgtagtgggagccacttgtggtacacctgttccagccacagcaaggagccggcgcccatactggcacctggacctgcctgccccgccacagccaccatgcctggctgtgcacactgtaccccgcgctcgctcactcatgcaccccttgctgctctgcacctggcttgccgttggcagccgtgggatctgggccagtagtgaaaaccaagcacagcctgctgggtcaagtgggcagaacaagcccagtgggcctgagcaaaacttgggcaaaggcaacacttgccacagaggtttctggctggtgaagcgacaccctaaggatcctgtgataccgaggctgcacacagcagcagggccctgggcccactccactaaaacatttttctctcctaggcctccaggcctgtga

SEQ ID NO: 127665 - DNA, 426 bp, Homo sapiens
  misc_feature (1)...(426): n = a,t,c or g
ccctctggtccacgtggtggaattcggtctgattgggaggacgcagaggagcgccggggtcgaccagaaccacccccgggctgtgctggtccccagtagcctccggattggaatcattcccgcagggtcaacggactgcgtgtgttactccaccgtgggcaccagcgacgcanaaacctcggcgctgcatatcgttgttggggactcgctggccatggatgtgtcctcagtccaccacaacagcacactccttcgctactccgtgtccctgctgggctacggcttctacggggacatcatcaaggacagtgagaagaaacggtggttgggtcttgccagatacgacttttcaggtttaaagaccttcctctcccaccactgctatgaagggacagtgtccttcctcccttgacaacacacggtggn

SEQ ID NO: 127666 - DNA, 2241 bp, Homo sapiens
atgattcatggctggttcccgccctatagacaagacagtcacaaggagctggcaggcctggcggacgagcccggcggcggagatgggggcgacgggggcggcggagccgctgcaatccgtgctgtgggtgaagcagcagcgctgcgccgtgagcctggagcccgcgcgggctctgctgcgctggtggcggagcccggggcccggagccggcgcccccggcgcggcctcaccaaggcccagccctccttcccagactcacctagcactggttattttgcagtatgttccaagactgggcagcgtttacaccttctgtttagctggtttctctggcactgctccagcagggaacggcgctggtactgccaggggcctgcacccaccctgctgccccatagctcagacgtccccgaggccagagctggagataaacccagctcccagctgctgactctgcacgctggcctctccagccagcgggcctgctgctgtggatctctggtgtccccggttcactgcctgtttcttgtatcttgtccagagctatcagtcatagcgggacgggaggctgatgcaggtttcccgcgacctgacagcatggagtggggacggcgggtgttctgtgttgagatgccagctgaaggacgtggtgtttttacagatgcctgctctgtgcctgtatctgagatcatcgccgttgaggaaacagacgttcacgggaaacatcaaggcagtggaaaatggcagaaaatggaaaagccttacgcttttacagttcactgtgtaaagagagcacgacggcaccgctggaagtgggcgcaggtgactttctggtgtccagaggagcagctgtgtcacttgtggctgcagaccctgcgggagatgctggagaagctgattactgaacatgctaatcaggccaaggagactctgtatgagattaacatagacaaatacgacggcatcgtctgtgtcggcggagatggtatgttcagcgaggtgctgcacggtctgattgggaggacgcagaggagcgccggggtcgaccagaaccacccccgggctgtgctggtccccagtagcctccggattggaatcattcccgcagagcatgtgggccccggtgagaacgctggtggcttggacgggtcaacggactgcgtgtgttactccaccgtgggcaccagcgacgcagaaacctcggcgctgcatatcgttgttggctgctgccccgaggctcggaaaccacccgcatcccgccatactgcctgtggcagtgggcacgggcagctgtgcctgggctgccagctgtggaacgcatgcctctgtgaggcctcgaggcttcagtccaggatgcagagccccggggactcgctggccatggatgtgtcctcagtccaccacaacagcacactccttcgctactccgtgtccctgctgggctacggcttctacggggacatcatcaaggacagtgagaagaaacggtggttgggtcttgccagatacgacttttcaggtataaagaccttcctctcccaccactgctatgaagggacagtgtccttcctccctgcacaacacacggtgggatctccaaggaataggaagccctgccgggcaggatgctttgtttgcaggcaaagcaagcagcagctggaggaggagcagaagaaagcactgtatggtttggaagctgcggaggacgtggaggagtggcaagtcgtctgtgggaagtttctggccatcaatgccacaaacatgtcctgtgcttgtcgccggagccccaggggcctctccccggctgcccacttgggagacgggtcttctgacctcatcctcatccggaaatgctccaggttcaattttctgagatttctcatcaggcacaccaaccagcaggaccagtttgacttcacttttgttgaagtttatcgcgtcaagaaattcctgtttacgtcgaagcacatggaggatgaggacagcgacctcaaggagggggggaagaagcgctttgggcacatttgcagcagccacccctcctgctgctgcaccgtctccaacagctcctggaactgcgacggggaggtcctgcacagccctgccatcgaggtcagggcggtggtgatggcaagaggctgtcgaaaggtcccaggaacaccggccaccccaggcagccgtgcacagggactttcctctgtcaactcatttgacaagtttgggaagtgggattatttttaa

SEQ ID NO: 127667 - DNA, 411 bp, Homo sapiens
aggggcaacggactgcgtgtgttactataccgtgggcttcaacgacacaaaaacctcggcgctgcatatggtggttggggactcgctggccatggatgtgtcctcagtccaccacaacagcacactccttcgctactccgtgaccctgctgggctacggcttttacggggacatcatcaaggacagcgacaagaaacggaggttgggtcttgccagatacgactttttatgtataaagacctttttctcccaccactgatatgaagggacagtgacctttcttcctgcacaacacacggtgggatctccaagggataggaagccctgccgggccggatgctttgtttgcaggcaaagcaagcagcagctggaggaggagcaaaagacagcactgtatggtttggaactgcg

SEQ ID NO: 127668 - DNA, 2186 bp, Homo sapiens
ttactgaacatgctaatcaggccaaggagactctgtatgagattaacatagacaaatacgacggatgctacactgcccattcaaggatgccctgtcctcgaaaccacagccccgctgggaaggctgccccggtgcaaggtgtaggctacggggaagggcaaagagccttcccatgggagccgggcccaaagcagatgcctgccaagggccaggtgtgcaggctgcccctcctgaagctggaagcctcaggcctgctgcgctcagagggccgcacctgcaggagccctgaccggctgtgttcctcctgcagcatcgtctgtgtcggcggagatggtatgttcagcgaggtgctgcacggtctgattgggaggacgcagaggagcgccggggtcgaccagaaccacccccgggctgtgctggtccccagtagcctccggattggaatcattcccgcaggctttgcaaatgacctggcaggggacgaggtgtctgtcctctctggccctgtgtctggccccgagggtggcggcatggtgcacactttcactctcgtcacagctctgggatgtgagcaccgcagtcatccccattttatggatgaagacaggaggactggggagcatgtgggccccggtgagaacgctggtggcttggacgggtcaacggactgcgtgtgttactccaccgtgggcaccagcgacgcagaaacctcggcgctgcatatcgttgttggctgctgccccgaggctcggaaaccacccgcgtcccgccatactgcctgtggcagtgggcacgggcagctgtgcctgggctgccagctgtggaacgcatgcctctgtgaggcctcgaggcttcagtccaggatgcagagccccggggactcgctggccatggatgtgtcctcagtccaccacaacagcacactccttcgctactccgtgtccctgctgggctacggcttctacggggacatcatcaaggacagtgagaagaaacggtggttgggtcttgccagatacgacttttcaggtttaaagaccttcctctcccaccactgctatgaagggacagtgtccttcctccctgcacaacacacggtgggatctccaagggataggaagccctgccgggcaggatgctttgtttgcaggcaaagcaagcagcagctggaggaggagcagaagaaagcactgtatggtttggaagctgcggaggacgtggaggagtggcaagtcgtctgtgggaagtttctggccatcaatgccacaaacatgtcctgtgcttgtcgccggagccccaggggcctctccccggctgcccacttgggagacgggtcttctgacctcatcctcatccggaaatgctccaggttcaattttctgagatttctcatcaggcacaccaaccagcaggaccagtttgacttcacttttgttgaagtttatcgcgtcaagaaattccagtttacgtcgaagcacatggaggatgaggacagcgacctcaaggagggggggaagaagcgctttgggcacatttgcagcagccacccctcctgctgctgcaccgtctccaacagctcctggaactgcgacggggaggtcctgcacagccctgccatcgaggtcagaaaccttgcctcccgtcaacctaaagtgacatcagagtgttctcctaagaaagagtttattcaggaacagcaaggggattgcagtcaggatatgcgtgctacactggaaggcattttggggggtgttcgcgataaaggcaacactttaaaaggcaaagaagtccatgtaagctgctctagaacgaagttcacaggtcacagcagctcctggcaggaggcagtactgttcaccgcaggagtggccgtcactgggcgggcgccctcgtcgcagtcccgagggttctgggcccctctggtagccaggtacagccgagagatgccgctgagtaagcctccaatgcccacgtccaacaggactctgcttctcagccccacctcaccccacagccgtcactcaggccgcatcagtacccaaacgccccgccgccggcagccgtggggccccagggagtggcgggctggcagcggcactgagggcctggggttggtggcccagctggctcaggccgcctacaatgcgtgtggccctgccaaggaggcagacagccctgagccttag

SEQ ID NO: 127669 - DNA, 1570 bp, Homo sapiens
aatacatggctgggctcaagatggaggctctgcctccttcctccttcaggccattgtccctgtgttaagctgaggactccacagtgagagaactccacagtgagacgcctccagcctagcagcacttaccccttctcctgctctcctcacctcggtgtgtcataggcattacgccctagtcttcgatactctcatttctaattaggagataaagaaccgggccaagaatctgagcaaacggagagcagctccctgcgggggctcaggaaacacttgccagcgtccaccggttggagagctggcgcctgctcatctgagggcaggtcatgtggacggcagtgggaccaccgagggctggcacacagaagaatgcggacggtcctctagaagcagaaggaactgccctctgagggttagtctcaaattgccggcaccaagcagcatccccgcacagcacgtggtgtgtggacatgccacagcatccgcgggagaaaacacacctgacccaggtggacagatgctgtgggaacatcttgcaaagggcggaagaggctgctgccccgaggctcggaaaccacccgcgtcccgccatactgcctgtggcagtgggcacgggcagctgtgcctgggctgccagctgtggaacgcatgcctctgtgaggcctcgaggcttcagtccaggatgcagagccccggggactcgctggccatggatgtgtcctcagtccaccacaacagcacactccttcgctactccgtgtccctgctgggctacggcttctacggggacatcatcaaggacagtgagaagaaacggtggttgggtcttgccagatacgacttttcaggtttaaagaccttcctctcccaccactgctatgaagggacagtgtccttcctccctgcacaacacacggtgggatctccaagggataggaagccctgccgggcaggatgctttgtttgcaggcaaagcaagcagcagctggaggaggagcagaagaaagcactgtatggtttggaagctgcggaggacgtggaggagtggcaagtcgtctgtgggaagtttctggccatcaatgccacaaacatgtcctgtgcttgtcgccggagccccaggggcctctccccggctgcccacttgggagacgggtcttctgacctcatcctcatccggaaatgctccaggttcaattttctgagatttctcatcaggcacaccaaccagcaggaccagtttgacttcacttttgttgaagtttatcgcgtcaagaaattccagtttacgtcgaagcacatggaggatgaggacagcgacctcaaggagggggggaagaagcgctttgggcacatttgcagcagccacccctcctgctgctgcaccgtctccaacagctcctggaactgcgacggggaggtcctgcacagccctgccatcgaggtcagggcggtggtgatggcaagaggctgtcgaaaggtcccaggaacaccggccaccccaggcagccgtgcacagggactttcctctgtcaactcatttgacaagtttgggaagtgggattatttttaa

SEQ ID NO: 127670 - DNA, 706 bp, Homo sapiens
  misc_feature (1)...(706): n = a,t,c or g
cggcccacaagcacagactgtttttgccaaccctggcctctggagatgaccgtcctatcttggagatgatgaagcccctcntacagccntagaaaaatgacagatctccgtagcctgtttgggatgttgcntttaagtgacggagtcccacagatcgaatttgaacatgggactacatccggccaaacgagtagtatatgtagatggnaaagaaaaagatgcctatggaccgtatggtgcaatggtaaaaattggagaccagccggtggagtttgtagatgatggggactgaaactcacttcagtatcgggaaccatgactgttacataaaggctgtcagtagtgggaagcggaaagaagggattattcatactctcattgtggataatagagaaatcccagagattgcaagttaatgaattttcatcttaagaagtaaagatcaggactttttaattactgtggtaattaaatgtgttcagtatgtacttatcagtacatttagtctgcaatgttttaattttttaaaaagttacatgaaactaacattccaagggtcaggaaaaaaaccaattatgtatagtcataaaaattacaatttatgatgcaaataatgtaaaatgttttaaagacaaatggcaaataagatatggaccaaagtcactaatgttttacaacagtaacctttactataataaatactttt

SEQ ID NO: 127671 - DNA, 1095 bp, Homo sapiens
tcaatcgtaagcctttcggttctgccaccaggaaacttccatagaaggtgagattcccaggtcgagggatgattccacgaacacccagagagccagtgccaggacttcagggtcagacttcgtaaagcccaggcgtcgtcttctctcccggactcctgtccagggcttcaggggccgggcccgcaatccccatcggatcgtacctcgtccgcttccagctccgctcggctgcctaagagcgccatattcctcctctggctgctggggtccgtggaagcatccacctggtctttggtccggtgccagtccttttccctcgccaggtggccaccgcatctcgcagatggtgtggcctgagggcagccttgggtcacggtcactggtccccgagaggcctctgacacaccacccacctggactgtaggtggaaggactctgcttgcttttttggcaggtttgtaaagcgtccttcatggcagaaatgccgttctggatgtcctgttgctcgaaggtcaggacagcctgcaacaccacaatggtactgtagcccaaggcatggtacatactctccttagccttccgttttctgcacgtcactttcctttctctgtccataaatcttcttccaccacatggctgcactgcagtctccgagcctgctctggctccagagatcgactgattcacgaatctttcattgctcaattgaactcctttaaatttaattctgctgaagtttttatcatatgtcatgctaaggtatttgcatgttactttaaaggcaatgagaagctgtgcacagattttaagaggcaaggcgaaaatggacttgcattttagaaagagcagtctattgtcagctgctagcagtgaaacccgcagatgcacaccatgatctccacaatctgacatgaaagtctctgaacggcccttcttacctgtagtcccccaggttctgaagccttcatcctcagactgagttataccatcagcttccatggttttgaggcctctgtgcttggactgagccacgctaccagcctctgcagctctccagcttgcagacagcatatggtagggcttctcacgctccat

SEQ ID NO: 127672 - DNA, 768 bp, Homo sapiens
atggaggacagggctgagggtgaggaggaggaacgcggaggaggagggaggaatgtggaggaggagggaggaacggagttctatagaagccgaacagctttggggaattacagtacctggccgttattttttggcaagggtgagtttgtagatgatgggactgaaactcacttcagtatcgggaaccatgactgttacataaaggctgtcagtagtgggaagcggaaagaagggattattcatactctcattgtggataatagagaaatcccagagattgcaaaagcaagcagagtccttccacctacagtccaggtgggtggtgtgtcagaggcctctcggggaccagtgaccgtgacccaaggctgccctcaggccacaccatctgcgagatgcggtggccacctggcgagggaaaaggactggcaccggaccaaagaccaggtggatgcttccacggaccccagatacaggaaaaaatacacagttgtagaatctttctcaagtcttctttctagaggatccctggagcaactgagtgaaggggcggagctgcccaagaccatgggaacctacttcttgcatcagcgtaacctggacgtgagacatggaagcaaaggagatcattttggagctttaagatttgactgcctcgctgaatctcatgctagcatgcggcaagcggcgcccttcgttttggccaatttctctgatttgaaatgggtgtatttacccaatgcctgtacccccattgtatctaggaagtaa

SEQ ID NO: 127673 - DNA, 825 bp, Homo sapiens
gtgcgggagtccacaagatcgaatttgaacatgggactacatcaggcaaacgagtagtatatgtagatggaaaggaagagataagaaaagagtggatgttcaaattagtgggcaaagaaacatttctatgttggagctgcaaagacaaaagcgaccataaatatagacgctatcagtggttttgcttatgaatatactctggaaattaatgggaaaagtctcaagaagtatatggaggacagatcaaaaaccaccaatacttgggtattacacatggatggtgagaactttagaattgttttggaaaaagatgctatggacgtatggtgccattggtaaaaaaatccggagaccagcgggtgagtttgtagatgatgggactgaaactccactccagtatccgggacccatgacctgttacataaaggctgtccagtagtggggaagcggaaggaagggattattcatactctcattgtggataatagagaaatcccagagattgcaagttaatgaattttccatccttaagaagtaaagatcaggactttttaattactgtgggtaattaaatgtgttcagtatgtacttatcagtacatttagtctgcaatgttttaattttttaaaaagttacatgaaactaacgattccaagggtcaggaaaaaaaccaattatgcatagtcataaaaattacaattcatgatgcaaataatgtccaatcgttctaaagacaaatgcccaacaacatatgcgaccaaagcccctcatcttttccaacagtaacctttactataataaatacttttaaaaaaaaaaaaaaaa

SEQ ID NO: 127674 - DNA, 1969 bp, Homo sapiens
ctttgtcccatgtggtatgacaatttgcccccaggtccccaatttctccagccactcgaatgtcttgttgtaagggtccttccaccttctgccataataccattgccctaatacctcccctgtgtttgcctggggatctatagagtcgacatgcaggcatgcaagctcctaaatttccaaagcaagatgtcacattgatccagccgtcactggaagctgggccttgtggaggcagagagagctgtcttgcaggaagggagacctggtctcgacatgcatgcacacccctctctggcaagaggcagcctgcgcttgtcacagcttgaaggcgggatctatagagtcgaaaagcaggcatgtcaagccctaagttgcaaatgtggcttttaatctcggagaagctctgtttgtcagtagcttgtataaccaccattgttgctttggcatcgatcgtcatttttgaaccgcgtgaatcagtgaacaagtaccatttgccgttcattttgaaaacattcgcgcgctcgatttcatcagttaccgtgtttgaagtgatcagcggcttcattacttttttcaatgtgtaatcattatttaactctatgataccgagggcgccgttcgctaactcagcatcgcgttttttagcgctctgctgaagcttctggctttctttacggaagaagttcgtgccgccgccgtagtacgctttgttaaataaagattcttcgccttggtatccgttttctgttcccgtgttggcttcgaatacaaggtatttaatggcctttgtcacattgtcgcctttggcttgcggccctgcgaagtgagagtaagtgaatgtcacatcgtttggatcaagacccatctgcagcacaagctctgttttgttcagcggcttgtaagggccggttaaagagtttgatacataaccgagcatgtaaatatcgtttgagttaataccatcgatcgtcatttttgaaccgcgtgaatcagtgaacaagtaccatttgccgttcattttgaaaacattcgcgcgctcgatttcatcagttaccgtgtttgaagtgatcagcggcttcattacttttttcaatgtgtaatcattatttaactctatgataccgagggcgccgttcgctaactcagcatcgcgttttttagcgctctgctgaagcttctggctttctttacggaagaagttcgtgccgccgccgtagtacgctttgttaaataaagattcttcgccttggtatccgttttctgttcccgtgttggcttcgaatacaaggtatttatggcctttgtcttcaacgtagtgaggggctctcagcgtatggttgtcgccggatgtataattgccttcatcgataaactgctgaacgttctgatatgtttttccgtctccgtcaaaaatcgttttgtgatcttccactccgttgattttgagtgtgtcatcagattttgacacatttacctgcgctgaagtcaggggattggtgatctcttgtgtttcactaagccgaaactgcgtaaacgggttctgtaacccgataaagaagggaatgagatatgggttgatatgtacactgtaaagccctctggatggactgtgcgcacgtttgataaaccaaggaaaagattcatagcctttttcatcgccggcatcctcttcagggcgataaaaaaccacttccttccccgcgaaactcttcaatgcctgccgtatatccttactggcttccgcagaggtcaatccgaatatttcagcatatttagcaacatggatctcgcagataccgtcatgttcctgtagggtgccatcagattttctgatctggtcaacgaacagatacagcatacgtttttgatcccgggagagactatatgccgcctcagtgaggtcgtttgactggacgattcgcgggctatttttacgtttcttgtgattgataaccgctgtttccgccat

SEQ ID NO: 127675 - DNA, 1122 bp, Homo sapiens
atgcagaatgatgtggacatagctgatgtggctcattattttgaaaaagatgttaaaggtgaatccttgtttcattcttctaagaaaatggacctgagagtaaatggagaacaactggatctggatcctggtcaaactttaatttattatgttgatagaaatgcacctgaattttcaatgcaggctctaaaagctggtgtttgtgctgttattgtggttgtgatgatagcagttgttgctggaattgttgtgctggttatttccagaaagaagagaatggcaaagtatgagaaggctgagataaaggagatggcacataccatgatcacagtaatgttctttggagatataatcatcaaagagcatcccttggttagtgtggtacatgagaagggcataaataatgaaacagaacaggggccattaatccgttctgttttgttttctgtgcttggaggttggtttaccagatttttaagcagttttttaaaaacagaatatcgaaagtttgacaggtcagtgctaattaagaatgcagaagaggggccagccacggtaataggccccttagaagggaaaaagaagcccccaacacccgttattgggcatacgatcttccactggggtctccttccctctccataccctcttttcttctccaaagaatccctcaacactaggcacgagacagatgctccagctcttctggaggctgtggccagaaaggaggatggaccatttgcctgcatacagaaattggaagttgtgtcaaaagctaaattctactgccagccacctgctggcctactgccaggtcttataaatccaacacttaggtgtgcgtggggcctagggatttctatttctagcaaacgtgatgctaatgcttcccttcttggaccacatgagagtggccatcagcacactccctgcagtctttccctctccttgctgagcattgtgtcagtgaagcgagctgccttcaaagctagtgacaagcgcagggctgcctcttgccagagaggggtgtgcatgcatgtcgcgaccaggtctcccttcctgcaagacagctctctctgcctccacaaggcccagcttccagtgacggctggatcaatgtga

SEQ ID NO: 127676 - DNA, 1606 bp, Homo sapiens
agcggccgccctttttttttttttttttcagtttaaaatggttttatttcatagctcataaaaaagtatgtatgtacaagaactcaagtaaatagaaaggcagctttcaatcacaaatcagtttttcagattttactgtggaagccatttttaaggcacaccatttgaatgttaccacattaaataattttaacggatggagtccaagttctggattttacatttaaatctgcatatattagaacaccttggggtcaaatttcaagattggtaaagccagtttcaagctgcttatattttgagtacagggtttcactattacaaatatatgatgttaaactaacaaactcatgaccttcaaagatgtcttccgtcccacgcacacacatttgtaaatttgtgtccctttgcctatttcccttcttcttataatcttcaaattatattaggttatgcattggagttccctattgcatctcacccatctcctttatctcagcctttctcatacgtttgccattctcttcttttctgggaaataaccagcacaacaatttccagcaacaactggttattaccacaaccacaataacagcaataacaccagctttttagaacctgctttgagaattcagggtgctttttcatcaacattataaacttaaagtttgaccagggatcagcagatccagatccagttgttccccatttactgtcaggtccattttcttagaaatgaaacagggattcaccttttaacatctttttcaaaaataataagccacatcagctatgtccacatcatttctgagtttttttgagaagaaattttgaaacagattcaatagtgataacattattctcataccaaaatactcgtgataaaaatttggatccagttgataacgcgttgtgatctccttctgaagtcaagtccgcaaaacttttactatcaataaggtttttctcttgactttgtgttttagttcaatgacgatccagtaggttctcactcgctcagagcaggttatttcagtgtacttgtctgttcttctgaccccagcagtgttcacacaccagcacatgaaggtgccgttgcactgctaggccttaaagagcccgctctcatcgcagtcaggatcataaagcccatcattgttctggagggccccttcaggttttgctcttctcccaagttttgagccattcatttctgccttcatcaccaaacatttggcagccagctttgagcaaatgacagtattttgtgcaccaactgaagtacactggcattgacgattattattcacaaagcagtttacggccagcttgtagttttcacagacacattcttcctgagctgcggcaaaagtcgccgtcgccgcggcaagcagaagcccgaacgcgaggacctgcgggggcgccatgcctgcgcgcgcgccgagaagaggggcgcgggaggggcccgggactcgcgggagggcgtgcgccgggagtgggacacgaggagccggccgggcagcgcgaggcctggggcacgcgggtccgcgtcgggaggacagcgacgagggggtccccggaccgcgtcgaaggtgctcgctcgccg

SEQ ID NO: 127677 - DNA, 942 bp, Homo sapiens
tcaccttagggccttctccacgtgcgatctgatggccgcggacattagggccttctcgacttgccatctgatggctgtggacgttagggccttctcgacttgtgatctgatggctgtggacattagggccttctcgatgtgcgatctgatggccgcggatgttagggccttctcagtgtgcgatctgatggctgtggacattagggccttctcgacttgcgatctgatggctgtggacattagggccttctcactgtgcgatctgatggctgcggacattagggccttctcgatgtgcaatctgatggccgcggacgttagggccttctcgacgtacgatctgatggctgcggacgttagggccttctcgatgtacgatctgatggccgcagacgttagggctttctcgctgtgcgatctgatggccgcggacattagggccttctcgctgtgcgatctgatggctgcagacattaggaccttcttgatgtgcgatctgatggccgcggacgttaggaacttcttgatgtgcgaaatgatggctgcagctgctctgggcaaggcatggaggccgccttgcaaggcgcagcagacgtgggcatcgctgaggatggaggaagtacttgcaaggcgcagcagacgtgggcatcgctgagggtggaggaagtacttgcaaggcgcagcagacatgggcatcgctgagggtggaggaagtgtctggagtagttgggccagctcttctctgatttccgtgccagtgcggtaactctgtgagtccacccagcggtcagccccaggctggcccccgctcacaggaggctcctgctcagagtctgttgctctgtggctttgtgtgaatgactttgaattccagatgaggctgatgcccagcagggattcagagcctgcttgttgatggattgactggctgttcccctccat

SEQ ID NO: 127678 - DNA, 822 bp, Homo sapiens
tcatgtgggggaccgagctcgaattcggaacatgggcatagctgcctcctgcgcgaaatggttttcggtcacaattcccacaacaaaccagccggaagctgtagaggataacactcggcacgcgcggccgtcctcatctgtagtgccggcgccctgactctggaccccccccttgtagatgcgcagcaccaggagggtgtccgtgtggcccgtcgccttcgtgggtggcctgcggtacgaggccccacgggtgaacggggcagggaaggtggtcggctggaagacggtgtttgacccccaccggccatttgcaatagacatggctggatttgccgtcaacctgcggctcattcttagggccttctccacgtgcgatctgatggccgcggacattagggccttctcgacttgccatctgatggctgtggacgttagggccttctcgacttgtgatctgatggctgtggacattagggccttctcgatgtgcgatctgatggccgcggatgttacggccttctcagtgtgcgatctgatggctgtggacattagggccttctcgacttgcgaactgatggctgtggacattagggccttcatctcatcatatccatgtgtctcatcatctttatgcttctcacctccatgcacctcatctccgtatctctcatcatctctgtagagttccatctccatgtgtcttatcatctcttgtgtctcatctccatgtgtctcatctccgtgtgtttcatctgcatctgtctcatctccacgtgtcttatcatccccatggatctcatctctgtgtctcattatctccat

SEQ ID NO: 127679 - DNA, 7790 bp, Homo sapiens; identical to SEQ ID NO: 121337

SEQ ID NO: 127680 - DNA, 8962 bp, Homo sapiens; identical to SEQ ID NO: 121342

SEQ ID NO: 127681 - DNA, 9026 bp, Homo sapiens; identical to SEQ ID NO: 121339

SEQ ID NO: 127682 - DNA, 2460 bp, Homo sapiens
atgatgaaatttattcctgctgccttaaaaatatgtatcccttcttcacccatcatgactgtccccaggtacaggcatccttcacctgctattgttgcaagaacagtcagaattttacatacactactaactctggttaacaaacacagaaattgtgacaaatttgaagtgaatacacagagcgtggcctacttagcagctttacttacagtgtctgaagaagttcgaagtcgctgcagcctaaaacatagaaagtcacttcttcttactgatatttcaatggaaaatgttcctatggatacatatcccattcatcatggtgacccttcctataggacactaaaggagactcagccatggtcctctcccaaaggttctgaaggataccttgcagccacctatccaactgtcggccagaccagtccccgagccaggaaatccatgagcctggacatggggcaaccttctcaggccaacactaagaagttgcttggaacaaggaaaagttttgatcacttgatatcagacacaaaggctcctaaaaggcaagaaatggaatcagggatcacaacaccccccaaaatgaggagagtagcagaaactgattatgaaatggaaactcagaggatttcctcatcacaacagcacccacatttacgtaaagtttcagtgtctgaatcaaatgttctcttggatgaagaagtacttactgatccgaagatccaggcgctgcttcttactgttctagctacactggtaaaatataccacagatgagtttgatcaacgaattctttatgaatacttagcagaggccagtgttgtgtttcccaaagtctttcctgttgtgcataatttgttggactctaagatcaacaccctgttatcattgtgccaagatccaaatttgttaaatccaatccatggaattgtgcagagtgtggtgtaccatgaagaatccccaccacaataccaaacatcttacctgcaaagttttggttttaatggcttgtggcggtttgcaggaccgttttcaaagcaaacacaaattccagactatgctgagcttattgttaagtttcttgatgccttgattgacacgtacctgcctggaattgatgaagaaaccagtgaagaatccctcctgactcccacatctccttaccctcctgcactgcagagccagcttagtatcactgccaaccttaacctttctaattccatgacctcacttgcaacttcccagcattccccagaatgtgtccccgttgttaagcgacacatgactgcaatgaaattcagtcctggaaggaaaagaagaagtaactggctgttctctttttctccaggaatcgacaaggagaacgttgaactctcccctaccactggccactgtaacagtggacgaactcgccacggatccgcaagccaagtgcagaagcaaagaagcgctggcagtttcaaacccttatccatacctgtaagtgggctgcagtctgtacttttcacttctctgcaggagcacatgggagaggtggtcaaggtgggcaaggagcggggtggtcatgaaaggcttccgcatacccaacacaacgtaggtgctcaacaaaaacgtgacaaccccagaaagaatgcctgtgacgtgctttgctggccccagcagcacagcgcttcctccgggatgaatgcagtcacggaacgcgccaatgcaggaggcccccaggacatcctgagcgctcgggagacgccaggcgcggcagcgggcacgggtagcggaaaggggcgcgaccccgcggaatcctccggcagggcagggcctttgggtggctccgggtgtccagaggaaggggagccaagacttcggccccccccgggtatcctggccaagccggcccctgctttctgccccccggagcccgtgcccgagcgtcacgcgtcacgcctagggtggctttgcgcccaccttccttcctcggccatgcaggtccttctgagcggtctgcacatccacccttgtctgggggagagagctgccagaatccgggccataggctccccaccccacccggcgctgcggagaccaagatgcaagggtctgtgtacgtcctgctggaccgggccagggggtgaaagggaccggccagccaagcccttccgtttttccagtggctcccatctggggcaggctgagcagactcctggcatggggatagtcgcgctccttcctctcagaacacagactgcaggtcggataaagaagctaccagctctggctgaaacctggagtccccgaacccagagcctcagtagtgggaagggcctcccaacaacctctggcaggggccaccggcctcagccacgtgcccagcaagcctcacccacttctcccccagctggacagttcctgccattagaaccttctccctcatacactctagagacagacctgcttgtcacttag

SEQ ID NO: 127683 - DNA, 571 bp, Homo sapiens
aaattcagaagaacaaacttcagcaggaattcttctatgagtttgaagggggtgtcaagcttggcagtggggcctttaatttgatgctgtcccttttaccagcaaggattatcagactactagaatttattggattttctgggaatagggagttgggcctcctgcagttacgtgaaggtgcttcaggaaggagcatgaggtctgcactgtgctgcttaaccatcttagcttttcatacttacatctccctaatacttggtacaggagaagtgaatgttgcggaagcagagcgtctcctggcacccttcctccagcagtttccaaatggctcactcgtgttgttttatcatgcccgaatagagttgctgaaagggaatcttgaagaggcacaagaagtatttcaaaaatgcgtttcagttcaagaagaatggaaacagtttcaccatctctgctactgggagctaatgtggattaatgttttccaacaaaactggatgcaggcatattactattcagatctgctttgcaaagagagtaaatggtccaaggcaacttatgtgttcttgaaaac

SEQ ID NO: 127684 - DNA, 870 bp, Homo sapiens
atgatcaacttcatcaaaggtggactcaaaattagaacaagttaccaaatatataaagaatgtctttctatcctgcatgaaattcagaagaacaaacttcagcaggaattcttctatgagtttgaagggggtgtcaagcttggcagtggggcctttaatttggagttgggcctcctgcagttacgtgaaggtgcttcaggaaggagcatgaggtctgcactgtgctgcttaaccatcttagcttttcatacttacatctccctaatacttggtacaggagaagtgaatgttgcggaagcagagcgtctcctggcacccttcctccagcagtttccaaatgtacgctcagtatttcaaagtggctcactcgtgttgttttatcatgcccgaatagagttgctgaaagggaatcttgaagaggcaacttatgtgttcttgaaagcagcaattttgagtatgcttccagaggaggatgtagtagcaacgaatgagaatgtggtaactttattcagcttaagcattctagggatctgtaccttcagatctggggcagaattagttgcaggtatttatatgtcctatatgtttggccacaaagtacttacacttctacagaataatgttccacaagcagagacaaaagggggaaagagggaagaaggaaaaagaaaggagaccagagaggctgatgattttcggaacacaagcaatgaagaagtttggcgcatttcaaaagacaaagctcccaagtatatgcttttgggtgttttattagtcatcttaggttcctatttttatcgtgaggtagatgaaaagggaatggatgaaggcgtcagaaaaaaaaaaaggatgtcaggtgaaacagggtaa

SEQ ID NO: 127685 - DNA, 2241 bp, Homo sapiens
atggggctctttggggagagcaggcagctcccaaatgggtttaaatggcttctgagaacagggaaagggtaccgagctcgaattcgtatattggaaagtctgattcagttacgatcagtgtatggaatcacaagaagatccataagaaacaaggtgctggatttctcggttgtgttcgtcttctttccaatgccatcaaccgcctcaaagacactggttgatttcttaccattttgtaaaattttatctgaaaactatggagcaaaagagtgtgattttctgaggcacagaacaaaaacttcacgtcttacgcggcagccatgtgaaagttttcccaagccatgggtctacaataatcgttgctgcagtgtgtgcagtggtggaggagctgagcgcttgcagggagtccgctgtgatatgctgccggaagctgtgggatggcagcctgtggtcctgcggctcctggctgagtcatggtcaacttatgctgtcactttttttcttcaacccagagaatgtctttctatcctgcatgaaattcagaagaacaaacttcagcaggaattcttctatgagtttgaagggggtgtcaagcttggcagtggggcctttaatttgaccaaagagagtctacagtatgcattacaaaccttgactatgaatggctgctcagttgaagatctaggactggatttcactctgccagggtttcccaatatcgaactgaagaaaggagggaaggatataccagtcactatccacaatttagaggagtatctaagagtatgtaactgtgtctttggggggttcgtggcctgttacaaccggaccacaaagcatgaagtgagcggtgggagaggctcactcgtgttgttttatcatgcccgaatagagttgctgaaagggaatcttgaagaggcaacttatgtgttcttgaaagcagcaattttgagtatgcttccagaggaggatgtagtagcaacgaatgagaatgtggtaactttattcagacaggtggacagcttgaagcagagaattgccgggaaatctatccctactgagaagtttgctgtgaggaaggctcggcgttactccgcctccttacctgcacctgtgaagctcatcttacctgccctggaaatgatgtatgtctggaatggtttttcaatagtgagcaaaagaaaagacctttctgaaaatctgttagtaactgttgaaaaagctgaggcagctttacaaagtcaaaattttaacagcttctctgtggatgatgagtgcttagtgaagttacttaaaggatgttgcctcaagaacttacagcggcccttgcaagctgaactatgttacaatcatgttgtggaaagtgaaaagctactgaagtatgaccactacctagtgccgttcactctatttgaattggcatctttgtataaaagccagggggaaattgacaaggccataaagttcctagaaactgcaagatgttcaggttgcctgaatacgtctgccctggtggattacttcaggcacccctgcccaagaacattcatggatgccacacctggaacctacttgaccaacacttctaatgattttcatgccaagttgtctggagtacagcagaaagcttggcaaagtggattgaagcacttgcctgagcctgctgctcctgcagctccaaaaccaaatgggagattttcagtggggcagacccctctcatggacgaacttcacacaggtggaagacaagaatatgacaaagctagcgagttaagatggaaattgtttggaaaagccttagtaggtgatgcagctttcctcactctgtgtcagttctacgatcaggatggcagtttctatgatctggaggcagaggagtcaggatgctcctctgagtgtgcgtgttgtaactggagggcacacggtgagcccaccagtactggggagctaagggaaaccaacactggaggagcactaggaaatttatgtaagtattttagtgtccatgctgaggtttgtgaggaggaggagaaggcacagaaggctcccaggagtgggctgtccatgtaccctattgttggacgttttcgaagatgccttggaaaccatctcaatatgcctgtgtttgcacaaaaacaactcttttgttcaaccgagttagatggtttaatattagcattgtctggttctcagaacatcatccaaaatgactcctgtgatggagatgcttttgattcgtga

SEQ ID NO: 127686 - DNA, 574 bp, Homo sapiens
  misc_feature (1)...(574): n = a,t,c or g
cccccacatcagcacgggttgttggccttggggggcggcacagctgacccctgtatccgcttttggaacacgtgccagggccaaccactgcagtgtattcgacacgggctcccaagtgtgcaatctggcctggtccaagcacgccaacgagctgggtgagcacgccggnctactcacagaaccagatccttgtttggaagtaccctcccctgacccaggtggccaagctgaccgggcactcctaccgcgtgctgtacctggcaatgtcccctgatggggaggccatcgtcactggtgctggagacgagaccctgaggttttggaacgtctttagcaaaacccgttcgacaaaggagtctgtgtttgtgctcaaccttttcaccaggatccggtaaacctgccgggcaggaccgtgccacaccagctgtccagagtcggaggaccccagctcctcagcttgcatggactttgccttcccagcgcttgtcccccgaggaaggcggctgggcgggcggggagctgggcctggaggatcctggagtctcattaaatgcctgattgtgaaaaaaaaaaa

SEQ ID NO: 127687 - DNA, 3940 bp, Homo sapiens
atgcagccccagagcgtctccactgaggccttaccagaggccagacccagagccagccagctaagccaggcccagagcaactgtgtgcgacactgtttactgttgttgaaggtaaccaatcaacgaatccctgagaccggattccctaacgaggcgctcccggtgccaccgcccgccagacccgggccccacaccgtgatcgccgcctccgggacgcctcaccgagctctggagactcaggacccgtcggcccggccagtaaccgcaggcgcctctgccaccaccgcttcacctgccgcgacgcccgcagtgcggtctgggggccgccattttctcgcccacgtgaccgtgccggacggcaccaacgcagccgcgggctgtttacggaggacttcccgtggaccaggagctgtgctgactcaggaaggctacgagggcagggtgccaggtgtgactggccccaaggatgctccccaggaggagataatcccagggtgcaggacgcagatatcgaagcctcagccaaaagcaaggcctgtgggacatttggcagtatttgagccaggcatgctgctcagtgcccccactgtgcccagaacggcccagtacagaaagcagcctgtccccaatgtctggactgtgagccccgtgagggcaccactggactcagcacagagccagagccccttcctgggccacttatgttctcgtccagggacgttcatgtccccagtggccccaggtccctgtgtgcgttggcagacccaggtgtcttttaggtctgaaggtgtcatcaagtcagacagggctgtgggtactcggtggtaccaggaggctggagatgagcaacctcgggtcttttatctgcaggcaccatttggaagtgtggagagcagttctcacgggagtgggctggaggtgggagctgccccccacacagggaagaggaggtcagaggccgccagctcagcttgttcttctgcagcgcagctgagcgaggggcttagaggggtcgctgggggtcccggagctgagctgagcaccgctagcagcaccgggcaagtgtccaggcggtgggcgctggcacccgtccatgaggccttgcagaggggacacgagataagccacgaaaacccactaccacaggactgtgggctgcatgctcttgtccctcagagcctgactggccccatgtggccgagccagggaccacatgcgtcccttgactgcgggcccagtcagcgctgcctgcgggctcttgcagaagaaacagccctgcggttgatcctatctccaaccccaggccgggagctcgtcagaggccacctggagctgtggaggctaaccttgccgcgggccgagccctgcctcgccatggaccaggactatgagcggcgcctgcttcgccagatcgtcatccagaatgagaacacgatgccacgcgtcacagagatgcggcggaccctgacgcctgccagctccccagtgtcctcgcccagcaagcacggagaccgcttcatcccctccagagccggagccaactggagcgtgaacttccacaggattaacgagaatgagaagtctcccagtcagaaccggaaagccaaggacgccacctcagacaacggcaaagacggcctggcctactctgccctgctcaagaatgagctgctgggtgccggcatcgagaaggtgcaggacccgcagactgaggaccgcaggctgcagccctccacgcctgagaagaagggtctgttcacgtattcccttagcaccaagcgctccagccccgatgacggcaacgatgtgtctccctactccctgtctcccgtcagcaacaagagccagaagctgctccggtccccccggaaacccacccgcaagatctccaagatccccttcaaggtgctggacgcgcccgagctgcaggacgacttctacctcaatctggtggactggtcgtccctcaatgtgctcagcgtggggctaggcacctgcgtgtacctgtggagtgcctgtaccagccagaagggagagcggatgggagagcggatgggtgagcagatgggtgagcggatgggagagcgcatgggagagcgcatgggagagcggatgggagagcgcatgggagagcgcatggatgagcgcatgggagagcgcatggactggggcttcgagaccagcggcaaagctcacactgacctctgcctccaggtgacgcggctctgtgacctctcagtggaaggggactcagtgacctccgtgggctggtctgagcggggtcgagtgggctttagttccattttagattatgatgaaaacatctcagcagcagctttgaagcatatcatggggagggggaacctggtggcggtgggcacacacaagggcttcgtgcagatctgggacgcagccgcagggaagaagctgtccatgttggagggccacacggcacgcgtcggggcgctggcctggaatgctgagcagctgtcgtccgggagccgcgaccgcatgatcctgcagagggacatccgcaccccgccactgcagtcggagcggcggctgcagggccaccggcaggaggtgtgcgggctcaagtggtccacagaccaccagctcctcgcctcggggggcaacgacaacaagctgctggtctggaatcactcgagcctgagccccgtgcagcagtacacggagcacctggcggccgtgaaggccatcgcctggtccccacatcagcacgggctgctggcctcggggggcggcacagctgaccgctgtatccgcttctggaacacgctgacaggacaaccactgcagtgtatcgacacgggctcccaagtgtgcaatctggcctggtccaagcacgccaacgagctggtgagcacgcacggctactcacagaaccagatccttgtctggaagtacccctccctgacccaggtggccaagctgaccgggcactcctaccgcgtgctgtacctggcaatgtcccctgatggggaggccatcgtcactggtgctggagacgagaccctgaggttctggaacgtctttagcaaaacccgttcgacaaaggcagcttcctccctgggcctgcggctcagcgcatctgccatccccatgtgtctgcaggagtctgtgtctgtgctcaacctcttcaccaggatccgggcgagaaccacattggacggtcccggctcagaccgtctgtactcagagcgacggatgccccctgggaccctcactgcctccgtctgttcatcacctgcccaccggagccgcatgctcttcctggaactgcccacgtctgcacagaacagaccaccagacgccagggctgattgcagtctctctggaagcatctgtgtcatggccatcgcccggcggtcagtgggcttcagatgggcctgtgcatcctggccaagcgtcaccctcacactggaggaggatgtctgctctggacttatcaccccaggagaactgaacccggacctgctcactgccctggctggagaggagcacaacagatgccacgtcttcgtgcattcgccaacacttgttaaatactcagaacgactctccagcccttccctcgaggccacctcaccccgcagctgggaggagggagtggtcagcgtggttgccgagacactgggtggcctttatgctgtcaacggtggcctcagaggccttctggcaggagcccgggggatccaggcagacatgcaaaccctcaggcaagaggctgcacggccctgtatcccctcggggaccctcgaggccagcttcccagcaccgctgtacagtggccgctcactgtggggtctacagacctggagacaggccaagaacaaatgtgtctgcggccgtctccaaggactgcaaacgcactgggagcttcggccacagaaatgttcgccctctgaaatccaggcct

SEQ ID NO: 127688 - DNA, 619 bp, Homo sapiens
caaggatgccgtgaagcccaggtggggactgtctcttggatccacagactggctccgccagtggccccgagccaccttgcccaggccttacatgccttggtctggccttggggcctggtccttgggtttgaacatggtggggtgcaagcccatgaaatgggcaaaccgggggtcctcaggccccccaccaatcagcccctggcgtctggtggtctgttctgtgcagacgtgggcagttcccaggaagagcatgcggctccggtgggcaggtgatgaacagacggaggcagtgagggtcccagggggcatccgtcgctctgagtacagacggtctgagccgggaccgtccaatgtggttctcgccctttgggaagggagacagagcccctgctgctgagggtccccgaccacgtgcccaccccagatactggtggacatggttcacaatcaggcatttaatgagactccaggatcctccaggcccagctccccgcccgcccagccgccttcctcgggggacaagcgctgggaaggcagagtccatgcaagctgaggagctggggtcctccgactctggacagctggtgtggcacggtcctgcccggcaggtttaccggat

SEQ ID NO: 127689 - DNA, 1359 bp, Homo sapiens
gcaatgtcccctgatggggaggccatcgtcactggtgctggagacgagaccctgaggttctggaacgtctttagcaaaacccgttcgacaaaggcagcttcctccctgggcctgcggctcagcgcatctgccatccccatgtgtctgcaggagtctgtgtctgtgctcaacctcttcaccaggatccgggcgagaaccacattggacggtcccggctcagaccgtctgtactcagagcgacggatgccccctgggaccctcactgcctccgtctgttcatcacctgcccaccggagccgcatgctcttcctggaactgcccacgtctgcacagaacagaccaccagacgccagggctgattgcagtctctctggaagcatctgtgtcatggccatcgcccggcggtcagtgggcttcagatgggcctgtgcatcctggccaagcgtcaccctcacactggaggaggatgtctgctctggacttatcaccccaggagaactgaacccggacctgctcactgccctggctggagaggagcacaacagatgccacgtcttcgtgcattcgccaacacttgttaaatactcagaacgactctccagcccttccctcgaggccacctcaccccgcagctgggaggagggagtggtcagcgtggttgccgagacactgggtggcctttatgctgtcaacggtggcctcagaggccttctggcaggagcccgggggatccaggcagacatgcaaaccctcaggcaagaggctgcacggccctgtatcccctcggggaccctcgaggccagcttcccagcaccgctgtacagcgatgactacctgtccctggagggttcccgctggccaccagccatcaggcaggccacacgctggaagtacacgcccatgggacgggacgcagccggccagctgtggtacacaggcctgaccaactcggacgcctgggaagcctggtacaacctgccacgggccccggccagccccttccgcgaggcctacaaccgctggcacagctgctaccaacacccctacacccagcacctgcgggagaccgcctggcatgaccccatcgtccctgcccagtaccaggcccccagcacccggtgggggagcgcgctgtggaaagacaggccaatccggggcaaggaatacgtgctcaacaggaaccggtacggggtggagccactgtggagggcatcagactacgtgccctccctgtcggcaccccagcgcccgcccggcaccacccagaactaccgggaagtgggtcctggaaccatactgcccctccaccttgcctggttccccgcttcccttacaacccactccccgttaaagccatgc

SEQ ID NO: 127690 - DNA, 359 bp, Homo sapiens
  misc_feature (1)...(359): n = a,t,c or g
ggcacgaggtggccaggcttcagtcactggacacaagctttctggagcaaggtgatgtcacaacacccacctcagagcaagtggagaagctaaaggaggttgcaggcttgcctgacgactgtgctgtcaccgagcgcctggctgagctggcctttctttacttatacctgtgcatctgccggaatcatagaggcctgtagatccaggatgtcnnnnnnnnnnnnnnnnnnnnnnnnnnnnnnnnnnnnnnnnnnnnnnnnnnnnnnnnnnnnnnnnnnnnnnnnnnnnnnnnnnnnnnnnnnnnnnnnnnnnnnnnnnnnnnnnnnnnnnnnnnnnnnnnnnnnnnnnnnnnnnnnnng

SEQ ID NO: 127691 - DNA, 513 bp, Homo sapiens
gccttctcatgatcactccaagcttggcacgagggcgtccgggaaagtcatccttcatggagaacatgccgcggtacatggcaaggtagcactggctgtatccttgaacttgagaacattcctccggcttcaaccccacagcaatgggaaaggggacctcagcttacccaacattggtatcaagcgggcctgggatgtggccaggcttcagtcactggacacaagctttctgggtggaccaaggaggatttggagctaattaacaagtgggccttccaaggggagagaatgattcacgggaacccctccggagtggacaatgctgtcagcacctggggaggagccctccgataccatcaagggaagatttcatccttaaagaggtcgccagctctccagatcctgctgaccagcaccagagggcgctcgcaatatcagggcccttgtgggtggggggagaaacaggcttgctcgaggtgccagatatggggggccccctcctgctctcatggg

SEQ ID NO: 127692 - DNA, 1333 bp, Homo sapiens
cccgggtcgacgatttcgttggggagctgctacggcttcggcgcggaggggcggctgacgtggaggcggcggcggccgcaggattcccaggagccatgttgtcacaagtcctactggtgtctgctccggggaaagtcatccttcatggagaacatgccgtggtacatggcaaggtagcactggctgtatccttgaacttgagaacattcctccggcttcaaccccacagcaatgggaaagtggacctcaacttacccaacattggtatcatgcgggcctgggatgtggccaggcttcattcactggacacaagctttctgggtgagtgcaaggaggagaaaccagagcaaggtgatgtcacaacacccacctcagagcaagtggagaagctaaaggaggttgcaggcttgcctgacgactgtgctgtcaccgagcgcctggctgtgctggcctttctttacttatacctgtccatctgccggaagcagagggccctgccgagcctgggatatcgtagtgtggtcggagctgccccccggggcgggctttgggctccagcgccgcctactcggtgtgtctggcagcagccctcctgactgtgtgcgaggagatcccaaacccgctgaaggacggggatttgcgtcaacaggttggaccaaggaggattttggagctaattaacaagttgggcctttccaaggggagagaatgattcacgggaaccccctccggagtgggacaatgctgttcagcacctgggggagggagccctccgattaccatcaaggggaagattttcattcctttaaagaggttcgccagttttccagatcctggtttgaccaacaccaaagttccttcggcaattaccagggcccttgtggctggcgtcagaaacaggctgctcaagttcccagagatcgtggcccccctcctgacctcaatagatgccatctccctggagtgtgagcgcgtgctgggagagatgggggaagccccagccccggagcagtacctcgtgctggaagagctcattgacatgaaccagcaccatctgaatgccctcggcgtgggccacgcctctctggaccagctctgccaggtgaccagggcccgcggacttcacagcaagctgactggcgcaggcggtggtggctgtggcatcacactcctcaagccagggctggagcagccagaagtggaggccacgaagcaggccctgaccagctgtggctttgactgcttggaaaccagcatcggtgcccccggcgtctccatccactcagccacctccctggacagccgagtccagcaagccctggatggcctctga

SEQ ID NO: 127693 - DNA, 2780 bp, Homo sapiens
atgttgtcagaagtcctactggtgtctgctccggggaaagtcatccttcatggagaacatgccgtggtacatggcaaggtagcactggctgtatccttgaacttgagaacattcctccggcttcaaccccacagcaatgggaaagtggacctcagcttacccaacattggtatcaagcgggcctgggatgtggccaggcttcagtcactggacacaagctttctgggtgagtgcaaggaggagaaaccagagcaaggtgatgtcacaacacccacctcagagcaagtggagaagctaaaggaggttgcaggcttgcctgacgactgtgctgtcaccgagcgcctggctgtgctggcctttctttacttatacctgtccatctgccggaagcagagggccctgccgagcctggatatcgtagtgtggtcggagctgccccccggggcgggcttgggctccagcgccgcctactcggtgtgtctggcagcagccctcctgactgtgtgcgaggagatcccaaacccgctgaaggacggggattgcgtcaacagcaattctgacgacaatatgttgaaaaacattgaactgtttgataagctgtctctgcgctttaacggaagggtcctgttcataaaggatgttattggggatgaaatctgctgctggtccttttatggtcagggccggaagattgctgaagtctgttgtacctccatcgtctatgccactgagaagaaacagaccaaggtggagtttcccgaagcccggatttatgaggagaccctgaacattttgctgtatgaggcccaggatggccggggacctgacaatgcgctcctgggaggccacaggcggggcggcggggcgcttcccaccacctgggacgaggacgaggagcgggagcggatcgagcgcgttgcggaggatccacattcaagcgcccttgattgaccgggcccaccttgcaccagttgagcaggcaagagaccgagccgccctcctctcaccgcccccactccctgccgtgctacacccagattcctgttgcaggctgccgggccccttctgcttcccttggagcctggagatacttttgtaacaagccagatgattattttggtattgcttgacaaggcaaattgattgtcttgacccaggcgtatgacccctgtcgttgaacaagctgtgtctaagatctctacttttcatgagaatctgagactctttggagccaggctttctcggttctcagaggaaaagtatgaatgagtgtgaagtgtatgtgagaacttttgtttgcaatatttatttttgtgggtgtcgacttcctatgtgggctttttgggtgacactcccttaagggttcagtttgacaattctgagagttgtcctgcagttggaggccaccagaggtatctgagctccctgcttcctatttcataatcctccagccccagcaggtccactcctggttcctgtgtgtttggcccgggcacaatccccactgctttgctagacgtgctttctgccatgtggctttgggcctaagagcttgttgataattgcagcttgtggcagtgggaaatatggctgaatgagcgtctaaatccgttgagaccagtgcaacttttgggtgcaaaggctttgtttagggatcaagccttttgccaccttgggctgggtctttgggcctgggtgctcactgggaccccatatgtctgcgtaggagcagaactttccatgggcagtaagtgtccagctctgtttctggttctttccccaactccagccccgtccagttgttctcctgattgacccgactccactccagggaaggccatcttgaccctgtgacagggcatagctcataaactacccctccctgggatcccgctcctcttcagcctccttccccatgaagctgggctaactttctaagtcattttgcttaaaaaatcaggtgtggcccataccctttgtcctcccagccaggcatccaggcagggaaccccttaaaaccaccagccccagggaagcttccctgctataaacacagacccccttgtctttgcctctgatttttacacagtgtaggagtgggccagcagtgaacaggttgagggatgtgcgggtaggataggataactttggggtctgggtttgtgtctgtgtttcatgtttgttttaaggggatatgtgtgactgtggggtgggggacgtgtgcttgttgggggcacaggtggcggcccccctgctggaaccccggctgggcgcaacgccctatgtaggaacgggtgttcctccagtgaccctacctccccggctccctcctgcaccctgcaaaggaacaggagtgaagtcgtgacctgaacaggggtggttgaagactagactagggtagagtagttacccaggagatgtgaatgtgccgtcaggtgatggatgggttttgtcaagggaattcgttacccgtttttataccaaaggtattaacatggggcagcctttgacacatgtattccgaaaaacgagtttatattttcaaacggtttttacagcttagactttgtacttactgccctgcctgtgacagttgtatgccttcattttgtatccaacagcaaagttctacaataaaactttaaaacaatcatgactgaatgtcaaaatcgtgtattgggcagatgctttaactgtcggtgagaaccttatataggccactgggattattaggccagggagagggctccaaaagttcggaaaatttaaccgtaagggta

SEQ ID NO: 127694 - DNA, 1656 bp, Homo sapiens
atgataccccaaaaccaaaaggccattgctaattatctgaaatcctggaatgagaccctcacctccaggctggctactttacctgagaatccaccagctattgactggacttactacaaggccaatgtggccaaggcaggcttggtggatgactttgagaagaagtttaatgtcctgaagcttcctgtaccagaggataaatatactgcccaggtggatgctgaagaaaaagaagatgggaaaacttgtgctgagtgggtgtctctctcaaaggccaggcagatgctgccatgcctgctgagtagcctgcgtcatgtgcccaacctgaactgtagccagttagtgctgtctaataaattggtctccaaagggggcaagcttctttttccactgttagggctagaagtggccctcacagacctccagagctccagaaataatgtgcggcaccacacggaggagatcactgtggaccacctgcttgttcgccggggccaggccttcaacctcaccctgtacttcaggaaccggagcttccagccaggcctggacaacatcatcttcgtggttgaaactgaggtgagcttgtgcgctcctcccacggcggccgtgggtcggtacctcttgaaaatccacatcgactccttccaggggtctgtgacggcctaccagctaggggagttcatcctgcttttcaatccctggtgcccagacggcgccaaccctgcggagtggacgggcagcgtggccatcctgaagcagtggaacgccacaggctgccagcccgtgcgctacgggcaatgctgggtctttgctgccgtcatgtgcacagtgatgaggtgtctggggatccctacccgtgtgatcaccaacttcgactctggccacgatacagatggaaacctgatcatagatgagtattatgacaacacaggcaggattttggggaataagaagaaggatactatctggaacttccatgtctggaatgagtgctggatggcccggaaggatctgccccctgcatatggaggctggcaggtgctggacgccacacctcaggagatgagcaacggcgtctactgctgtggccctgcctctgtcagagccatcaaagaaggagaagtggacctgaactatgacacgccctttgtgttttcgatgtacagccagtacctgtcaacagacaagctgatccgcatcagtgccctgggtgaagagaaaagcagtcctgagaaaatcctggtgaacaagatcatcaccttatcttatccaagcatcacgattaataattcttatgccaaagtggcatatttggaggtggcatatcctgccaccttacagaatggtgcccttcgtaaatatctggttctaggagcagccgttgtgaaccagccactctccatacaggtgatattttcaaaccccctctcggagcaggttgaggactgtgtgctgactgtggaaggaagtggcctcttcaagaaacagcagaaagtcttccttggagtcctcaaaccccaacaccaagcaagcatcattctggagaccgtccccttcaagagtggacaaaggcagatccaagctaatatgagaagcaacaagtttaaggacattaagggttacaggaatgtttatgtagactttgcattataa

SEQ ID NO: 127695 - DNA, 2604 bp, Homo sapiens
atgataccccaaaaccaaaaggccattgctaattatctgaaatcctggaatgagaccctcacctccaggctggctactttacctgagaatccaccagctattgactggacttactacaaggccaatgtggccaaggcaggcttggtggatgactttgagaagaagtttaatgtcctgaagcttcctgtaccagaggataaatatactgcccaggtggatgctgaagaaaaagaagatgggaaaacttgtgctgagtgggtgtctctctcaaaggccagcaacactgccaagaaaaacctgagggcaaggctagaagtggccctcacagacctccagagctccagaaataatgtgcggcaccacacggaggagatcactgtggaccacctgcttgttcgccggggccaggccttcaacctcaccctgtacttcaggaaccggagcttccagccaggcctggacaacatcatcttcgtggttgaaactggaccgctgccagacctggccttggggactcgggctgtgttcagcctggcacgccatcacagccccagcccctggattgcctggctggagaccaatggggccacctccacagaggtgagcttgtgcgctcctcccacggcggccgtgggtcggtacctcttgaaaatccacatcgactccttccaggggtctgtgacggcctaccagctaggggagttcatcctgcttttcaatccctggtgcccagaggatgctgtctacttggacagtgaaccccagaggcaggagtatgtcatgaatgattatggcttcatctaccaaggcagcaagaactggatccgcccatgtccctggaactatggacagtttgaagacaaaatcatagacatctgcctgaagctgctagacaagagcctgcacttccagactgacccagccacagactgtgctctgcggggaagccccgtctacgtcagcagagtggtgtgtgccatgatcaacagcaatgatgataatggggtgctcaatggaaactggagtgagaattacacagacggcgccaaccctgcggagtggacgggcagcgtggccatcctgaagcagtggaacgccacaggctgccagcccgtgcgctacgggcaatgctgggtctttgctgccgtcatgtgcacagtgatgaggtgtctggggatccctacccgtgtgatcaccaacttcgactctggccacgatacagatggaaacctgatcatagatgagtattatgacaacacaggcaggattttggggaataagaagaaggatactatctggaacttccatgtctggaatgagtgctggatggcccggaaggatctgccccctgcatatggaggctggcaggtgctggacgccacacctcaggagatgagcaacggcgtctactgctgtggccctgcctctgtcagagccatcaaagaaggagaagtggacctgaactatgacacgccctttgtgttttcgatggtgaatgctgactgcatgtcctggctcgtccagggagggaaggagcagaagcttcaccaggacacgagttctgttggcaattttatcagcacaaagagcatccagagtgacgagcgggatgacatcacagagaactacaagtatgaagaaggatccctccaggagaggcaggtgtttctgaaggctctgcagaagctgaaggctagaagcttccatggctcccaaagaggagcagagttgcaaccttccaggcccacatcactgagccaggacagccctcggagcctgcatacaccttcccttcgacccagtgatgtggtgcaagtctccctgaaattcaagctgctcgacccgcccaacatgggccaggatatatgctttgtcctgctggccctcaacatgtcctcccagttcaaggacctcaaagtgaacctgagtgcccagtctctgctgcacgatggcagccccctgtccccattctggcaggacacagcgttcatcacactctctcctaaagaagcaaagacctacccctgcaaaatctcctattcccagtacagccagtacctgtcaacagacaagctgatccgcatcagtgccctgggtgaagagaaaagcagtcctgagaaaatcctggtgaacaagatcatcaccttatcttatccaagcatcacgattaatgcaaataaagggaaactagagagcttttcttatatctgcttcttctcaattgtcttcggctcaaagaattcttatgccaaagtggcatatttggaggtggcatatcctgccaccttacagaatggtgcccttcgtaaatatctggttctaggagcagccgttgtgaaccagccactctccatacaggtgatattttcaaaccccctctcggagcaggttgaggactgtgtgctgactgtggaaggaagtggcctcttcaagaaacagcagaaagtcttccttggagtcctcaaaccccaacaccaagcaagcatcattctggagaccgtccccttcaagagtggacaaaggcagatccaagctaatatgagaagcaacaagtttaaggacattaagggttacaggaatgtttatgtagactttgcattataa

SEQ ID NO: 127696 - DNA, 599 bp, Homo sapiens
gcagccagggtcggtgaaggatcccaaaatggctgggcgaaaacttgctctaaaaaccattgactgggtagcttttgcagagatcataccccaaaaccaaaaggccattgctagttccctgaaatcctggaatgagaccctcacctccaggttggctgctttacctgagaatccaccagctatcgactgggcttactacaaggccaatgtggccaaggctggcttggtggatgactttgagaagaagtttaatgcgctgaaggttcccgtgccagaggataaatatactgcccaggtggatgccgaagaaaaagaagatgtgaaatcttgtgctgagtgggtgtctctctcaaaggccaggattgtagaatatgagaaagagatggagaagatgaagaacttaattccatttgatcagatgaccattgaggacttgaatgaagctttcccagaaaccaaattagacaagaaaaagtatccctattggcctcaccaaccaattgagaatttataaaattgagtccaggaggaagctctggcccttgtattacacattctggacattaaaaataataattatacaaaaaaaaaaaaaaaaa

SEQ ID NO: 127697 - DNA, 435 bp, Homo sapiens
gccggcggaacagccagaggagcagagaggcaaagaaacattgtgaaatctccaactcttaaccttcaacatgaaagtctctgcagtgcttctgtgcctgctgctcatgacagcagctttcaacccccagggacttgctcagccagatgcactcaacgtcccatctacttgctgcttcacatttagcagtaagaagatctccttgcagaggctgaagagctatgtgatcaccaccagcaggtgtccccagaaggctgtcatcttcagaaccaaactgggcaaggagatctgtgctgacccaaaggagaagtgggtccagaattatatgaaacacctgggccggaaagctcacaccctgaagacttgaactctgctacccctactgaaatcaagctggagtacgtgaaatgacttttccattctcctctggcctcc

SEQ ID NO: 127698 - DNA, 636 bp, Homo sapiens
atgaaagtctctgcagtgcttctgtgcctgctgctcatgacagcagctttcaacccccagggacttgctcagccaggccttgggctcccctctgtaaatgaagttgctgcacaggatgtgtggtttgcacgctggggaacagccaaagcaccaggagcttatgaattgaatttcctggacccctctcctggtttcaatttggtgtatcagggtggggctgaacagcctgaaaacattctgacgattagctccttgtccgcagaaggtgctcagaagccacggcctcctataggaaagggagcctttcttaagtccctgaaagagacaatgaaggctcataatcttaagggttgccaaaagtctttgcaaaattctgccttgaccagcgctaaagcctcacacaccattgctgagtacgtgcagtgtctgaaggacaagttagtatcaagctgtggagagaagttttcgcagaagcagggcctctccctctgtgccagcatcaagctgaaatcagtgctcatgagtgggctacagagggagccagctgttaaaacatttaccagcataaaggactcggtgaaggacttgcccagcgaagtccagccacaggactccacacttcagcacaatggatga

SEQ ID NO: 127699 - DNA, 1291 bp, Homo sapiens
atgggcgacaaagggacgcgggtgttcaagaaggccagtccaaatggaaagctcaccgtctacctgggaaagcgggactttgtggaccacatcgacctcgtggaccctgtggatggtgtggtcctggtggatcctgagtatctcaaagagcggagagtctatgtgacgctgacctgcgccttccgctatggccgggaggacctggatgtcctgggcctgacctttcgcaaggacctgtttgtggccaacgtacagtcgttcccaccggcccccgaggacaagaagcccctgacgcggctgcaggaacgcctcatcaagaagctgggcgagcacgcttaccctttcacctttgagatccctccaaaccttccatgttctgtgacactgcagccggggcccgaagacacggggaaggcttgcggtgtggactatgaagccaaagccttctgcgcggagaatttggaggagaagatccacaagcggaattctgtgggtctggtcatccggaaggttcagtatgccccagagaggcctggcccccagcccacagccgagaccaccaggcagttcctcatgtcggacaagcccttgcacctagaagcctctctggataaggagatctattaccatggagaacccatcagcgtcaacgtccacgtcaccaacaacaccaacaagacggtggagaagatcaagatctcagtgcgccagtatgcagacatctgccttttcaacacagctcagtacaagtgccctgttgccatggaagaggctgatgacactgtggcacccagctcgacgttctgcaaggtctacacactgacccccttcctagccaataaccgagagaagcggggcctcgccttggacgggaagctcaagcacgaagacacgaacttggcctctagcaccctgttgagggaaggtgccaaccgtgagatcctggggatcattgtttcctacaaagtgaaagtgaagctggtggtgtctcggggcggcgacgtggccgtggaactgcccttcaccctaatgcaccccaaggcccaaagaggaacccccgcatcgggaagttccagagaacgagacgccagtagataccatatctcatagaacttgacacaaatgatgacgacattgtatttgaggactttgctcgccagagactgaaaggcatgaaggatgacaaggaggaagaggaggatggtaccggctctccacagctcaacaacagatagacgggccggccctgcctccacgtggctccggctccactctcgtgcactcggatgct

SEQ ID NO: 127700 - DNA, 1098 bp, Homo sapiens
  misc_feature (1)...(1098): n = a,t,c or g
atggcatgctcttggggaatgtggtggctgctgctgttgtttgaggaagccatcagagtcctgcttcctgaaggaggtggtcctggtgctgacaagaccatgggctcccgaggcttctggaagcagagtgttcaagaaggccagtccaaatggaaaggtagtgggaaacgnctcacccacagggtccacgaggtcgatgtggtccacaaagtcccgctttcccagatgaggacactgaggcccggagagatcttcatgccaagcaccactgccagtggagcagcagcggcagagaagctggggagctgcagcgacatctattggccgatccgtgtgggagccgagtcagctttaacttttcttggtatacatgcgtcatctgctggtggagatgggaaagtgcctttcttcgttcagtcaacaatccaacaagtatgtgctctcatggcacgctgtgactacacaacaggccccctctgcaatactcctcatcagcaattccaaacctttagcatcatgccttatcccccaattaatctcccgtgggaacccagagagccttctcaggaaagaggaggcttccatttctttttgggaccagaggaagtctcctcgtccagctcccaggcagaccgaggctccgagtggcagaactggggctggagggcatcttttggatctacctcctctgacggcaaaaccctctgcagtcctcggactgacagggcatcgacatcaagtctcacagcctgtgagtccgctcaaggctcactgggtctgggtctctgtttcagcgacgtggccgtggaactgcccttcaccctaatgcaccccaagcccaaagaggaacccccgcatcgggaagcaacccatgggcagaaagggccacacggggagttcacagagggcgaggcagctggggtggggtgggggccatcagagaaggacttctccgcagaggtggtgcttcagctgggtcttgaagatggacacacggaccacttgggccagcccagctcgggcaaggagaccactgccactcaaaagaggcacatctacattctacgcacaaacaggactgaatctcggatattctaa

SEQ ID NO: 127701 - DNA, 858 bp, Homo sapiens
atgcagatctttgtgaagaccctcacaggcaagaccatcaccctcgaggtcgagcccagtgacaccactgagaatgtcaaggccgaaattcaagacaaggagggcgttccacttgaccagcaatgtctgatatttgtgggcaaacagctggaggatggccgtactctctcagactgcaacatccagaaagagtccatcctgcacctggggctgcacctagcgcagctgagggtgctgatggacgcagaaatccgaggaactgagcttttcctcaaggtggcaacagtcaaggcagaaagagggcactggcgtcccaaaatgctgacctgggaagttgatgccacagagggagatttggtggggcagcaaagagcagaagatgctgaggctcacgttgaaaaaggagggaaaaccaggccttacggagaagttctttacaggcaaaacaagagggcaaagacacaaaacttgtcctatcccctaaaaggtgtagagaaagaaactttggtagtagtgattgacagtggtggtggtgatgctcaaatatggtggaaaggcgaggctgggcgaggtctaagaacagtatgtgctgtgatggctacatcacttagcattagagtcaaagaagccgagtttggaggggacctgggtttgtctgtacagggagctgcagagggcagcatggtggccttccccttgtcgaagcaggtagcccagggagcccaagggggcaacgatggatctggatgggaaccacatgaccaggaagtaaaagaagtacttttaccttttacagactaccggctgctggtaggtcttcctaatgtcatgttcacagacctcattctttatgattga

SEQ ID NO: 127702 - DNA, 450 bp, Homo sapiens
tcgggtcgacccacgcgtccgcggacgcgtggggaggcggccgagctgacgcaaacatgcagatctttgtgaagaccctcactggcaaaaccatcacccttgaggtcgagcccagtgacaccattgagaatgtcaaagccaaaattcaagacaaggagggtatcccacctgaccagcagcgtctgatatttgccggcaaacagctggaggatggccgcactctctcagactacaacatccagaaagagtccaccctgcacctggggttgcgcctgcgaggtggcattattgagccttctctccgccagcttgcccagaaatacaactgcgacaagatgatctgccgcaagtgctatgctcgccttcaccctcgtgctgtcaactgccgcaagaaaaagtgtggtcacaccaacaacctgcgttccaagaagaaagattaataaggttgtc

SEQ ID NO: 127703 - DNA, 472 bp, Homo sapiens
ggaggcaggagatggctctacggtatttaatggggcccagaatggtgtgtctcagctaatccaaagggagtttcagaccagtgcaatcagcagagacattgatactgctgccaaatttattggtgcaggtgctgcaacagtaggagtggctggttctggtgctggtattggaacagtctttggcagccttatcattggttatgccagggtaatcatttctatccctaaataagttaagagcatgcttgcagtagttgggaaacttaggctactgaaataataggctactttgcattaagtgcttactctgtgtcttgcattatatttaaaggggctttgtatggcattatctcacttaattctcataacaccatttgggatgttatgagaataacatctatgaaggactagagacacagaggccacattacttgcccaggtcatagctagtaaatgtcagaaaatgaatttt

SEQ ID NO: 127704 - DNA, 743 bp, Homo sapiens
ggcagagttcgacctctgctgcagcccgtgccgccgccgcctcctgggaagagaggaagcgggagaggagcccacgtcgcctgtcacccaatatctccagccgcgcagtcccgaagagtgtaagatgttcgcctgcgccaagctcgccatgcacccccatctctgatccgagctggatccagagttgcatacagaccaatttctgcatcagtgttatctcgaccagaggctagtaggactggagagggctctacggtatttaatggggccccagaatggtgtgtctcaagctaatcccgaagggaagtttcaagaccagtgcaatcagcaagaagacattggatactgctggccaaatttattgggtgcaggtgctggcaacagctagggagtgggctggtttctggtggctggtattgggaacagtcttttgggcaagccttatccattgggttatggccagaaaaccctttcgctggaagcagcagctggttctcatatggctatcctggggatttgccttgttttgaaagctatggggtctccttttgttttgatggttgctttcttgattttgtttgcccatgtaacagaaattactgcttgacatgttgggcattcatattaattacgggatgtaattctgtgtatcttactgtgactccgaaaactgtagtattggtgtcatgggaatgtacgttatttccacagtcatttcattaaagatgaaaactttaaaaaaa

SEQ ID NO: 127705 - DNA, 4491 bp, Homo sapiens
aaatgtagagaagcagccgataaaatagcattgcctgaagaagtttggaggctgagagcagcagtagactggccaactgcagagcaagttgtttctccagccgtgcggtgcagcctcatgcccccaacccagcttagccactgtaagaagacgttcactgtacagacgaccaaacttgccgtggaagagacagttgtgagattcccttgcaaatttacatacgagaatggcttgtgaaatcatgcctctgcaaagttcacaggaagatgaaagacctctgtcacctttctatttgagtgctcatgtaccccaagtcagcaatgtgtctgcaaccggagaactcttagaaagaaccatccgatcagctgtagaacaacatctttttgatgttaataactctggaggtcaaagttcagaggactcagaatctggaacactatcagcatcttctgccacatctgccagacagcgccgccgccagtccaaggagcaggatgaagttcgacatgggagagacaagggacttatcaacaaagaaaatactccttctgggttcaaccaccttgatgattgtattttgaatactcaggaagtcgaaaaggtacacaaaaatacttttggttgtgctggagaaaggagcaagcctaaacgtcagaaatccagtactaaactttctgagcttcatgacaatcaggacggtcttgtgaatatggaaagtctcaattccacacgatctcatgagagaactggacctgatgattttgaatggatgtctgatgaaaggaaaggaaatgaaaaagatggtggacacactcagcattttgagagccccacaatgaagatccaggagcatcccagcctatctgacaccaaacagcagagaaatcaagatgccggtgaccaggaggagagctttgtctccgaagtgccccagtcggacctgactgcattgtgtgatgaaaagaactgggaagagcctatccctgctttctcctcctggcagcgggagaacagtgactctgatgaagcccacctctcgccgcaggctgggcgcctgatccgtcagctgctggacgaagacagcgaccccatgctctctcctcggttctacgcttatgggcagagcaggcaatacctggatgacacagaagtgcctccttccccaccaaactcccattctttcatgaggcggcgaagctcctctctggggtcctatgatgatgagcaagaggacctgacacctgcccagctcacacgaaggattcagagccttaaaaagaagatccggaagtttgaagatagattcgaagaagagaagaagtacagaccttcccacagtgacaaagcagccaatccggaggttctgaaatggacaaatgaccttgccaaattccggagacaacttaaagaatcaaaactaaagatatctgaagaggacctaactcccaggatgcggcagcgaagcaacacactccccaagagttttggttcccaacttgagaaagaagatgagaagaagcaagagctggtggataaagcaataaagcccagtgttgaagccacattggaatctattcagaggaagctccaggagaagcgagcggaaagcagccgccctgaggacattaaggatatgaccaaagaccagattgctaatgagaaagtggctctgcagaaagctctgttatattatgaaagcattcatggacggccggtaacaaagaacgaacggcaggtgatgaagccactatacgacaggtaccggctggtcaaacagatcctctcccgagctaacaccatacccatcattggttccccctccagcaagcggagaagccctttgctgcagccaattatcgagggcgaaactgcttccttcttcaaggagataaaggaagaagaggaggggtcagaagacgatagcaatgtgaagccagacttcatggtcactctgaaaaccgatttcagtgcacgatgctttctggaccaattcgaagatgacgctgatggatttatttccccaatggatgataaaataccatcaaaatgcagccaggacacagggctttcaaatctccatgctgcctcaatacctgaactcctggaacacctccaggaaatgagagaagaaaagaaaaggattcgaaagaaacttcgggattttgaagacaactttttcagacagaatggaagaaatgtccagaaggaagaccgcactcctatggctgaagaatacagtgaatataagcacataaaggcgaaactgaggctcctggaggtgctcatcagcaagagagacactgattccaagtccatgtgaggggcatggccaagcacagggggctggcagctgcggtgagagtttactgtccccagagaaagtgcagctctggaaggcagccttggggctggccctgcaaagcatgcagcccttctgcctctagaccatttggcatcggctcctgtttccattgcctgccttagaaactggctggaagaagacaatgtgacctgacttaggcattttgtaattggaaagtcaagactgcagtatgtgcacatgcgcacgcgcatgcacgcacacacacacacagtagtggagctttcctaacactagcagagattaatcactacattagacaacactcatctacagagaatatacactgttcttccctggataactgagaaacaagagaccattctctgtctaactgtgataaaaacaagctcaggactttattctatagagcaaacttgctgtggagggccatgctctccttggacccagttaactgcaaacgtgcattggagccctatttgctgccgctgccattctagtgacctttccacagagctgcgccttcctcacgtgtgtgaaaggttttccccttcagccctcaggtagatggaagctgcatctgcccacgatggcagtgcagtcatcatcttcaggatgtttcttcaggacttcctcagctgacaaggaattttggtccctgcctaggaccgggtcatctgcagaggacagagagatggtaagcagctgtatgaatgctgattttaaaaccaggtcatgggagaagagcctggagattctttcctgaacactgactgcacttaccagtctgattttatcgtcaaacaccaagccaggctagcatgctcatggcaatctgtttggggctgttttgttgtggcactagccaaacataaaggggcttaagtcagcctgcatacagaggatcggggagagaaggggcctgtgttctcagcctcctgagtacttaccagagtttaatttttttaaaaaaaatctgcactaaaatccccaaactgacaggtaaatgtagccctcagagctcagcccaaggcagaatctaaatcacactattttcgagatcatgtataaaaagaaaaaaaagaagtcatgctgtgtggccaattataatttttttcaaagactttgtcacaaaactgtctatattagacattttggagggaccaggaaatgtaagacaccaaatcctccatctcttcagtgtgcctgatgtcacctcatgatttgctgttacttttttaactcctgcgccaaggacagtgggttctgtgtccacctttgtgctttgcgaggccgagcccaggcatctgctcgcctgccacggctgaccagagaaggtgcttcaggagctctgccttagacgacgtgttacagtatgaacacacagcagaggcaccctcgtatgttttgaaagttgccttctgaaagggcacagttttaaggaaaagaaaaagaatgtaaaactatactgacccgttttcagttttaaagggtcgtgagaaactggctggtccaatgggatttacagcaacattttccattgctgaagtgaggtagcagctctcttctgtcagctgaatgttaaggatggggaaaaagaatgcctttaagtttgctcttaatcgtatggaagcttgagctatgtgttggaagtgccctggttaatccatacacaaagacggtacataatcctacaggtttaaatgtacataaaaatatagtttggaattctttgctctactgtttacattgcagattgctataatttcaaggagtgagattataaataaaatgatgcactttaggatgtttcctatttttgaaatctgaacatgaatcattcacatgaccaaaaattgtgtttttttaaaaatacatgtctagtctgtcctttaatagctctcttaaataagctatgatattaatcagatcattaccagttagcttttaaagcacatttgtttaagactatgtttttggaaaaatacgctacagaatttttttttaagctacaaataaatgagatgctactaattgttttggaatctgttgtttctgccaaaggtaaattaactaaagatttattcaggaatccccatttgaatttgtatgattcaataaaagaaaacaccaagtaagttatataaaat

SEQ ID NO: 127706 - DNA, 640 bp, Homo sapiens
  misc_feature (1)...(640): n = a,t,c or g
tttcgtcagctgcctgcagttatcgggaagagcagcctggggaaagttaaaggagcacagatggacagttgctttctgcatgcaagtggccagctaggatccggggggcatcaagccatgatttttatttctgtgctggatgcattagcagctgtgacttggaaggttttatcctgaaggagtggaattgctgcagacgtcttggggttttggtgagcagtagatatttggggacattgtgctgttattgcagagccccacaatgaagatccaggagcatcccagcctatctgacaccaaacagcagagaaatcaagatgccggtgaccaggaggagagctttgtctccgaagtgccccagtcggacctgactgcattgtgtgatgaaaaaaactgggaagagcctatccctgctttctcctcctggcagcgggagaacagtgactctgatgaagcccacctctcgccgcaggctgggcgcctgatccgtcagctgctggacgaagacagcgaccccatgctctctcctcggttctacgcttatgggcagagcaggcaatacctgnatgacacagaagtgcctgcttccgcaccaaactcccattctttcatgaggcggcgaagctcctctctgggtcct

SEQ ID NO: 127707 - DNA, 1704 bp, Homo sapiens
atgaagatccaggagcatcccagcctatctgacaccaaacagcagagatatcaagatgccggtgcccaggaggagagctgtgtctccgaagtgccccagtcggacctgactgcattgtgtgatgaaaagaactggaaagggttacttcgtgacaaactgggctcctatgatgtggcattctacctcgctggagtccctccccttattggaggtgctgtgctttgttttatcccgtggatccatagtaagaagcaaagagagatcagtaaaaccactgggaaaagaaaagatggagaaaatgttggaaaaccagaactctctgctgtcaagttcatctggaatgttcaagaaagaatctgactctattatttaatatcttacatacctccaccagactggacttgctttttgaattttaagcaagtttcctttccttttatacaaattgcaaatttcatatttttttaatcacatcctatgaatagcacaataattgggaaatagaacccttatcactagaagaaccattttcctgccactaaatatctctgatgtttccatgagtctgagggcagagactctggtatatgaaaacatgtctgaaagtcacatattgtgaaaatttgaagctatctcagtaaaaagcagctttggaaactgtgaatgatctttagcttgtacaaatgtttaaaaatacctcaggctatactgaaagggttgcagtttggttaggagtggaaatatttggtttggttaatgatgtcttcccagttctgggtacctctggttttactttcttatgctctttggaaactttttgccaaaatttaagcctgggttctagataataccagatctacctaaacctcaagtctatgttaaagttgctttcctgctgttaaataagctatgatattaagatattctgacttgctccagtgtcaagggaccttctgggagcaggtgctaacatagtgttcagaatcaatatgtgagatgaaaaggatcccctccaggaggatcctgagctgttcagaaatcatttaagtttacagcgttgttccctttgcgtttgcagtgcgttttactcaagtagccagaaacaccccacgtttctgaatttgtttaaactgtaacaataaagtaaaatagacacgcatgaaagatattctggcgattgtaacttagaatttttctgacttctggatttgttggcactagaacctgatatttaaacaaagtcttactgagcagctatcaagtggcagttacaggcacaaattggtggaggctggaggatcgggaggggagcaaaaccctttatatttgtgaagaaaatatctgtagctgatagaaataattgcttaaattggtttatgaaattaatgagtctgaaaaggttaaaagcacttataaaaagaaccaagtcctacatttccagaactttctggcaaaaatttgcactcatattatttatcctatgaacattcccattgtttttttttgctatttatatacagattatcataagaaagctctcagtttgaggacccaaaataaaaccaaagtcatgccatgacccatactcatttacaaaaacaagaacactttcctctatccctaaaattatgctttagtacttgaggcctttaaaagttagtgcttttgattgtgaagacattcagcaacttactttgtcataca

SEQ ID NO: 127708 - DNA, 474 bp, Homo sapiens
ttggggtgggatggggagtggttatggcccactgagaactaaggcactctgtcagatatcacaatgtcagaagaacagaggcaatggatgtacaaaaacgtccccccggaaaagaaacccactcagggcaaccccctgccacctcagatatttaatggcgaccgatactgtggagtaagtggctagactgttatcatgctgtttctttttattgttcagaacacatgccacctagagtgcccctggagtggaatcaatccttactgtgagcaggattcttccttctctgagaatgtgggtgatgagattctaaaggtaaaggagccaacactttggcttttatgatgaattgtagtgtctgatttggattttagaaagctcaaaggagttgatcaaggtcatagataattcatagtggtttgctggacatcacatccacggttgactaaacatatacaccactcagttttccag

SEQ ID NO: 127709 - DNA, 4630 bp, Homo sapiens
tttcgtccgccgggagggagccagatcccagcgatcttccccgacggctgtgctttacccataggctgccggcggctcgtaggtgggttcagctctgcgtccacgccagcccggagcccggggggcaaggggtctgtcccgggcgcagcgagaggatggtcatccgcgtgttcatcgcctcttcctcgggcttcgtggcgataaagaagaagcagcaagatgtggttagatttctggaagccaacaagatagagtttgaggaggtggatatcacaatgtcagaagaacagaggcaatggatgtacaaaaacgtccccccggataagaaacccactcagggcaaccccctgccacctcagatatttaaatggcgaccgatactgtggggactatgaccgtctttttgaatccaaggaaagcaacacagtcttttcatttttaggcctgaaaccacggttggcatcaaaggcagaaccttagagaagaagagtggaagatgacggagatgcattttgaagcacccctggtactcagcacacacatgcttacctaatgcatcactgtgacaaaagccacacgcattatcagtaactttgcttgccacggaaaaggtgtttttgaaagatgtggctataatgagaattgcatgattgctttaaaccaaatcaggtggtggattttttttttcttattctatttgcctgcagttgcctcactcacctggaaataccgtcacctgttacaggtgtactttcttaatgactgaaagataagtgggtagcaccgtcagagagaaaatgttggatctgccctaggttatagtagatgccggaattgcgtaaacccacttctctttaagctgcctggattgcacctttgaaatatgtctgccaagttgttagaatctttgaatcagaaggaaaaaaagcagcgctggttgacaaagggtgttgaagatttttgctgcagaatcagttacaaacatcacagttcccatgctttgtaataacacctggtgaaaaagttagatattctagacttgttttagtaatggaaactcttacctccacatattatcctacagatgtttccagaaatccctgttgtaacatcaagtgatcagaactaagttactgggatgacaataattgctatttgaaatatatgcttctttatttcttgcaaggggcaagtttcacccaaatgcctgagactgcttgaaagatatattttaagtggtgcactaattagtgaatatataggaaaattatctgacgagtatctgaaggcattttcagctctagcaatttatttataatatataagttcatatattttttaatccagctcccctaacagacagctgctgcttctattttgtgaagggactatattttttgagaaaggaaaatctcagttagatatattttgtgaacccttgattagacatattaaaatataccaatgttgtagtaaaatttaatttttccttttgttacttttcatttgcctctaattttgcttgctcatatttctggccaatgtacagcctcatatttttcagagtaatacagatacttgttctcattccgtatatgagcacaagtaaggtttcagagcaacacacatgagaaagagagtaacccggaattgtacttgtcaagcaaaatctatactcctattggagtggatgctgatgaacatcgaacatatctacttcattagagcagaggctatttttctgcattcttgtccctataacagggatgcttaattttttttttaacttagagttttaaattgccaaacatgggaacagccttgaataggataaattttcagagggctgcctaaaatattttatttctagcatcctgattctggacttttcattataattctgagcaggaaatttataagaaattgaaagagcagaagaattacagccctgtcacatgtgcccagcactccgccccatgccttgctaaatgtagactaaagaacttgttgaatgctaaggctgaaatcccaacctgagatttgtagtccaggattacaaccagaaggaaagtatgacagatttctacttaactagaatggacacatgatccacaattttctcttcaagggaagctgttgtcaaattatggatattactggttagttgtcattaagtaagatccaggtcaaattccatttgacaaatcccagggactatccaggaatttttttttaactggatattgtgtttgagtatgtgagtcttctgataaaactcagaatttctttttaagcagttgtaaaaattgtcatgttgtaattcattactcagctaacatttagtctactcttgctagtgagtgccaagaaccaacttggtaaggttgaggctttgcaagttaactgctggggttataggatcaataccatacttgctagacaaagctacccagatttgtcttatattataatttttgagttaaccgtagtatacctattatgattatagtaaacagactagtgggtagtaatgctaaattaccatcacagttatgtgccatctccccaccccatttttttttttttttttttgatcagcaaagaaatacaggagaccagtctcgagtggtgctgtacttgttatgagtgaggcagcagcacagtgtgtggcatttacatggtacccaggctccacagagtaccaagatgttgccctctgggaccacacttagctcagagaatatggggtccttacttgtattcttttatcagctgattttgaaacatataataatgattttcttgttcccttctttaactagctgcctttagattttgataatcacagtcttaaaatactaggaaagaagtggatgggaattgtaggcatagatttcatatcaagggcatttcaagacagaatttttatttcctgtagtaggcttgctggagcaaaggaaatgtgctgctaaaaatcaacttatgccattttaaaattagataaaatatggagtgccatcctgctaggtgagtacagaccagaagaaaatttagttgggaaaatacttgtttttccaaattccggtgttttattacaatcaaagaagaggaaagcaaggtattttttcacctcagattctaatatattctagatttgtttctgttttatagatttaattcaatacctccacatagatgtttttatattacatgaatttaataataaactaaacttttttttgtctcccgttattgaaaagtaccaaagcttctttctgttgtgtttgattttactataggggttttgctttttctagagatacttttcatttaacagcttttgttaagtgtcaggctgcactttgctccatataattattgttttcagatttcaacttgtatgtgtttgtctcttaaagcattggtgaaatcacatattttatattcagcataaaggagaataaattccagaaaacacatattctgaaaatggagtgtttgttccctgccatttttcacacctctcttaattttagttctgtttagttgagaggctgtgattttactcttgcctgtgaacctcatgcatgaaagcagcacattaaattgtaaaaatacaaacagatcgtgtgatcattcaaggagccagacatgaggtcctgcacgagggtgttgggaggacaccacagattcatctcagacagtgatcaggactgaggatggagttaaatcactcagcccctgggtggggtggggtggttcaaatggatgactgatctcctgagtacactgaagccacaggctggtggccatgttctctgaattgggtgcagaagacaagggcagagtggctgcggcccctattacctttgtagcagccacatcagaaagcagaagaaaacagtatttctgaaggcattgtttgaggttgatctcagcactgaacgatttcaagccctacgcaccagaacagaaggagggtggaggaagtgatcagagggaacgagctgtaggtttgcagaaatgtgtgaaaccaaaatgatcactgcctacttgtgattcaaatcttcagagttttcctagttcttctagaaatacatgtcaggtttgtttgttcatcctttctgtcagcatggatcaagcccctaaaatgtggtaagtgttgtcagagcagggcaatatctctactctcaagtatgaggggaatagaaacaaagcagcagttttagccagggttcaatgatagagtggaggtaaattaagagcctccaggctgtgattcaccatttgagacattatacataatttgtttttgttataagccatttgaatttttaaaaaatttcatacatgcaatggaatatagatatgtatatacacatataatatatatgctaaagtataaagagtaataataatgacaataaacaaacccctgtgtgcctaccacccaccttattgcctttcctttgaggtaccgtgtgcggtttcctgaacctatctctatccctgtctgatagagggaacccctgtactgaactttgtgttgaccatagccttcttgtctttcatcactttatctccatgtatgtatccttaaagaataataaatggaattaaactgaatgta

SEQ ID NO: 127710 - DNA, 1587 bp, Homo sapiens; identical to SEQ ID NO: 122483

SEQ ID NO: 127711 - DNA, 1380 bp, Homo sapiens
atgccggaatcgcaaccacactgcgcctcgctcactcgcgccgcgctctactcaaccggctcgcaacaaggctctgcttcgcacaagcgctccgatcgcgcggacacatcacaggcttcgccactcccaaggctcttccaaacccgccccacaccgctccttacaccgacacgcgctcctctctccgcccgcctcgcgcactcgtgccgctcgcccgccacccggctccgcaacgctctcctcgcccgactcgcctcgcgagctcctcgactcgccgcgctctcgcgactcgcctcgcacaaccaactctcacccctcaccacacctaacactcgccctctgcgcctctctatcactcgcgaacaccgctgccgaacctcgacgtcgcactactgcctgctctctccgctcctcgtcctaaacacgagaagcctcgcctgtctaccccacctcgacaagccgccccgaccacacgctccgcgaccaactccccccacccactcgctcacacgatcccgcactcactctaactctcagcgagcaccgctcgcacccgtctccatcagcgcagctagtgctccctgtccacgactcccctgccacgcggctaaccgaccacgactccgaactctccctccaccgcaccacaccacactcttcctcgcggcgcctatgctcgaagctccgaccccacctctgccagcaaccgacagcacaaccccaccaacacagcccgatcacggaaggacctgcgcaatccgctgtctctttaacgagtcgagcatccgcccacattctgtgtccggctgctctcccagaacctggtgcactgacaaggccaggctgtcggtcacgcccacatcccacgaactgccctgcgctgcgtgcgttcatggcgatgttggacgtcaagggaatttgaagaatctccaggagggccagagagtagacttggatgccacccagccagcaatagagaagttgggaccacccagccagggacaaggccacacctcagccatcaccacccacaagcaacgcagcatgtatgagctgggacaggacaccagaaactacctcatgattgctccggaagaagcagctgcagaatatacaaagacaaaaggagattctgatgaagaagttattcaagatggagtcagagtattcatcgaaaagaaagcccagctaacacttttaggaacagaaatggactatgttgaagacaaattatccagcactcacaacgtcaccgcatttgcaaacacgatcctcaccaggcaattcagccaaaacacggactccgctaacccaacttcgccccgcgcgtccacaaccaacaggacaccggacacccccaccaccacgcacatcgcctga

SEQ ID NO: 127712 - DNA, 1218 bp, Homo sapiens
atgcagaatgccattgatgggctcattagtagactggctatggctgaggacagaatgtccgagcttgaggatatctcaacagaacgttccaaacctgaaaaatcaagagaaaaaaggccaggtacgtttacacaaatacttaccattgtgtcagaactgtgcacagtattcagcacagtcacgtgcagtacaggagtcagagtattcatcgaaaagaaagcacagctaacacttttaggaacagaaatggactatgttgaagacaaattatccatcctagctgctgattctccacacagccctggagagaccatctcaggtgtctctcatctccctggctttgctagcctctttttcctccttgttccccatgagggtcatccatcccccaagcaggttcctcatgtccttaggacgagagcattatcactacctggagtgcttttccctctgtcatctgagcttttatgtgaacctcctccaagaaggttctcagctgttcactcaggcacagtagtgagcactgactctccactagccctgagctttcacaggtcatcaaagacagtcccaacctcagagagcttcaagtcggcaaatgagacaccagcgaagagcatcgatcaccatgttctggttgttatatcagcagtagtaaattgcattccctgtcaatcaatcgtgttgtcaattcaccctctgacaactaaagcagaaggcctaaaattactgagtgcctactctgtgccagctgccatgtcagacaagcggctcccctgggaagacagccagactcaaggaagtccccaaaatatcttgagtttcttggacctgtcagaaagtaacattctttacttattgcaagttcaggaaccttgtaaagaaactgtagacaagataccaggccagtctttccaaagggctttttatcagctgcataaagtcaaccatgattcctcaaagcagtctgctcatatccaaaattatgtcattccagtcaaagtcttgtgcagacaaatggaaatctctggagaatcctaccagctcaggaaaaacctaaacatactcatcacatcaagggaccctcccacaaagggttcacccaaagtccgtgagtcccaccaatgcgtgcagagcctcctgccagcttttgagcacttcactcttactgagcagatgaccaatgatccccagaccgtcagaggactgcctctataa

SEQ ID NO: 127713 - DNA, 749 bp, Homo sapiens
agagaagctgaggcggccgaccttcggtccgaggcaccggggcgccgggacggcgaagatgtcggcttccttagttccgggcaactgtccgggctgtgtagcaagaggaagctgcagcccacccgggcagccctcaccctgacaccttcagcagtaaacaagataaaacaacttcttaaagaataaccctgagcatgtaggtgtaaaagttggtgtccgaaccaggggctgtaatggcctttcttatactctagaatatacaaagacaaaaggagattctgatgaagaagttattcaagatggagtcagagtattcatcgaaaagtaaagcacagctaacacttttatgaacagaaatggactatgttgaagacaaattatccaagggggttggggtccattaccccaaacatcaaagggacttgtggctgtggagaaagctttaatatttgaaatctcaggactcttctggccgtaggttccaggaaagctcgtggaagctttggggctcactgcagaaatcatgtgactgtcacgtgctggaaaataaagtgatacatcttgaaaatgaatccagtgtgttggattccagaagaaatgatatttatattctcctataggggacagaaaatgagaagccatcactcttttttggatcatttaggtctcttgtatcctttgttttagaaccagtttcattaaagttgccttcctgggcacctgtttatccaaaaaaaaaaaaaaaaaaa

SEQ ID NO: 127714 - DNA, 764 bp, Homo sapiens
atgtctccgggaatcgcccacacgagcccggggccgccctctccttccggcggcggccgcgcggagcccgcttcccccggacaccgcccccaaagtgcccgcgtggccccgcgactcagccgccccaagttcgcccgtggccgctcagccgcgaaagtgtcccgcacttggcggaccgggagtggcgaccgtccgctccggtacgtactcagccagcggctgcagcggtcttggcgcgctctccccgaggactgctcagccccaactccgaagcgacggcccccggctctccctcctctggcggctgcaggagccgggacgcccccgctaacatcaaagggggaagggaaggtgtacagaagcatgctgagatgattcgagatggaagatgcacgttggcattaaatagcagtaaaccacatactgaacaagctattcccttttcaattctttcagtccttcgaaggaggaaatttaaattggtgccagtctacactgcagccaaaggacccagcagctggagtaccctccatcatgagggtggatggaggattttgtttgtttccttgacaaagatgcaagcatctcccaagtgtgggctccagacctgccttgatcatctccactcaaagctgccctcaccccttccccaggctgcccagatgcttctgtccagatcctctgagcaccaagcagttacacaaggcccctctgtgtggcttattgtcgccttccactcccactcacatactgtggatggatag

SEQ ID NO: 127715 - DNA, 309 bp, Homo sapiens
atgggcggccgggcagaggcgctcctcacctcccagacgatgggcggccgggcagaggtgctcctcacctcccagacgatgggtggccgggcagaggcactcctcacttctcagatgatgggcggccgggcagagggccggatcgtggcacccagaggctgccaggactttggctgggacccctgctttcagcctgatggatatgagcagacgtacgcagagatgcctaaggcggagaagaacgctgtctcccatcgcttccgggccctgctggagctgcaggagtactttggcagtttggcagcttga

SEQ ID NO: 127716 - DNA, 2802 bp, Homo sapiens; identical to SEQ ID NO: 126682

SEQ ID NO: 127717 - DNA, 912 bp, Homo sapiens
  misc_feature (1)...(912): n = a,t,c or g
acagaaaattgacctgccggagtaccagggggagccggatgagatttccatacagaaatgtcaggaggcagttcgccaggtacaggggcccgtgctggttgaggacacttgtctgtgcttcaatgcccttggagggctccccggcccctacataaaggtggtttctggagaagttaaagcctcgaaggtctccaccagttcctggccggggtcgaaggcaagtcaagcctatgcgctctgcacgtttgcactcagcaccggggacccaagccagcccgtgcgcctgttcaggggccggacctcgggccggattcgtggcacccagagcttgccaggactttggctgggactccctgctttcagcctgatggatatgagcagacgtacgcagagatgcctaaggcggagaagaacgctgttctcccatcgcttccgggcccctgctggaagctgcaggagtactttggcaagtttggccagcttgacttctgcaagctggaggcaggccccttcaggcgncgcgatctggggcagggctaagcccaaaaccttcccgcatcgggcaaggcaccccctgaaagtacttccttcagggtttccccatttgtgagggtgtcgagtagcctcaacgggcctgtcttggaaggagcagctggctcttgctctgagaaactctggcaagtgggacgccattctcttgccccttaggagttcacttgctctctcctacagccgccaggcctggggtcctgaaaggaccttgggtggtaaagctgtacttggtgggagtgagggcgtggggaggaaccatgcaaatcgccttccatggtttttaaatgcagtaaataacatttctggatgagacttgtttccaaaataaaccagctatatctgttttgaaaaaaaaaaaaa

SEQ ID NO: 127718 - DNA, 650 bp, Homo sapiens
tggtgaagaagtcctggtccccgaggtggccgcgaaagtggtacttgtcggccagctgctgcacctgcgccggctccagcaggcggctgtagagcggggactggcgcatggcctccaggttcagcaacatcaccccggctgttgaagcccggcagcccctcggggggcgggcccccaaccggggtctgggggttctcatggcggaactgccagaatgtgtgcctgtaaactggctgcatctcccgggctatgccgatgatggcgcctggcaggaaactgtcaaattcctcaaacaactcccggatgttggtcttaaacttcaggtctaggtccagctgaatgatctgcaggatctctttgggcatgatctgatgcatggcgaccgagaggaagaagatggagtcactgtagtaggttcccaagccagcactgaagtgcttctgcatggcctccacgatggggaagagcttatccgtcagcacagcaacatcgtggaagatgaccgtggcagacttccccttggacccggctgccgtgccgggatggagcctgaacctcagggagagcccacgtgagctcatcaggatgacagctctgctaagcgcgttgccgcggccagcagggactgctgcgacctgtgtagccatcat

SEQ ID NO: 127719 - DNA, 415 bp, Homo sapiens
tttcgtcctgtttcgaattgctgcttgctgccccttgggctggggataatggaagttctttcccttcccaactctttccagacccaagcactctgggactcactccatagtccaggagttccaggttccgtgtttcacttcaagcccactacggtggtgacaagctgccagccgaagaatccaagagaactacatagaaggcggaagttggaccctgggaagatgcatgccaaaatctggttaatgaagacgtcgctcaggagcgggagggccgctctgcgagagctccgaagccgtgagaacttcctcagcaagctcaaccgggagctgatcgagaccatccaggagatggagaacagcacgaccctgcacgtgcgggccctgctgcagcagcaggacaccttggcgaccatca

SEQ ID NO: 127720 - DNA, 550 bp, Homo sapiens
acccagaaagaagggaagagagcaggaggggagggcggcccatggcactgccatctagaagggtagtggctcttccacaggaatgttgaggatgacatccatgtctggggtgcacttgggtctccgaagcagaacatcctcaaatatgacctctcggggttcccgggtctgggcttggagctcttccacctcggcccttaatacaggcatgttctcctcaaactggtcaataaactgagaggaaaggcacagcaggggagaagggagaagccaaatggcccccaaccaaagggagaaaggccaaaatgaacgaggagcaaagctatctggggaaatggtatgggttctgtcactgggacttgctggactccagagaggggacttccccatgcaaggtgcggctggcttccaagttagtgacaatattcagtggtgctgaaacaggtgagggatcatggagaatggagacaggttacaaagtggcggggaatgctcaatcgtgggaatgaatggaggctggcagagatagtgaagggcatgcccattaaaa

SEQ ID NO: 127721 - DNA, 402 bp, Homo sapiens
ttttttttttttttacttgcaatttgggcattgtttattacatcagttagcctaccctaatataagtggtgtcaccaagagccaaaagcagccactctatcctgtctccaacccccacaccagctcccaggtgcctccgcccacctggttggaccctagtcaaagtcttcattttgcttgtatgaaggctgttggcttgttggactggaggcagagtagatggcttggtttcctgcttggactgctgccatggaacataatccggaacctggaactcctggactatggagtgagtcccagagtgcttgggtctggaaagagttgggaagggaaagaacttccattatccccagcccaaggggagtcaagcagcaattcgaaacaggatgtcgacgcggccgc

SEQ ID NO: 127722 - DNA, 1561 bp, Homo sapiens
tttcgtcccactcccgcggggctattgtccccggtaaactgcagtttctggttcgagactccaatcctgcttcgaattgctgcttgctgccccttgggctggggataatggaagttctttcccttcccaactctttccagacccaagcactctgggactcactccatagtccaggagttccaggttccggattatgttccatggcagcagtccaagcaggaaaccaagccatctactctgcctccagtccaacaagccaacagccttcatacaagcaaaatgaagactttgactagggtccaaccagtgtttcacttcaagcccactacggtggtgacaagctgccagccgaagaatccaagagaacttacattagaaggcggaagttggaccctgggaagatgcatgccaaaatctgggttaatgaagacgtcgctcaggagcgggagggccgctctgcgagagctccgaagccgtgagaacttcctcagcaagctcaaccgggagctgatcgagaccatccagggagatggagaacagcacgaccctgcacgtgcgggccctgctgcagcagcaggacaccctggcgaccatcatcgacatcttggagtactcaaacaagaagaggctgcagcaattgaaatctgagcttcaggagtgggaagaaaagaagaaatgcaagatgagctatcttgagcagcaggcagagcagctgaatgccaagattgagaagacccaggaggaagtgaacttcctgagcacttacatggaccatgagtattccatcaagtctgtccagatctccactcttatgcgccagctgcagcaggttaaggacagccagcaggatgagctggatgacctcggtgagatgcgcagaaaggtcctggaatccttgtctgacaagattcagaagaagaagaaaaaaattctgagttctgtggtggcggaaacccagcgtccctatgaagaggctctcctacagaagatgtgggaaagccaggacttcctgaaatgcatgcaaaggttcagagaaattattgaccagtttgaggagaacatgcctgtattaagggccgaggtggaagagctccaagcccagacccgggaaccccgagaggtcatatttgaggatgttctgcttcggagacccaagtgcaccccagacatggatgtcatcctcaacattcctgtggaagagccactacccttctagattggcagtgccatgggccgccctcccctcctgctctcttcccagcacctggagccttggatcatttacttccaggaccggatctccattcagaccctgatctacagtctccctgctccctctgcccttcctccctctttctttccctccctccctccatcccttcttccccccttcccttccctcctccttccttcctcctctccctccctccctcctttctttcttcctgtggttttttcctctcttcttcccttctttctggttggtgctgctgggccaggtgggaatttctgattaaatctgctattccttttttaccaataaagctggatttacatttaa

SEQ ID NO: 127723 - DNA, 606 bp, Homo sapiens
atggaaattcgaggacgggttgagcaacgtgttggttatacaattgaacaaattaatcatatgcgtgatgtgtttggtacgcgattgcgacgtgctgaagacgtatttccaccggtgatcggggttgctgcccataaaggtggcgtttacaaaacctcagtttctgttcatcttgctcaggatctggctctgaaggggctacgtgttttgctcgtggaaggtaacgacccccagggaacagcctcaatgtatcacggatgggtaccagatcttcatattcatgcagaagacactctcctgcctttctatcttggggaaaaggacgatgtcacttatgcaataaagcccacttgctggccggggcttgacattattccttcctgtctggctctgcaccgtattgaaactgagttaatgggcaaatttgatgaagtgccgcaagccaaaggcaacaatgtggttatcacaagctacatgacaaacagaggcttcttcgaggataaaaaggcaacatttgcgccaagcttcttaatgaacatcaaaggcaataaaacatccgttgtcaaaaacagcatcctggagcaaggacagctgacagtcaactaa

SEQ ID NO: 127724 - DNA, 2835 bp, Homo sapiens
  misc_feature (1)...(2835): n = a,t,c or g
atgcagttttctttattgtggcctttcgtgcatgcctcgcagttgactctagaggatccccgcataaacgctggtcatgaaatgacgaaggctatcgccattgcacagtttaatgatgacagcccggaagcgaggaaaataacccggcgctggagaataggtgaagcagcggatttagttggggtttcttctcaggctatcagagatgccgagaaagcagggcgactaccgcacccggatatggaaattcgaggacgggttgagcaacgtgttggttatacaattgaacaaattaatcatatgcgtgatgtgtttggtacgcgattgcgacgtgctgaagacgtatttccaccggtgatcggggttgctgcccataaaggtggcgtttacaaaacctcagtttctgttcatcttgctcaggatctggctctgaaggggctacgtgttttgctcgtggaaggtaacgacccccagggaacagcctcaatgtatcacggatgggtaccagatcttcatattcatgcagaagacactctcctgcctttctatcttggggaaaaggacgatgtcacttatgcaataaagcccacttgctggccggggcttgacattattccttcctgtctggctctgcaccgtattgaaactgagttaatgggcaaatttgatgaaggtaaactgcccaccgatccacacctgatgctccgactgggcattgaaactgttgctcatgactatgatgtcctagttattgacagcccgcctaacctgggtatcggcacgattaatgtcgtgcctgtgcagtcctggttcgatgacatgacggacacggagctgctggacctcatccccttctttgagggcctgagccgggaggacgacgtgtacagcatgctgcacagactctgcaatagaggatccccgacactgttaatacctcacactcatgagaatggctactataaaaaacaaacaaacaaacaaacaaaaacagaagataacaagtgtgatgaggatgtggagacactgaaacccctgtgcactgttggtgggaatgctgtggaaaacagtatggagcgctacgagcacgccatagtgactggcgatgctgtcggaatggacgatatcccgcaagaggcccggcagtaccggcataaccaagcctatgcctacagcatccagggtgacggtgccgaggatgacgatgagcgcattgttagtttctagggggtcttcatcaaatttgcccattaactcagtttcaatacggtgcagagccagacaggaaggaataatgtcaagccccggccagcaagtgggctttattgcataagtgacatcgtccttttccccaagatagaaaggcaggagagtgtcttctgcatgaatatgaagatctggtacccatccgtgatacattgaggctgttccctgggggtcgttaccttccacgagcaaaacacgtagccccttcagagccagatcctgagcaagatgaacagaaactgaggttttgtaaacgccacctttatgggcagcaaccccgatcaccggtggaaatacgtcttcagcacgtcgcaatcgcgtaccaaacacatcacgcatatgattaatttgttcaattgtataaccaacacgttgctcaacccgtcctcgaatttccatatccgggtgcggtagtcgccctgctttctcggcatctctgatagcctgagaagaaaccccaactaaatccgctgcttcacctattctccagcgccgggttattttcctcgcttccgggctgtcatcataagggggttctttagagtccccaacaggctttaagctcaggttggcaagccactgcaggaagcggcggcggaagtcaggcatacgctggtaactttgaggcagctggtaacgctctatgatccagtcgattttcagagagacgatgcctgagccatccggcttacgatactgacacagagctgtttcctctttaccaacttcatccgtttcacgtacaacattttttagaaccatgcttccccaggcatcccgaatttgctcctccatccacggggactgagagccattactattgctgtatttggtaagcaaaatacgtacatcaggctcgaaccctttaagatcaacgttcttgagcagatcacgaagcatatcgaaaaactgcagtgcggaggtgtagtcaaacaactcagcaggcgtgggaacaatcagcacatcagcagcacatacgacattaatcgtgccgatacccaggttaggcgcgctgtcaataactatgacatcatagtcatgagcaacagtttcaatggccagtcggagcatcaggtgtggatcggtgggcagtttaccttcatcaaatttgcccattaactcagttggggattctncttcatcaaatttgcccattaactcagtttcaatacggtgcagagccagacaggaaggaataatgtcaagccccggccagcaagtgggctttattgcataagtgacatcgtccttttccccaagatagaaaggcaggagagtgtcttctgcatgaatatgaagatctggtacccatccgtgatacattgaggctgttccctgggggtcgttaccttccacgagcaaaacacgtagccccttcagagccagatcctgagcaagatgaacagaaactgaggttttgtaaacgccacctttatgggcagcaaccccgatcaccggtggaaatacgtcttcagcacgtcgcaatcgcgtaccaaacacatcacgcatatgattaatttgttcaattgtataaccaacacgttgctcaacccgtcctcgaatttccat

SEQ ID NO: 127725 - DNA, 1182 bp, Homo sapiens
atggcgactacgcaactggatatgatattcgagcacggaattaatcatatgcgtgatgtgtttggtacgcgattgcgacgtgctgaagacgtatttccaccggtgatcggggttgctgcccataaaggtggcgtttacaaaacatcagtttctgttcatcttgcgcaggatctggctctgaaggggctacgtgttttgctcgtggaaggtaacgacccccagggaacagcctcaatgtatcgcggatgggtaccagatcttcatattcatgcagaagacactctcctgcctttctatcttggggaaaaggacgatgtcacttatgcaataaagcccacttgctgtccggggcttgacattattccttcctgtctggctctgcaccgtattgaaactgagttaatgggcagatttgatgaagaaccacaaggcctatctacatgtgctggatcaaacagggatctggggcatgtgctgattccctgtttgatacatgtgctagtaccaaacaaggaactggggagcccagcagaaagaaagggtcatcaacaagcatacaactgggatacttgccaaagttttgaaactatgaaggtgaaaaattgtgcttataatgctaaactaagagtgaaggacgtgaagcttggtaatttagaaattgaaaaacttattccttatatggacctagaaaaacactatgtgtcttaccaacagatgttcaccatttatcattttcttttgttccttaaagcaatggcagattgtccttctagcatacagctgctttgtgaccatggggcctctgtgaatgccaaagatgtagacgggcggacaccacttgttctggctactcagatgagtaggccaacaatatgtcaactgctgatagatagaggagcggatgttaattccagagacaaacaaaacagaactgccctcatgctaggttgcgaatatggttgcagagatgcagtagaagtcttaattaaaaatggtgctgatataagcttgctggatgcgcttggccatgatagttcttactatgcaagaattggtgacaatctggacattctaaccttgttgaagactgcatcggaaaataccaacaaagttaatcaagcccgtgtagattctggatacttagatcatgaggtcctatcaagatactatcacttagcttga

SEQ ID NO: 127726 - DNA, 413 bp, Homo sapiens
cgccacaatgacgattacaaagggaaacaagacaggcaccccatataagtactctacgtcttttagaagacacggagttgttcctttggccacatatatgccaaactataagaaaggtgatattgttgacatcaagggaatgggtactgctcaaaaaggaatgccccacaagtgttaccatggcaaaactggaagagtctacaatgttacccagcatgctgttggcattgttgtaaacaaacaagataagggcacgattcttgccaagagaattaatgcgcgtattgagcacattaagcactctaagagccgagatagcttcctgaaacgtgtgaaggaaaatgatcagaatatgaaagaagccccagagaaagggtcctgggatcaactaaagcgccagccttgctcaccca

SEQ ID NO: 127727 - DNA, 464 bp, Homo sapiens; identical to SEQ ID NO: 126892
  misc_feature (1)...(464): n = a,t,c or g

SEQ ID NO: 127728 - DNA, 1038 bp, Homo sapiens; identical to SEQ ID NO: 120543

SEQ ID NO: 127729 - DNA, 629 bp, Homo sapiens
tgggcctttcggccggaaccgccatcttccagtaattcgccaaaatgacggaccacaaaggggaaagaggagaggcaccccgaaatatgtcttctaggcccttttagaaaaccatggaggtggtcctcttgggcccccatatatgccgcatctcataggaaaggtgatattgtagacactcaagggaatggggtactgttcaaaacggaatgccccaccaagtgttaccatggcaaaactggaagagtctacaatgttacccagcatgctgtttggcattgttgtaaacaaacgaagttaagggcaagattcttgccaagacgaattaatgtgcgtattgagcacatttaagcactctaagagcccgagataagcttccctgaaaccgttttgaaggaaaatgatcaggaaaaagaaagaagcccaaagaagaaaggtacctggggttccaacttaaagcgccaccctgctccaccccagaagaagcacactttgtgaagaaccaatgggaaggagcctgagcttgctggaacctattccctatgaatttcatgggcataattaggtgttaaagaaataaaataaaagacctctggactatttaaaaaaaaaaaaaaaaaaaggccagg

SEQ ID NO: 127730 - DNA, 411 bp, Homo sapiens
gagcacctgggttggtcccgaagcctccaaccacctggacgcctggcagggcctctctggggcagccatgaagtccctcgtcctgctcctttgtcttgctcagctctggggctgccactcagccccacatggcccagggctgatttatagacaaccgaactgcgatgatccagaaactgaggaatataaagaagcacgtttagtactggattcagtgaagttagaagcctgaaacttttctcgtatggggtgggttttgcattaaatcctggggtccattttacaatccattatttttgaccactgctatgtgttcaagtagtatgagaatgtgattggttttatctggttacatatatatttctttggctaatttaatatgtcaaataaatgagttcatctaaaaaaaaa

SEQ ID NO: 127731 - DNA, 663 bp, Homo sapiens
cccacgcgtacgtggacgcgtgggcggataccccggctctccgcccctccttctcgcggcgctcgagggaccatggccgatcctcgcgtgagacagatcaagatcaagaccggcgtgggtgaagcggttggtcagaagaaaaagtgttgtatgaaaaagagccaaaacaaccaagaagaaaagattgaaaaaatgagagctgaagacggtgaaaattatgacattaaaaagcaggcagagatccttacaagaatccaggatgatgatcccagattgccagcgcaggttggaagccgcatatttggatcttcaacggatactagaaaatgaaaaagacttggaaagaagctgaggaatataaagaagcacgtttagtactggattcagtgaagttagaagcctgaaacttttctcgtatggggtggtttttgcattaaatcctggggtccattttacaatccattatttttgaccactgctatgtgttcaagtagtatgagaatgtgattgtttttatctggttacatatatatttctttgtctaatttaatatgtcaaataaaatgagttcatctaataaaattgtgtattttatactgtaaaaaaaaaaataaaggtgtggcgtatagtgagtcggtcgcgcggccgcaatttagtagtgta

SEQ ID NO: 127732 - DNA, 436 bp, Homo sapiens
ctactactggcctgccgcagcatggactgttacctggccattgtccatgccacacgcacactgacccagcagcgccacttggtcaagttcatatgtctgggtttgaggaacctgttcctgttactgtccctacgcatcttgcttttccgaaggaccttctacccatccaatgttagcccagtctgctatgaggacatgggcaacaatacagcaaactggtggatgctgttacggatcctgccccagtcctttggcttcatcgtgccgctgcgatcatgctgttctgctacagattcaccctgcatacgctgtttaaggcccatatggggcagaagcactggaccatgtgggtcatctttgctgatgtcctcattatcctgctctgctggctgccctacaacctggtcctgcttgcggacaccataatgggaaccca

SEQ ID NO: 127733 - DNA, 897 bp, Homo sapiens
atggtgtacgagaaaggcctgaccgtcaaagttggaggatggaaggagacaaggctcactcgctgccttcttctgggaaaccagcttcttgccagccacagctgctactcccaccaccagccaccactcctgtcctgggaatcccttgtcccagacacccacctcattcagtggctcctctacaggaaagctgagtcagccactgtcaccgatgtctacctgctgaccctggccttggccgacctgttcttttccctgacattgcccatcttggctgcctccaagatgaatggctggatttttggcacaatctgtgccagattcaccctgcatacgctgtttaaggcccatatggggcagaagcactggaccatgtgggtcatctttgctgttgtcctcattttcctgctctgctggctgccctacaacctggtcctgctggcagacaccctcatgggaacccagatgaccaatgagacctgtgagcgccgcaacgacatcaaccaggccctggatgccactgagattctgggcatccttcacagctacctcaatcccctcatctacgccttcattggccagaagttttgccatggacttctcaagattatagccatacacggcttgatcagcaaggactccctgcccaaagacagcaggccttcctttgttggctcttcttcagggcacacttccactactctctaagacctcttgcctaagtgcagtcccgtggggttcctcccttctcttcacagtcacattccaagcctcatgtccactagctcttcttggtctcagtgtcagtgcagcccccactgtggtcgcaggaagcagaggaggccacgttcttactagtttcccttgcatgatatagaaagcctgccctggtacccc

SEQ ID NO: 127734 - DNA, 2785 bp, Homo sapiens
cattcagagacagaaggtggatagacaaatctccaccttcagactggtaggctcctccagaagccatcagacaggaagatgtgaaaatccccagcactcatcccagaatcactaagtggcacctgtcctgggccaaagtcccaggacagacctcattgttcctctgtgggaatacctccccaggagggcatcctggatttcccccttgcaacccaggtcagaagtttcatcgtcaaggttgtttcatcttttttttcctgtctaacagctctgactaccacccaaccttgaggcacagtgaagacatcggtggccactccaataacagcaggtcacagctgctcttctggaggtgtcctacaggtgaaaagcccagcgacccagtcaggatttaagtttacctcaaaaatggaagattttaacatggagagtgacagctttgaagatttctggaaaggtgaagatcttagtaattacagttacagctctaccctgcccccttttctactagatgccgccccatgtgaaccagaatccctggaaatcaacaagtattttgtggtcattatctatgccctggtattcctgctgagcctgctgggaaactccctcgtgatgctggtcatcttatacagcagggtcggccgctccgtcactgatgtctacctgctgaacctagccttggccgacctactctttgccctgaccttgcccatctgggccgcctccaaggtgaatggctggatttttggcacattcctgtgcaaggtggtctcactcctgaaggaagtcaacttctatagtggcatcctgctactggcctgcatcagtgtggaccgttacctggccattgtccatgccacacgcacactgacccagaagcgctacttggtcaaattcatatgtctcagcatctggggtctgtccttgctcctggccctgcctgtcttacttttccgaaggaccgtctactcatccaatgttagcccagcctgctatgaggacatgggcaacaatacagcaaactggcggatgctgttacggatcctgccccagtcctttggcttcatcgtgccactgctgatcatgctgttctgctacggattcaccctgcgtacgctgtttaaggcccacatggggcagaagcaccgggccatgcgggtcatctttgctgtcgtcctcatcttcctgctctgctggctgccctacaacctggtcctgctggcagacaccctcatgaggacccaggtgatccaggagacctgtgagcgccgcaatcacatcgaccgggctctggatgccaccgagattctgggcatccttcacagctgcctcaaccccctcatctacgccttcattggccagaagtttcgccatggactcctcaagattctagctatacatggcttgatcagcaaggactccctgcccaaagacagcaggccttcctttgttggctcttcttcagggcacacttccactactctctaagacctcctgcctaagtgcagccccgtggggttcctcccttctcttcacagtcacattccaagcctcatgtccactggttcttcttggtctcagtgtcaatgcagcccccattgtggtcacaggaagcagaggaggccacgttcttactagtttcccttgcatggtttagaaagcttgccctggtgcctcaccccttgccataattactatgtcatttgctggagctctgcccatcctgcccctgagcccatggcactctatgttctaagaagtgaaaatctacactccagtgagacagctctgcatactcattaggatggctagtatcaaaagaaagaaaatcaggctggccaacgggatgaaaccctgtctctactaaaaatacaaaaaaaaaaaaaaaaattagccgggcgtggtggtgagtgcctgtaatcacagctacttgggaggctgagatgggagaatcacttgaacccgggaggcagaggttgcagtgagccgagattgtgcccctgcactccagcctgagcgacagtgagactctgtctcagtccatgaagatgtagaggagaaactggaactctcgagcgttgctgggggggattgtaaaatggtgtgaccactgcagaagacagtatggcagctttcctcaaaacttcagacatagaattaacacatgatcctgcaattccacttataggaattgacccacaagaaatgaaagcagggacttgaacccatatttgtacaccaatattcatagcagcttattcacaagacccaaaaggcagaagcaacccaaatgttcatcaatgaatgaatgaatggctaagcaaaatgtgatatgtacctaacgaagtatccttcagcctgaaagaggaatgaagtactcatacatgttacaacacggacgaaccttgaaaactttatgctaagtgaaataagccagacatcaacagataaatagtttatgattccacctacatgaggtactgagagtgaacaaatttacagagacagaaagcagaacagtgattaccagggactgaggggaggggagcatgggaagtgacggtttaatgggcacagggtttatgtttaggatgttgaaaaagttctgcagataaacagtagtgatagttgtaccgcaatgtgacttaatgccactaaattgacacttaaaaatggtttaaatggtcaattttgttatgtatattttatatcaatttaaaaaaaaacctgagccccaaaaggtattttaatcaccaaggctgattaaaccaaggctagaacc

SEQ ID NO: 127735 - DNA, 2839 bp, Homo sapiens
gtttaatcatattgcagcggcgatcgacgaaataaaaaaagtcctcttcgtcgcggtatccggtatcgccggtatgcagccagccatcggcttccagcactttcgcagtggcttgtgggttgagaaagtactctttgaagatggttttcccaggtatgcctttaatgcagatttcaccgatctcaccagccgggagcgggcgattgtgatcgtcgcggatctccgcttcgtagcaaaaccccacccgaccaatcgacggccagcgtcgtttatcgccaggacgatcgccgataatgcccacaatggtttccgtcatcccataagacgtcagcaagcgaacgccgaagcgttcacaaaacgcatctttttcctgctccgacaagttgagataaaacatcacttcccgcaagcggtgttgctgatcgttcgctgaaggcggctgtaccatcaacgtacggatcatcatcggaatacattccgtaaccgtggcgcggtacttctgtacccgaccggcattgccggtgcgggcgtactggtcaccgaaggttgccgtggtgaaggcggttatctgctgaacaaacatggcgaacgttttatggagcgttatgcgccgaacgccaaagacctggcgggccgtgacgtggttgcgcgttccatcatgatcgaaatccgtgaaggtcgcggctgtgatggtccgtgggggccacacgcgaaactgaaactcgatcacctgggtaaagaagttctcgaatcccgtctgccgggtatcctggagctttcccgtaccttcgctcacgtcgatccggtgaaagagccgattccggttatcccaacctgtcactacatgatgggcggtattccgaccaaagttaccggtcaggcactgactgtgaatgagaaaggcgaagatgtggttgttccgggactgtttgccgttggtgaaatcgcttgtgtatcggtacacggcgctaaccgtctgggcggcaactcgctgctggacctggtggtctttggtcccgcggcaagtctgcatctgcaaaagtctatcgccgagcagggcgcacttcataatacccaggaacaaggtggacagggggctaatgctcctctccttttctcccacaaacactacctgatttcctgtttggggagtcactctctccctatgctgggccatgagattggggtacgattctcctctccctagttccaggggtgaacttaagccaataaatatattctgtacccctggttctgatgattggttcagggtatagcccaacatagccaataacaaacaacgaaacaagaagagacatttgctggggcttctggcaatgccaggctgaagtagctttttgtctccatctttctccttcaatggacctgtatgcttcaggatgagattctcatcatcaaatttctctctgtagataagcttgtcaccaacgccataatggcatgaagtcaccaccctagcacgtaaggcctggaataattctgtaaaagtaagaacccatataacaaaatcctcctctcgccagctctcaagtacaaaattttctgctgtctgtggaactttgtatcctgcgattcccgtcccttctttcttgagtcggagccactgttggtgggacatgtcatcctcttccttgacatactccttcatcgtgctactgctccagcagtaactgccttgcatcccagggatgaagcccccttgatcatggtggataagctttttgatgtgctgctggattcgttttgccagtattttattgaggatttttgcatcaatgttcatcaaggatattggtctaaaattctcttttttggttgtgtctctgccaagctttggtatcagaaggatgctggcctcataagatgagttagggaggattccctctttttctattgattggaatagtttcagaaggaatggtaccagttcctccttgtacctctgggagaatttggctgtgaatccatctggtcctggactctttttggttggtaaactattgattattgccacaatttcagatcctgttattggtttattcagaaattcaacttcttcttggtttagtcttgggagagtgtaggtgtcgaggaatttatccatttcttctagattttctagtttatttgtgtagaggtgtttgtagtattctctgatggtagtttgtatttctgtgggatcagtggtgatatcccctttatcattttttattgcatctatgagattcttctctctctttttctttattagtcttgctagcagtctatctattttgttgatcctttcaaaaaaccagctcctggattcattaattttttgaagggttttttgtgtctctatttccttcagttctgctctgattttagttatttcttgtcttctgctagcttttgaatgtgtttgctcttgcttttctagttttctaactgctgtttgcaattgggtaaataaagtcataagttgttcatctgtatgaaatcgtaactgagcattttcaattaactgtgtgaaatgaaccacgtatgaagaatcagaaatcacattaataggcatattaaaagcagtcaatacctcaattacagctacaagctccgctttttgagctgaagtatagggcatctgaaaaaccttacttttccagccagaataagatgctttaccattactagacctatctttgccacctttttcctttctcaggaaaattctctcttccccggttacttgaacttttgtaacaccaatttctcctccagcttctatagcacaccctctcctaagtggatttccttccccaatcacttgctgttcctccat

SEQ ID NO: 127736 - DNA, 1332 bp, Homo sapiens
ctaccatctgactatcttctcggtaccgtcttttggattaatgggatcccagagccacttcttggtcgtttgagggggcagtacatgtgtggtatcaggcacatgcagtgtgagggctgtactctgtggaagccggaaggtttcaacatctgccgcaaaccgttccatgttgcacagaacggcattgccggtgcgggcgtactggtcaccgaaggttgccgtggtgaaggcggttatctgctgaacaaacatggcgaacgttttatggagcgttatgaatgtactcatcattcccatgttgtgggcgggagcagaatctggttcatacttcagcacgatgcttccctttgctggaaaagaaacagacacacatttgccaggttttccaggtagtggatgcatgcgctgacgcacactttcgtgcaccctagcttcatcctccatcctctttcctgttgtctggaatgaagatgtaatggctggagcttcagcagctgctttggacgataaggcaatgtactgtagcgctggctgtgggtccctgagcctgccctttgatttcagagctgttgactgacacagggctgaatggttcctgccagagtcctgaatctggtggcctgtgtcttttctgtgccccattcccgcaggggggtgagccatggtgtagttctcacagctcgccctcaggttattaacacggggatcaaagtctggtgtagaaataacagcggtgaagagtttgactgtgctttccggctggcacaggaggtaattttggaagtggatttgaacagcagtagccacagatgactgaagcagtcgggagtagatgggcttgctgtccaaggggaggggccatagtgagggctcgaccaccatagccgctaagagcatagcccctgagagcaggctgttgtcgttcatgaatgacatcatggtatctgttctctcattctctttattcacacagggaatatgctgttcttgtttcttctgtctcgcggcactgtgttttcttcgtagtttttccttgttcgtgtgttgttgggacggagaggagcgcaaggacccggttgaacgtggttttttctttgtcttttctttcctcgcttgtttcttcatttcttcgtgtttttgctgttttttcttgtcgtatgcttttttttgactcttgtgttgttctttagcacgacacacttggcgcctgtgtcctctgtttggtgtcttgtggtctttttgcttctggttcgtcttgtgtttccgtttcctctgcgttggtgtttgtcttcccgtggtgcctcctgtctgctcgttgtcgtgtaccttcat

SEQ ID NO: 127737 - DNA, 554 bp, Homo sapiens
aagatactgaaatgtgatgaacatatccagaagcttggaagctgtattacagatccaggtaatcgagagacctcaggaaataccatgcacacagtgtttcaccgtgacaagaccaaagatacacatcctgaaagctgttgcagctctgaaaagggtgggcagccattgccttggtttgagcataggaaaaatgtaccacagtttgcagaacctacagaaacgttgtttggtcccgattccggaaaaggtgccaagagcttagttgaactccttgatgagtctgaatgtacttcagatgaggaaatctttatctcacaagatgaaatacagtcatttatggctaataaccagtctttctacagcaatagagaacaataccgacagcatctgaaggagaaatttaataaatactgccggttaaatgatcacaagaggcccatttgtagtggctgggttgacaacggctgggaagcaaattaaataaataaaaatagctctgtctttcaatgaaacactccacgatgactactggcgccttctcctttcgaaaaact

SEQ ID NO: 127738 - DNA, 945 bp, Homo sapiens
ttttctgtttgtattaataaatattctttattttaaattttgcacattgcgctttaacattacatccaaacattttgcaagtggatgtctactttgtaaaaccatatattcagctcattgtcatttctgtacagaattataagtacaacattactttttgccactaagttgctttagtaagtctcacaggaagagaaacatttaatgaaaagagatggcttaaatcatatggcaggcctgcgtcagccacgcaactaaagacacaagcctgaagaaagaactaatgaggatacctccaccgtctcccaaaacaagaaagaatcacattgatttaagataaaattttgccataagtcactaaattaagagtttttcgaaagagaaggcgcagtagtcatcgtgagtgtttcattgaaagacagagctattttatttatttaatttgctccagccgttgtcaaccagccactacagatgggcctcttgtgatcatttaaccggcagtatttattaaatttctccttcagatgctgtcggtattgttctctattgctgtagaaagactggttattagccataaatgactgtatttcatcttgtgagataaagatttcctcatctgaagtacattcagactcatcctgcaaattaaagcagtagttaagactatgacttaagaatgcaaaatgttatgtaatggaggaggacagctaaaaattaaaccagtctaactttttagtttcacatcagtcacataaagcctttaattggagtgtttgcagaataagcatcatgtcattctgcctaagaaagtagtgagaataaaatccaactccttgagttgaaaccttgaatctataatttctcctagaagcctatgagcctagcaaactaccaccataccttggccttgaaaaaataactaattaaagaggttacaactag

SEQ ID NO: 127739 - DNA, 1228 bp, Homo sapiens
atggcagtagaagggttttgcactgattgcaaaaataaagtcctccgagcatacaatatccttattggtgaacttgactgcagcaaagaaaagggctactgtgctgcactttatgaaggcttgcggtgctgtccacatgaacgacacatacatgtttgctgtgaaacagacttcattgcacatcttttgggtcgtgctgaacccagagttccgcaggagggtatgagcgaagagaaaggcatgcaaagacaatagatatagctcaagaagaagttctgacctgcttgggaattcatctttatgaaagactgcatcgaatctggcagaagctacgggcagaagagcagacatggcagatgcttttctatcttggggttgatgctttacgcaagagttttgagatgaccgtggaaaaagtacagggtattagcaaattggaacatctttgtgaggaattttcagaagaggaacgagtaagagaactcatgcatgataagaaacgccaagaacggaagaatagacgaaaaaataagtgcgcgcgggatattcctactcccttacaaacagccagatgaacaaggaagtaagccaagagaaggaaacagacttcatagaaaatagcagctgcaaagcctgtggcagcactgaagatggtaatacttgtgtagaagtaattgttaccaatgaaaatacatcatgtacctgtcctagcagtggcaatcttttggggtcccctaaaataaagaaaggcttatctccacactgtaatggtagtgattgtggatattcatctagcatggaagggagtgaaacaggttctcgggagggttcggatgttgcctgcactgaaggcatttgtaatcatgatgaacacggtgatgactcttgtgttcatcactgtgaagacaaagaggatgatggtgatagttgtgttgaatgttgggcaaattctgaagagaacgacacaaaaggaaaaaataaaaagaagaagaagaaaagcaagatactgaaatgtgatgaacatgatgagtctgaatgtacttcagatgaggaaatctttatctcacaagatgaaatacagtcatttatggctaataaccagtctttctacagcaatagagaacaataccgacagcatctgaaggagaaatttaataaatactgccggttaaatgatcacaagaggcccatttgtagtggctggttgacaacggctggagcaaattaa

SEQ ID NO: 127740 - DNA, 1569 bp, Homo sapiens
atggccaagccagattgtatcatcacttgtgatagcaaaaacctcaccataaaaactgagagcactttgaaaacaacacagttttctggtaccctgggagagaagtttgaagaaaacacagctgatggcagaagaactcagactgtttgcaactttacagatggcaggtctgaagacacagaaatgaacgtgctcatctctgccctccaggagcacagttctagaaacccagtgaaaaatctcttatttagattagggtttagagcatctctgcaacccacggtggcctctcctctttctgcgggccatggacagcacagtcccttcagccctggagctgccccagcggctggcactgaacccaagggagagcccaaggagtccggaagaggaggagccccacctgctgagcgcttggctgcagtccagaccctggccaatgtcatccggccttgctatggcccccatggccggcagaagttcctggtgaccatgaaaggagaaacagtgtgcacggggtgtgccactgccatcctcagggccctggagctggagcacccagcggcatggctcctccgggaagcagcccaaacccaagcagagaatagtggggatggcacagccttcgtggttctgctgacggaagccttgctggaacaggcagagcagctgctgaagttcggcctgcctcgcccgcagctccgggagcctacgccacagccactgcagagaaaagcaagtaggccagctggagccgcgggaattaatgtggcagtggtgttgggggaggtcgacgaggagaccctcacactggcggacaagtatggcatcgtggtgattcaggctaggtctcggatggagatcatttacctgagtgaggtgttggacacaccgctgctgcctcgtctgctccctccccagaggccaggcaagtgccagagggtttacaggcaggagctgggagatggtttggctgtggtatttgaatgggaatgtacaggcacacctgccctcaccgtggttctcaggggagccaccacccaggggctgcggagtgcagagcaggccgtctaccacagcattgatgcctatttccagccatgtcaagatcccagactgatcccaggagctggggccacagaaatggctttggcaaaaatgctctctgataaaggaagcagattggaagggcccaatgggcctgcattcctagcatttgcccgggccctgaagtatcttcctaaaaccttggcagagaatgcaggcttagctgtctcagacgtggttgcagaaatgagtggagtgcaccaaggtgggaacctcctaatgggtgtgggagctgaagggataataaatgtggcccaggaaggggtgtgggacaccctaatagtcaaagcccaaggatttcgagcagtggctgaggtggtgctacagctcgtgactgtagatgaaatcgtagtggccaagaaaagtcccacacatcagcagatctggaatcctgactctaagaagacaaagaaacgcccacctcctgtggaaaaaaaaaaaatccttggaatgaataactag

SEQ ID NO: 127741 - DNA, 453 bp, Homo sapiens
gaacttaatgaaaaagttattttatgaattgaattttgtcaaattagcaaaagtatcaacttcatcatagaattggcatcttttattagctactaggttgaaaaccacaaactattgtgaataaaatcaatatgggttaatgaagtagactcagaaaggagaaggtgaaacaaatgttgattaaggaggttatgagtcatggaaactcttgtaatgtacttggaagattaaaacgtttactttgtttttgcagactgtctgcaactttacagatggtgcattggttcagcatcaggagtgggatgggaaggaaagcacaataacaagaaaattgaaagatgggaaattagtggtggtaagtgtcaaactgctgtgtctcagtcagcttcttgtgtgcattcatagttcacataactgttctatatcattgatcattaacagaactcagtttgg

SEQ ID NO: 127742 - DNA, 856 bp, Homo sapiens
cgccgcccagcgcgggccgccgttataaagcagccgccggcgccgggtgcctcacagcacgctgccacgccgacgcagacccctctctgcacgccagcccgcccgctaccacccatggcacatgttcagcagctggaaggaagatggcgcctggtggacagccaaaggcttttgatgaaataccatgaaggagcctaggagtgactaatagctttgcgaaaaatgggccgcaatgcccaagcccagatttgtatcatcactgagtgatgggtaaaacccttcaccattaaaaactgagagcactttgaaaacaaacacagttttcttgtacccctggggagagaagtttgaagaaaccacagctcgatgggcagaaaaaactcacgaactgtctgtcaactttcccagatgggtgcattgggttcagcatcaggagtgggatggggaaaggaaaagcaccaataaccaagaaaaattgaaaagatggggaaattagttggttggagtgtgtcatgaacaatggtcacctgtactccggattctatgaaaaagtaggaataaaaaattccatcatccactttgggacagggagtttaattaaggagaatgacccaagcttcagttcaatgagcaaatctccatactgtttctttctttttttttttcattactgtgttcaattatctttatcataaacattttacatgcagctatttcaaagtgtgttggattaattaggatcatccctttggttaataaataaatgtgtttgtgctaatatatcttgtatgcattctttaaaccttacaggaaattagtgatgagttttaataattattaattgagtaagggtggg

SEQ ID NO: 127743 - DNA, 324 bp, Homo sapiens
  misc_feature (1)...(324): n = a,t,c or g
tggacctgcgatggtgaacgtgtccggatcaaacgggtccccgttgacccagtggaattcgtccccaactctgcgtagtcccaatcccagggctccctccgcgtgaacttgaanataaattccagctccttctggctntgaatnacagccagcaccgcctcgtgggtgtggcagtactgcctgcctgtgttccagtctctgggttcctcggaaaagaagtagcacttccttccgtagagcagccagtcctccgggcagggccttcgcacttgatgcagcccttggaagcctccaaggccgccttccagctggtgctgccctcgt

SEQ ID NO: 127744 - DNA, 410 bp, Homo sapiens
  misc_feature (1)...(410): n = a,t,c or g
ctttatgtgaactccagaaagccattgacttattcacagatgccatcaagctgaatcctcgcttggccattttgtatgccaagagggccagtgtcttcgtcaaattacagaagccaaatgctgccatccgagactgtgacagagccattgaaataaatcctgattcagctcagccttacaagtggcgggggaaagcacacaggtaaataattgaatttaattattttcagaactctttacatttaaatctgatgttttaagatgctttgtttaaacaaaaacacaaaagttcctaatgacttaattttcaaattagtgtgtacttagtatcaagaagtgagatagcttgtagacagctgcttaaaaggtaaaagnnnnnnnnnngaaatttaaaagaagaagtgagaatc

SEQ ID NO: 127745 - DNA, 2128 bp, Homo sapiens
  misc_feature (1)...(2128): n = a,t,c or g
atggacccccgcaaagtgaacgagcttcgggcctttgtgaaaacgtgtaagcaggatccgagcgttccgcacgccgagaaaatgcatttcctaagggagagggtggagagcatggcgggtaaagtaccacctgctactcagaaagctaaatcagaagaaaataccaaggaagaaaaacctgatagcactgatgcccctcaagaaatgggagatgagaatgcagagataacagaggagatgatggatcaggcaaatgagaaagtggctgctattgaagccctaaatgatggtgaactgcagacagccattgacttgttcccagatgccatcaagctgaatcctcacttggccattttgtatgccaagacggctgctcagccttacaagtgtcgagagaaagcacacagactttcccttcaattggattatgatgaagatgctagtgcaatgctgaaagaagttcaacctggggcacagaaaattgcagaacatcggagaaagtatgagcgaaaacgtgaagaacaagagatcaaagaaagaatagaaagagttaagaaggctcaagaagagcatgagagagcccagagggaggaagaagccagaagacagtcaggagctcagtactgctcttttccaagtggctttcctgcgggagtgcctggtaattgtcccagaagaatgtctggaatgggagggggcatggctggaatggccagaatccccggactcaatgaaattcttagtgatccagagattcttgcagccatgcaggatccagaaattatgttagccttccaggatgtggctcaggacccagcaaacatgtcaaaataccagcgcaacacaaagactatgcatcttatcagtagattgtcagccaaatttggagaaaaatcattggagcagctgagggaaacatttgaccatgagaaattatctgctgattcaaaccacttgataatctctgcattattgagcgtggcaatggctttagctaattgccactatactccacaaacttacttgagaaagaagtgtccagtggaagactctactgtctctgtgctcatcgttcggacgtttctctcctttatcaagagtttgggggtcaagtcacagcccctaccaccctctgctgtggctccagggcagccgggaagaaaggcgctcatcttccctgagcctccctgcactgtccccgcgaactttattcccattttcacagatgaggctgaggcccgcggccccgaggggctgctgcggcgatccgggtcgggctacgagggcagcaccagctggaaggcggccttggaggacaccaccacacgcctcctgctgggtgccatcgcggtccttctgttcgccatcttggtggtgatgagcatcttggcttccaagggctgcatcaagtgcgaagcgccctgcccggaggactggctgctctacggaaggaagtgctacttcttttccgaggaacccagagactggaacacaggcaggcagtactgccacacccacgaggcggtgctggctgtgattcagagccagaaggagctggaatttatgttcaagttcacgcggagggagccctggattggactacgcagagttggggacgaattccactgggtcaacggggacccgtttgatccggacacgttcaccatcgcaggtccaggggagtgtgtcttcgtggagcccaccaggctggtgtcgacggagtgtctgatgacnccggccctggccctgccaggtcagcatgatcagcccagctcagcagctatgggacttgccccatagtatacagttgggaggtggcaaagccaggatttgttgggtggtggcaaagccaggatttgaacccagacccatccccacagggacctcggaaagctgcatgtatggcaggcttgctgaggtggagctgctgcaggcacagcgcctggacggggctgtggcgcacgtagctcaagtgcgcagtggcaagggccctggcaatgggccagcaagccacgaggctccgggtgctgatggtgtctgggagcccggactgggcttcgccaatcccacaccagctccaaacatcagcctcctcaggctgcagcccgacattctggagggctgttga

SEQ ID NO: 127746 - DNA, 3143 bp, Homo sapiens
ctgcaggaattcggcacgagcggtcacgccgagccagcgcctgggcctggaaccgggccgtagcccccccagtttcgcccaccacctccctaccatggacccccgcaaagtgaacgagcttcgggcctttgtgaaaatgtgtaagcaggatccgagcgttctgcacaccgaggaaatgcgcttcctgagggagtgggtggagagcatgggtggtaaagtaccacctgctactcagaaagctaaatcagaagaaaataccaaggaagaaaaacctgatagtaagaaggtggaggaagacttaaaggcagacgaaccatcaagtgaggaaagtgatctagaaattgataaagaaggtgtgattgaaccagacactgatgctcctcaagaaatgggagatgaaaatgcggagataacggaggagatgatggatcaggcaaatgataaaaaagtggctgctattgaagccctaaatgatggtgaactccagaaagccattgacttattcacagatgccatcaagctgaatcctcgcttggccattttgtatgccaagagggccagtgtcttcgtcaaattacagaagccaaatgctgccatccgagactgtgacagagccattgaaataaatcctgattcagctcagccttacaagtggcgggggaaagcacacagacttctaggccactgggaagaagcagcccatgatcttgcccttgcctgtaaattggattatgatgaagatgctagtgcaatgctgaaagaagttcaacctagggcacagaaaattgcagaacatcggagaaagtatgagcgaaaacgtgaagagcgagagatcaaagaaagaatagaacgagttaagaaggctcgagaagagcatgagagagcccagagggaggaagaagccagacgacagtcaggagctcagtatggctcttttccaggtggctttcctgggggaatgcctggtaattttcccggaggaatgcctggaatgggagggggcatgcctggaatggctggaatgcctggactcaatgaaattcttagtgatccagaggttcttgcagccatgcaggatccagaagttatggtggctttccaggatgtggctcagaacccagcaaatatgtcaaaataccagagcaacccaaaggttatgaatctcatcagtaaattgtcagccaaatttggaggtcaagcgtaatgtccttctgataaataaagcccttgctgaaggaaaagcaacctagatcaccttatggatgtcgcaataatacaaaccagtgtacctctgaccttctcatcaagagagctggggtgctttgaagataatccctacccctctcccccaaatgcagctgaagcattttacagtggtttgccattagggtattcattcagataatgttttcctactaggaattacaaactttaaacactttttaaatcttcaaaatatttaaaacaaatttaaagggcctgttaattcttatatttttctttactaatcattttggatttttttctttgaattattggcagggaatatacttatgtatggaagattactgctctgagtgaaataaaagttattagtgcgaggcaaacataactcatttgaggataaagtttgtgttggatatgtggttcctgatgcattttgacttgtctttttaaatgctttatctttttctttaaagatttatttcaataaaactaattgggaccacccgtatttcagtaggacctgggtagggattggaagtacttggcagggcagcagcaatcttgctgtgtttgatataacatgcatccttgggcaggttgcccttaaatcttacactgtggtgaagggatgttttttttgtaatgctgcagtagagttggagtacttagttctcttgttgtccagtatatctaataagtgtttttcatattatttccacgtaagggaaataaggtagtacttttctttttatatttctatgcttaaaattctctttcctagtcaaaaattgcccaaatctgtgtttgctttctgcttgctacatttgtctcccttacttttcttgagctaaagacaggctttttccaccggcatcatcactgctatcatcattaacagcgtaattatacaagcatatttaatgctgagtttaatttaatatgtaatacatatggtaattgtagggtaatacccacaacaactgtagtttcttacttggccaagagaatgcttatttaagtgttagacttccattctggcaaaatcttgccttatcagaagacattggaaagagggattccctttggtgtttggtcttctacttagaaaaacctattgcagttagtttatcttgtagtattcatctttgtattctgaagataaggtttgaattaaattgatacacacagaggggaaccgattttttttatccaatgtgaattataaatgagataatccacagttattcattgtggagttgttgagactatgaaagactcattgtctttgtattcagctcttaaatagtgtaactatatccccacctctgcttgctttctttccctcccctccaatgataaagaaaatgataaattttctgttgtgcattcaattcttattttaaataagactaagtataggcattgtacctgacattgctacgtttctaccagtgtttcaatttaaagtgctagtgtttaaaaacattttcaagggataaggccttctgtactttgcttatttgaagaatcagtggtaggagcagtgaagtaaattctatggagtacatttctaaaataccacatttctgaaatcataaataagtttattcaggttctaaccctttgctgtacacaagcagacagaaatgcatctgttacataaatgagaaaaagctattatgctgatggagcatgctttttaaatcctttaaaaacactcaccatataaacttgcatttgagcttgtgtgttcttttgttaatgtgtagagttctcctttctcgaaattgccagtgtgtacttggcttaactcaagaacagtttcttctggattccttatttgatttatttaacctaattatattctaatattgcaaatattaccataagtgggtaaaagtaaaattcctcttctg

SEQ ID NO: 127747 - DNA, 446 bp, Homo sapiens
atggaagccgatgggcccgcgagcctccaggagctgcctccctcgccacggtcgccttcaccgccgccgtcgccgccaccactgccctcgccgccgtcgctgccatcgcccgcagccccggaggcccccgagctccccgagccggcgcagccgtccgaggctcacgcccggcagctgctgctggaggagtgggggccgctgagcgggggcctggagctgccccagcgcctcacctggaagctgctcctgttgcggcggccgctctaccgcaacctgctgcgctcgcccaaccccgaagagttatcccagatccccccattttccccggtcctgtgtctccttcttgtccagccccatcatgcctccccggagcagggaggcacctccacctgggcccttgccacccccatccccacagtcctctctgaagcagcaagagggcgcag

SEQ ID NO: 127748 - DNA, 789 bp, Homo sapiens
atggaagccgatgggcccgcgagcctccaggagctgcctccctcgccacggtcgccttcaccgccgccgtcgccgccaccactgccctcgccgccgtcgctgccatcgcccgcagccccggaggcccccgagctccccgagccggcgcagccgtccgaggctcacgcccggcagctgctgctggaggagtgggggccgctgagcgggggcctggagctgccccagcgcctcacctggaagctgctcctgttgcggcggccgctctaccgcaacctgctgcgctcgcccaaccccgaaggcatcaacatttatgagccagcaccccctactggtcccacccagcgacccctggaaactctgggcaatttccgtggctggtacattagaactgaaaagctccagcagaaccaaagctggacagtgaagcagcagtgtgtggaccttctggccgagggcctgtgggaggagctgctggatgacgaacaaccagccattacggtcatggactggttcgaggacagccggctggatgcgtgcgtctatgagctgcatgtctggctgctggcggccgaccgccgcacggtcattgctcagcaccacgtggccccccgaacttctgggagaggaccccctggccgctgggtccaggtgtcccacgtattccgccattatggtcccggtgtgcgctttatccacttcctgcacaaggccaagaaccgcatggagcctggtgggctgcggcggacacgggtgaccgactcctccgtgtctgtgcagctccgggagtga

SEQ ID NO: 127749 - DNA, 831 bp, Homo sapiens
ttatttacatattctttctgttgtggacaaaaacctcctgacagcgcaacatccaccattcagacacttgtgagatatgacttttaaaagtgctacagccattcctggcatttacttcagctccctgtcctccccactccctttttcccttttcccaacccatctcttggtcagagtcctgaaaagacaggctcaaatcccagttctgcgatgacttgccggcttaagcaagtcgtttcccagctctcagacttaattcctcctctgcaaaatgggaagtatgactttcctcacaaggacatagccacagcatttatgtttgaatcatctttaagtctggcggtcacaaagtggggactcaaggcctccaggcccagtcccaaggctccaggccacttgtgccagcagcatgtgtcagcaagacagcagaagcaggaagagagctggctggaagacacatatcccccgaagactgaggaagaggccgtcaggatactgagtagcagttacatcagactgagacacttcctgtttacaggacactataaaacccctgtcccgtcctcatttgctctaacattctataagtctgtgaatgtgctagaaaacctaaaagtacaagtgttactggaaagggatgccaatctggacgccaagagagggttcttggatctcgccaaagaaagaattcaggcctctcttatcctgcaatcatcctccatccaggaaccagatgattttccagaaatgaaaatccaatcatgtttgtcctgcttaatcccttcagtgactctcactgccatcaggctagagcctaaactctttatgtga

SEQ ID NO: 127750 - DNA, 1732 bp, Homo sapiens
tagacaattctttcagctagtttgagtgacgcactgaccagtgaagcgcagtgacagcagtgggaaccggaatatccaaagagtggtttgaaggagaaagaagcattgtggctttatatcctctgggcctgggtttcctgaagtcaccacacatagaggagagagaaaatggctgagttaaagtacatttctggatttgggaatgagtgttcttcagaggatcctcgctgcccaggttccctgccagaaggacagaataatcctcaggtctgcccctacaatctctatgctgagcagctctcaggatcggctttcacttgtccacggagcaccaataagagaagctggctgtataggattctaccttcagtttctcacaagccctttgaatccattgacgaaggccatgtcactcacaactgggatgaagttgatcctgatcctaaccagcttagatggaaaccatttgagattccaaaagcatctcagaagaaagtagactttgtgagtggcctgcataccttgtgtggagctggagacataaagtctaacaatgggcttgctatccacattttcctctgcaatacctccatggagaacagatgcttttacaattcagatggggacttcttgattgttccgcagaaagggaaccttctcatttacaccgagtttggcaagatgcttgtacagcccaatgagatctgcgtcattcagagaggaatgcggttcagcatagatgtctttgaggagaccaggggctacatcttggaggtctatggtgtccactttgagttacctgaccttggaccaattggggccaatggcttggccaatcctcgtgatttcttgatacccattgcctggtatgaggatcgccaagtaccaggtggttacacggtcattaataaataccagggcaagctgtttgctgccaaacaggatgtctccccgttcaatgttgtggcctggcacgggaattatacaccctacaagtacaacctgaagaaatttcatggttatcaactcagtggcctttgaccatgcagacccatccattttcacagtattgactgctaagtctgtccgccctggagtggccattgctgattttgtcatcttcccacctcgatggggggttgctgataagacttcagggcctccttattaccatagggaactgcatgaagagattcatggaactcatccggggtcaatttgagcaaaagcaaggttggttccttccagggggaaggggatcctacacagcacaatgaccccccatggaccttgatgctgactgctttgagaaggccagcaaggtcaagctggcactgaaaaggattgccgatggcaccatggcaatttatgttttgatcctcttttaatttggcgggcccaaaatgggggctccaagccccccagggttttggataaaaattaccccaagtgttgggagccactcaagagcccctttcactcccaactccaggaacccagcagaacctaattgagaatggaaccattgctaccataattaagagtagatttgtgaagattcttcttcagaatctcatgctttctggtagtattggaggagggggttggttaaaatgaaaattcacttttcataagtcaagtaactcagaacttttatggaaacgcatttgcaaagttctatggctgtcaccttaattactcaataaacttgctggtgttctgtggacgtaaa

SEQ ID NO: 127751 - DNA, 159 bp, Homo sapiens
atgctgcttagtccccacaccaagtactccatcatgatcaacgaggcaaggccctacaactacccagtgcctgtctgcaatgatgggaacatgcccgatgtgcccagccacccccaggacccccaaggccccagtttggagtggctgaagaaattgtga

SEQ ID NO: 127752 - DNA, 356 bp, Homo sapiens
cttctgaagcctacttctgtcaatttgtcaaactcattctccatccagttttcttcccttgctggcaaggagttgtgatcctttggaggagaataggcattctggtttttggaattttctgccttttgcactggtttctccccatcttcatggatttccttacctttggtgtttgatgttggtgacctgccagaggccagctggagctctcctgtatgaggtgtctgttggcccctactggaaggtgtctcccagtcaggagacatgggggtcagtgacccatttgaggaggcagtctgacctttagcagagcttgaacgctgtgctgggagatctgctgctctcttcagagccat

SEQ ID NO: 127753 - DNA, 1143 bp, Homo sapiens
atgaggagaaaccagcgcaaaaaggctgaaaattccaaaaaccagaatgcctcttctcctccaaaggatcacaactcctcaccagcaagggaacaaaactggacagagaatgagtttgacaaattgacagaagtaggcttcagaagtgatggggagaatgggaccaagttggaaaacactcttcaggatattatccaggagaacttccccaacttagcaagacaagccaacattcaaattcaggaaatacagacaatgccacaaagatattcctcaagaagagcaacctcaggacacataaccatcaggtttaccaaggttgaaatgagggaaaaaatgttaagggcagccaaagagaaagaaatacaaactgccatcagagaatactataaacacctctacacaaataaactagaaaatctagaagaaacggataaattcctggacacatgcactctcccgagtctaaaccaggaagaattcgaatccttgaatagatcaataacaagttctgaaattgaggcagtaatagactaccaaccaaaaagagtccaggaccagatggattcacagccgaattttaccagagggatgcaagactggttcaacatttgcaaatcaataaatgtaatccatcacataagccgaaccaatgacaaaaaacacatgattatctcaatagatgcagaaaaggcctttgacaaaattcaagacgtcctcatgctaaaaactctcaataaactaggtattgatggaacatatatcaaaataatgcgagttatttatgacaaacacacagtcaatatcatactgaatgggaaaaaactggaagtactcccttggaaaactggcacaagacaaggatgccctctctcaccactcttattcaacatagtactggaagttctggccagggcaatcaggcaagagaaagaaacaaagggtattcaaataggaagagaggaagtcaaattgtctcttcttgcagatgacatgatggtatatttagaaaaccccatggtctcagcccaaaatctccttaagctgataagcaacttcagcaaagtctcaggatacaaaatcaatgtgcaaaaatcacaagcattcctatacaccaataacaaacagacagccaaatcatga

SEQ ID NO: 127754 - DNA, 1551 bp, Homo sapiens; identical to SEQ ID NO: 124671

SEQ ID NO: 127755 - DNA, 930 bp, Homo sapiens
atgtcggcagactttaatgaggaaatgaaaaagactaaagctttgggcactagagatactgaccgagctttatcattactggaagaatactgcaaaaaattaaggaaaccagaggagcagctgttgaaaaatgcggttaaaaaggtgatgggtatctttaagagcagcttattccaagctttgctagttcttaaagatgatgtgtccgcagtttgttccttcagatgttcagatgtgtccagagtttcttcctcctggtgggttcgtggtctcactgacttcaggagtgaagctgcagaccttcacaacagaaaagttctccaagtccccacctgtcccagaagcccaatcagcttcacctctcactggcattcactgtgggactttgcggcacctagtctgggcactctggcagcccagagggagctcgtcccagacaatcaagaggaaaagaggggaagcgagaaagagatggagacctggtattgtggccaatcatcccgtgaaaagggaatggcggtccatgcatgggattcagcctctgatcaagcccagcaggcatcagcccgctgccctgactataatcatgttctttgtggcaacatggatgcagctggaggcccttatcctaagcaaattaatgcagaaacagaaaaccaaatatcacatgttcttatttataagttagagctaaatattgggtacacaattgacataaagatgggaacaatagacactggggactccaaaagtggggagcctagtggtggcagctgcactggctgtgtcagtcctgcctcaggacaggatgcagattctaagcagcaaagttctcaggatggcaccaagaagcagctgctcagggctcagatacctgtgggactccatgtgggttccccgtctggagcgacatcttggtacagtctctag

SEQ ID NO: 127756 - DNA, 2631 bp, Homo sapiens
atgacagctgaagaaagggacaaattccctaccagtcagcaagctgtccccagtatggatgcccactgggacctcgactcagatcatggggactggagtcgtaaacatctgttgacctgtgttctagaaggactaaggagaattaggaaaaagcccatgaattattcaatgatgtccaccataactcagggaaaggaagaaaatccttctgccttccttgagcagctacaggaggccttaagaaaatatactcctctgtcacccaactcactagtgggtcaattgatcctaaaagataagtttattacccaatcaaccacagatatcagaagaaagctccaaaatagggaccaagaggaacaggcccaaaaggaaaagcgagatcagagaaaggccatagccttagtcatggccctcagacaaaccttggtggttcaaagaggacagaaaatggagcaggccaatcacctggtggggcttgttaccagtgtggtttgcaaggacaccttaaaaaagattgtccaacgagaaacaagccgccccatcgtccatgtccactatacggaggcaatcactggaagtcacactacccagagggcaaagcttctctgggccagaagcccccaaccagatgatccaatgacaggactgaggatgactgcggcaagcacccgttcatgtcatcaccccctcactgagccctgggtatgtttaatcattgagggccaggaaattgacttcctcctggacactggcacgaccttctcagtgttaatcccctgtcttggacgactgtcctcaaggtccgttaccatccaaggaatcctgggacagcctgtaaccaggtatttctcccacctcctcagttgtaattgggagactttgctcttttcacatgcctttcttgttatgcctgaaagtcccacacccttattagggagggatatattagccaaagctggagctattatctccatgaagacagggaacaagttacccatttgttgtcccctacttgagggaatcaaccctgaagtctgggcattggaaggacaatttggaagggcaaaaaatgcccatccactccaaatcaggctaaaagaccccatcagttttccttatcaaaggcaatatcccttaaggcctgaagctcataaaggattacaggatattgttaaacatttaaaagctcaagactcagtaagaaaatgcagcagtccctgcaacaccccaattctaggagtacaaaaactgaacagtcagtggagactagtgcaagatcttagactcatcaatgaggcagtaattcctctatatccagttgtacgcaacccctatacccttctctctcaagtaccagaggaagcagaatggttcactgttctggacctcaaggatgccttcttctgtattcccctgcactctgactcccagtttctttttgcctttgaggatcccacagaccacacatcccaacttatgtggatggtcttgccccaaaggtttagagatagccctcatctgtttggtcaggcacaggcccaagatctaggccacttctcaagtccaggcactctggtccttcaatacagcgagatagccaagaccctctatactctaatcaaggagatggagagggcaaatactcacctagtagaatgggaaccagaggcagaaacagccttcgaaaccttaaagcaggccctagtacaagctccagctttaagccttcccacaggacaaaacttcgctttatatgtcatagagagagcagggatagctcttggagtccttactcagactcacaggacaaccccacaaccagtggcatacctaaggactagcacccagttagcagaactagtggcacttacccgagccttagaactgggaaaaggaaaaagaataaatgtgtatacagatagcaagtatgcttatctaatcctacatgcccatgctgcaatatggaaagaaagggagttcctaacctctgggggcaccccattaaataccacaaggaaattatggagttattgcacacagtgcaaaaacccaaagaggtggcagtcttacactgccaaagccatcagaagggctaggaatggctactgctacaggaactggaatagccagtttatctacttcagtatcctactaccacacactctcaaaggatttctcagtttgcaagaaataacaaaatctatccttactctacaatcccaaatagactgtttggcagcagtgactctccaaaactgccaaggcttagacctcctcactgctgagaaaggaggactctgcaccttcttaggcgaagagtgttgtttttatactaaccagtcagcgatagtaagagatgctgcccggcatttacaggaaaaggcttctgaaatcagacaatgcctttcaaactcttataccaaccactggagttgggcaacatggcttctcccctttctaggtcctgtggcagccatcttgctatcattcgcctttgggccctgtatttttaaccctcttgtcaaatttgtttcctctaggatcaaggccatcaagctacagatgatcttacaaatggaaccccaaataagctcagctaacaacttctaccgaggacccctggagtga

SEQ ID NO: 127757 - DNA, 662 bp, Homo sapiens
  misc_feature (1)...(662): n = a,t,c or g
cagcaggggccaacagacaccttatacagaagaactctggctggcatctgcnaggtgcccctctgggatgaagcttccagaggaaggaataggcagcaatctttgccgttctgtagccttctctggtgatacccaggcaaacagcaaactccagcagactgcggaaaaggggcctgactcttagaaggaaaattaacaaacagaaaggaatagtagcaacatcaacaaaaagggtgcccatacaaaaaccccatccaaaggtcatcagcaacaaaaacaaaaggtagataaatccacgaagatggggagaaaccagcgcaaaaaggctgaaaattccaaaaaccagaatgcctcttctcctccaaaggatcacaactcctcaccagcaagggaacaaaactggacagagaatgagtttgacaaattgacagaagtaggcttcagaagtgatggggagaatgggaccaagttggaaaacactcttcaggatattatccaggagaacttccccaacttagcaagacaagccaacattcaaattcaggaaatacagacaatgccacaaagatattcctcaagaagagcaacctcaggacacataaccatcaggtttaccaaggttgaaatgagggaaaaaatgttaagggcagccaaagagaaag

SEQ ID NO: 127758 - DNA, 5175 bp, Homo sapiens; identical to SEQ ID NO: 118077

SEQ ID NO: 127759 - DNA, 2094 bp, Homo sapiens; identical to SEQ ID NO: 124673

SEQ ID NO: 127760 - DNA, 1869 bp, Homo sapiens
ggaccaagaggaacaggcccaaaaggaaaagcgagatcagagaaaggctgcagccttagtcatggccctcagacaaacaaacctttggtggttcagaaaggacagaaaatggagcaggccaatcacccggtagggcttgttatcagtgtggtttacaaagacattttaaaaaagattgtccaacgagaaacaagccaccccctcatccatgtccgctatgccgaggcaatcactggaaggcgcactgccccggaggacaaaggttctctggggagggatatgttagccaaagctggagctattatctacatgaatatggggaacaagttacccatttggtgtcacctacttgaggaaggaatctaccttgaagtctgggcattggaaggacaatttggaagggcaaaaaatgcctgcccagtccaaatcaggttaaaagatcccaccacatttccttatcaaaggcaatatcccttaaggcctgaagctcataaaggattacaggatattgttaaacatgtaaaagctcaaggcttagtaaagaaatgcagcagtccctgcaacaccccaattctaggagtacaaaaaccgaacggtcagtggagtctagtgcaagatcttagactcatcagtgaggcagtaattcctctatatccagttgtacccaacccctataccctgctctctcaaataccagaggaagcagaatggttccctgttctggacctcaaggatgccttcttctgtattcccctgcactatgactcccatgactcccagtttctctttgcctttgaggatcccacagaccacacatcccaacttatatggaccgtcttgccccaagggtttagggatagccctcatctgtttggtcaggcactggcccaagatctaggccacttctcaagtccaggcactctggtccttcagtatgtggatgatttacttttggctaccagttcggaagcctcatgccagcaggctactctagatctcttgaattttctagctaatcaagggtacaaggcatctaggtcaaaggcccagctttgcctacagcaggtcaaatatctaggcctaatcttagccagagggaccaggacccttggcaaggaacgaatacagcctatactggcttatcctcaccctaagactttaaaacagttgtgggggttccttgaaatcactggcttttgctgactatggatcccaggatacagcaagatagccaggcccctctatactctaatcaaggagacccagagggcaaatactcatctagtagaatgggaatcagaggcagaaacagccttcaaaaccttaaagcaggccctagtacaagcgccaggtttaagccttcccacaggacaaaacttctctttatatgtcacagagagagccgggatagctcttggagtccttactcagactcgtgggacaaccccacaaccagtggcacacctaagtaaggaaactgatgtagtagcaaaaggctggcctcactgtttaagggtagttgcagcagtggccgtcttagtgtcagaggctatcaaaataatacaaggaaaggatctcattgtctggactactcatgaagtaaatggcatactaggtgaaaaggaagtttatggctatcagacaaacgcctatttagataccaggcgctctgccttgagggactggtgcttcaaatacgcacgtcctgtggcagccatcttgctgttactcgcctttgggccctgtatttttaaccttcctgtcaaatttgtttcctctagaatcgaggccatcaagctacagatggtcttacaaatggacccccaaatcagttcaactaacaacttctaccgaggacccctggactga

SEQ ID NO: 127761 - DNA, 889 bp, Homo sapiens
tatccagctgacgatagacagtgaaactggtcgatccaagggatatggatttattacattttctgattcagaatgtgccaaaaagtctttggaacaatttaatggatttgaactagcagggaggccaatgaaagttggtcatgttattgaacgtgctgatgcttcgagtactagttcatttttggacagtgatgaactggaaaggactagaattgatttgggaacaactggtcgtcttcagttagtggcaagacttgcagaggatacagaggctattactattccgatgtctattcccatagattcatttggctcttctggaagtacatataaatggaatcatatggaagctgataggagaataagagtgagccacgtggagaagaatcaaggtattctggctgcattaaagagaataatggcccatgaagatgttcacatcctaattcctggaacctgcgaatattttatattacatgttaattttgagcagcatttccactgttctggaacatggatggagcatgaggctattatctttggcaaattaacgcaggaaaaaaaaaatcaaacaccacatgttctcacttataagttggagctaaatgatgagaatgcatggacacatagagaggaacaatacacactggggcctatcaaagggtggagggtaggggagtcggatttatcgaaccatgagggaagtggatgcctgggccgcacatgggtagcttggggagtatgcgcttccaaaagatcacaggaggctagggccagcaagattacactagaaaacagccacccacgacaggcaggccgagggaaaccagcgccttttgcggaaccgaggagtctaggagagctggaagctattgcagcagcaagatga

SEQ ID NO: 127762 - DNA, 2623 bp, Homo sapiens
cgggctgggcggttccgcggcctgggcctaggggcttaacagtagcaacagaagcggcggcggcggcagcagcagcagcagcagcagcaatctcttcccgaacacgagcaccacaggcgcccgaaggccggaacaggcgtttagagaaaatggcagacgatattgatattgaagcaatgcttgaggctccttacaagaaggatgagaacaagttgagcagtgccaacggccatgaagaacgtagcaaaaagaggaaaaaaagcaagagcagaagtcgtagtcatgaacgaaagagaagcaaaagtaaggaacggaagcgaagtagagacagagaaaggaaaaagagcaaaagccgtgaaagaaagcgaagtagaagcaaagagaggcgacggagccgctcaagaagtcgagatcgaagatttagaggccgctacagaagtccttactccggaccaaaatttaacagtgccatccgaggaaagattgggttgcctcatagcatcaaattaagcagacgacgttcccgaagcaaaagtccattcagaaaagacaagagccctgtgagagaacctattgataatttaactcctgaggaaagagatgcaaggacagtcttctgtatgcagctggcggcaagaattcgaccaagggatttggaagagtttttctctacagtaggaaaggttcgagatgtgaggatgatttctgacagaaattcaagacgttccaaaggaattgcttatgtggagttcgtcgatgttagctcagtgcctctagcaataggattaactggccaacgagttttaggcgtgccaatcatagtacaggcatcacaggcagaaaaaaaacagagctgcagcaatggcaaacaatttacaaaagggaagtgctggacctatgaggctttatgtgggctcatcacacttcaacataactgaagatatgcttcgtgggatctttgagccttttggaagaattgaaagtatccagctgatgatggacagtgaaactggtcgatccaagggatatggatttattacattttctgactcagaatgtgccaaaaaggctttggaacaacttaatggatttgaactagcaggaagaccaatgaaagttggtcatgttactgaacgtactgatgcttcgagtgctagttcatttttggacagtgatgaactggaaaggactgggaattgatttgggaacaactggtccgtcttcagttaatgggcaagacttgcagagggtacaggtttgcagattccgccagcagcacagcaagctctacagatgagtggctctttggcattttggtgctgtgggcagaaatctcttttgttatagatttgcaaaacaagacttttctcaccagacttgaaacctcagctttatctgcagctgcctctggttcagccacttgcaacacaatgtttccaactctctaacatgtttaaccctcaaacagaaaaagaagttggatgggataccgagattaaggatgatgtgattgaagaatgtaataaacatggaggagttattcatatttatgttgacaaaaattcagctcagggcaatgtgtatgtgaagtgcccatccattgctgaagctattgctgctgtcaatgcattgcatggcaggtggtttgctggtaaaatgataacagcagcatatgtacctcttccaacttaccacaacctgtttcctgattctatgacagcaacacagctactggttccaagtagacgatgaaggaagatatagtcccttatgtatatagctttttttctttcttgagaattcatcttgagttatcttttatttagataaaaataaagaggcaaggatctactgtcatttgtatgcaatttcctgttaccttgaaaaaataaaaatgttaacaggaatgcagtgtgctcattctccctaaatagtaaatcccactgtatacaaaactgttctcttgttctgccttttaaaatgttcatgtagaaaattaatgaactataggaatagctctaggagaacaaatgtgctttctgtaaaaaggcagaccagggatgtaatgtttttaatgtttcagaagcctaactttttacacagtggttacatttcacatttcactaatgttgatatttggctgatggttgagcagtttctgaaatacacatttagtgtatggaaatacaagacagctaaagggctgtttggttagcatctcatcttgcattctgatcaattggcaagaaagggagatttcaaaattatatttcttgatggtatcttttcaattaatgtatctgtaaaagtttctttgtaaatactatgtgttctggtgtgtcttaaaattccaaacaaaatgatccctgcatttcctgaagatgtttaaacgtgagagtctggtaggcaaagcagtctgagaaagaaataggaaatgcagaaataggttttgtctggttgcatataatctttgctctttttaagctctgtgagctctgaaatatatttttgggttacttcagtgtgtttgacaagacagcttgatatttctatcaaacaaatgactttcatattgcaacaatctttgtaagaaccactcaaataaaagtctcttaaaaaggcc

SEQ ID NO: 127763 - DNA, 510 bp, Homo sapiens
ctgaacgccgtcgagggcatcctggcctgcctcttcgtggagctcttccagagctggcagatcctggcgcgggcctggcgtgccttcttcaagctgctggctgtggtgctcttcctcttcacctcccgggagtactgtgacttcatgaggggctacttccatgaagaggccacgctctgctctcaggagcactgcatggatgatgtgtgtgggctcctgccttttctcaaccccgaggtgcctgaccagttctaccgcctgtggctatccctcttcctgcacgccgggatcttgcactgcctggtgtccatctgcttccagacgactgtcctgctggacctgaagaagctggcaggctggcaccgcatagccatcatctacctgctgagtggtgtcaccggcaacctggccagtgccatctttcttgcataccgagcagaggtgggtcctgctggctcccagatcggcatcctggcctgcctcttcgtggagctcttccagagctggcaa

SEQ ID NO: 127764 - DNA, 482 bp, Homo sapiens
atagatgaccctaggtaagagccgtggaattccgcaggtctgggacctgattgcgggccacgaggcgcaattcggggcggagctgctgctcaggctcttcacggtgtaccccagcaccaaggtctacttcccgcacctgagcgcctgccaggacgcgacgcagctgctgagccacgggcagcgcatgctggcggctgtgggcgcggcggtgcagcacgtggacaacctgcgcgccgcgctgagcccgctggcggacctgcacgcgctcgtgctgcgcgtggacccagccaactttccgctgctaatccagtgtttccacgtcgtgctggcctcccacctgcaggacgagttcaccgtgcaaatgcaagcggcgtgggacaagttcctgactggtgtggccgtggtgctgaccgaaaaataccgctgagccctgtgctgcgcaggccttggtctgtgcctgtcaataaacagaggcccgaaaa

SEQ ID NO: 127765 - DNA, 1758 bp, Homo sapiens
atgctcagcgcccaggagcgcgcccaaatcgcgcaggtctgggacctgattgcgggccacgaggcgcaattcggggcggagctgctgctcaggtcggtagaggcggggtctccgggagctcaggaggtggagatgagggttttgggcgcgtgggccgccaacgccatccaaggtccttcgggtgcggatccccggggctctgggcggctcttcacggtgtaccccagcaccaaggtctacttcccgcacctgagcgcctgccaggacgcgacgcagctgctgagccacgggcagcgcatgctggcggctgtgggcgccgccgtgcaacacgtggacaacctgcgcgccgccctgaacccgcttgcggaactgcacgcgctcgtgctgcgcgtggacccagccaacttttcggtgaggcctttccggcccgggcaatggacccgcatgggagagaccgcggcttcgagacacctggggacacctggggacacctggggcggcgtccgcggtgaggactgggagacgctgctgcatctccgggacaccacttggggccgaggccaaggccccagggagcctgtggtctctatggaagaagggggccaattaatggatcttttggtcaatactggtgctgatttctctgtggtaactcgcccaattagcacccacaaaaagaactatgctgctatcatgggagctactagggccaaagacgtgacacctttttccaaatacaggagatgtgttattggaggacaagaagtgcagcatgagtttctatatatgccaaattcttcaatgcccttgttgaggagagacttgctccaaaaactgcaggcacaaatttcctttacacctaaagggaatgtgaccctggagatagggaagccaaaggcaatgatgactgtcctgcgggacctggagaagctggcaagctggcaccgcataaccatcatctacctgctgagtggtgtcaccggcaacctggccaagtgccatcttcctgccataccgagcagaggtgggtcctgctgggctcccagttcggcatcctggcctgcctcttccgtggaagctcttccagagctgggcagatcctgggcgcggccctggcgtgccttcttcaagcttgctggctgtgggtgctcttcctctttcacctttggggcttgttgccgtgggatttgacaacttttgcccacatcttcgggggttcatcagtggccctcttcctctccttcgccttcttgccctacatcagctttggcaaagttcgacctgtgccggaaacgctgccagatcatcatctttcaggtggtcttcctcgggcctcctggctggcctggtggtcctcttctacgtctatcctgtccgctgtgagtcgtgtgagttcctcacctgcatcccctttcactgacaagttactgtgagaagtacgaactggaacgctcagctccactgagctggctgcgggctccagcggccgtgtgctccagcaggccagagccagacacgacctccctgagccctacaggccttacaggagtcacctgctccatgtggggaactggcactgttttcctgaacacagacctctttcttgtgccttgttcacttctgttgaacccctcgtacttgccgggcatttattatactacttcctgtcataaccttctaacttgtttcttgacgaccacctcatgtggccaataaatggactgggagcgttttagctgccattaacttgaaaaaaaa

SEQ ID NO: 127766 - DNA, 395 bp, Homo sapiens; identical to SEQ ID NO: 118244
  misc_feature (1)...(395): n = a,t,c or g

SEQ ID NO: 127767 - DNA, 988 bp, Homo sapiens
  misc_feature (1)...(988): n = a,t,c or g
atggctgtgaacaagacatataagatttccattctcatgggatttaacttatggaagatatacaagcataaagatttgatcaggattgatgacatctcatgcactttggcaaataatgaggaaggaataataacaaaaatgctggtaacagagtcagtacccatagaaaggggtctcgatccacaccccaagagagggttcctggttcttgcacaagaaagaattcagggtgagtccatagtgcaaagcaaaagccagtttattatgaaagctggaattcagcaagctagacgtgagggtgattcagaggtttggcagttccctgttagaatacaccccccagatcaacagggaaatattacagctacatttgagccttttccttttaaattcgggaaagcacatttagttgattatatcaaggcctgtgatgatatcagagctgagcaagactgtgaatggtttgcatttacaattcctgcagtaaagaacctgcagcctgctaagcattttcattgtttcacagatgggtctagtcatggtaaagcttattattctgaatcaagaggccaaaatcaacagccaatttggataccatcaagacacctgaaaacttatcatgagccagatgctgaggaaaagatttcgggaggaaactgtggaccccacccccacccccggttgcagccatgtccagactgacgctgaggaagaccccaactgtcacgagcaacacctgtcaaacacagccacccacctggagacagatcaagaagctgtcacagatggtggaagaaaacctgaggaaagcaggacaaccagtcacaatgaataatttaatggcagctatgatagcggntatcaccactgcctctgcagatgcagatcccgattcctgcaagaagtagctcaccgtgacaaagcagcccttgcttttatctccttacaaatcaaagaagggagagatgttgggagcaagctccccaaa

SEQ ID NO: 127768 - DNA, 483 bp, Homo sapiens; identical to SEQ ID NO: 118658

SEQ ID NO: 127769 - DNA, 361 bp, Homo sapiens
tcgccgatttcgtgctggcgctgggtacgtcgtggagtccactggcgtcttcaccaccatggagaaggctggggctcatttgcaggggggagccaaaagggtcatcatctctgccccctctgctgatacccccatgttcgtcatgggtgtgaaccatgagaagtatgacaacagcctcaagatcatcagcaatgcctcctgcaccaccaactgcttagcacccctgcctctactggcgctgccaaggctgtgggcaaggtcatccctgagctgaacgggaagctcactggcatggccttccgtgtccccactgccaatgtgtcagtggtggacctgacctgccgtctagaaaaacctgcca

SEQ ID NO: 127770 - DNA, 369 bp, Homo sapiens; identical to SEQ ID NO: 118660

SEQ ID NO: 127771 - DNA, 1377 bp, Homo sapiens
  misc_feature (1)...(1377): n = a,t,c or g
ggcacgaggcgacagtcagccgcatcttcttttgcgtcgccagccgagccacatcgctcagacaccatggggaaggtgaaggtcggagtcaacggatttggtcgtattgggcgcctggtcaccagggctgcttttaactctggtaaagtggatattgttgccatcaatgaccccttcattgacctcaactacatggtttacatgttccaatatgattccacccatggcaaattccatggcaccgtcaaggctgagaacgggaagcttgtcatcaatggaaatcccatcaccatcttccaggagcgtttatccctccaaaatcaagtggggcgatgctggcgctgagtacttcgtggagtccactggcgtcttcaccaccatggagaaggctggggctcatttgcaggggggagccaaaagggtcatcatctctgccccctctgctgacgcccccatgttcgtcatgggtgtgaaccatgagaagtatgacaacagcctcaagatcatcagcaatgccttcctgcaccaccaactgcttaacaacccttggccaaggtcatccatgacaactttggtatcgtggaaggactcatgaccacagtccatgccatcactgccacccagaagactgtggatggcccctccgggaaactgtggcgtgatggccgcggggctctccagaacatcatccctgcctctactggcgctgccaaggctgtgggcaaggtcatccctgagcttgaacgggaagctcactggcatggccttccgtgtccccactgccaacgtgtcagtggtggacctgacctgccgtctagaaaaacctgccaaatatgatgatatcaagaaggtggtgaagcaagccgtcggagggccccctcaagggcatcctgggctacactgagcaccaggtggtctcctctgacttcaacagcgacacccactcctccaccttcgacgctggggctggcattgccctcaacgaccactttgtcaagctcatttcctggtatgacaacgaatttggctacagcaacagggtggtggacctcatggcccacatggcctccaaggagtaagacccctggaccaccagccccagcaagagcacaagaggaagagagagaccctcactgctggggagtccctgccacactcagtcccccaccacactgaatctcccctcctcacagtttccatgtagaccccttgaagaggggaggggcctagggagccgcaccttgtcatgtaccatcaataaagtaccctgtgctcccaaaaaaagagaggaagaacatgccacaattagtnnnnnnnnnnncagaaaatcccctccctaaaaattatcatgtaaacccctgtgggggggggcgggcg

SEQ ID NO: 127772 - DNA, 483 bp, Homo sapiens; identical to SEQ ID NO: 118658

SEQ ID NO: 127773 - DNA, 361 bp, Homo sapiens; identical to SEQ ID NO: 127769

SEQ ID NO: 127774 - DNA, 369 bp, Homo sapiens; identical to SEQ ID NO: 118660

SEQ ID NO: 127775 - DNA, 1377 bp, Homo sapiens; identical to SEQ ID NO: 127771
  misc_feature (1)...(1377): n = a,t,c or g

SEQ ID NO: 127776 - DNA, 495 bp, Homo sapiens
  misc_feature (1)...(495): n = a,t,c or g
gaggtcctaaggaacaangggtacaatcgctctctagacatgtggtctgttggggtcatcatctatgtaagcctaagcggcacattcccatttaatgaagatgaagacatacacgaccaaattcagaatgcagctttcatgtatccaccaaatccctggaaggaaatatctcatgaagatgttgacttgatacaatataatacctatatcttggggtgcttgagtagtcattgcactgcttgatcctcacagcaatcctctggtctcagttttcttttctgatatggtgatgctaattcctaccttactgggttattatatacaatatcaggacatgtaacttgttcatgttacagattgccatgaaaatagtgagaataagaaaagaagcacaagtatcttttttcaggaataaagaagaaacaactataaacaccagggaaatacaaaaagttgtataacaaagtcgtgtataataaagatgcaactaacaaa

SEQ ID NO: 127777 - DNA, 3742 bp, Homo sapiens
gaattccttctctcctcctcctcgcccttctcctcgccctcctcctcctcctcgccctcccctcccgatcctcatccccttgccctcccccagcccagggacttttccggaaagtttttattttccgtctgggctctcggagaaagaagctcctggctcagcggctgcaaaactttcctgctgccgcgccgccagcccccgccctccgctgcccggccctgcgccccgccgagcgatgagcgcccctccggtcctgcggccgcccagtccgctgctgcccgtggcggcggcagctgccgcagcggccgccgcactggtcccagggtccgggcccgggcccgcgccgttcttggctcctgtcgcggccccggtcgggggcatctcgttccatctgcagatcggcctgagccgtgagccggtgctgctgctgcaggactcgtccggggactacagcctggcgcacgtccgcgagatggcttgctccattgtcgaccagaagttccctgaatgtggtttctacggaatgtatgataagatcctgctttttcgccatgaccctacctctgaaaacatccttcagctggtgaaagcggccagtgatatccaggaaggcgatcttattgaagtggtcttgtcacgttccgccacctttgaagactttcagattcgtccccacgctctctttgttcattcatacagagctccagctttctgtgatcactgtggagaaatgctgtgggggctggtacgtcaaggtcttaaatgtgaagggtgtggtctgaattaccataagagatgtgcatttaaaatacccaacaattgcagcggtgtgaggcggagaaggctctcaaacgtttccctcactggggtcagcaccatccgcacatcatctgctgaactctctacaagtgcccctgatgagccccttctgcaaaaatcaccatcagagtcgtttattggtcgagagaagaggtcaaattctcaatcatacattggacgaccaattcaccttgacaagattttgatgtctaaagttaaagtgccgcacacatttgtcatccactcctacacccggcccacagtgtgccagtactgcaagaagcttctgaaggggcttttcaggcagggcttgcagtgcaaagattgcagattcaactgccataaacgttgtgcaccgaaagtaccaaacaactgccttggcgaagtgaccattaatggagatttgcttagccctggggcagagtctgatgtggtcatggaagaagggagtgatgacaatgatagtgaaaggaacagtgggctcatggatgatatggaagaagcaatggtccaagatgcagagatggcaatggcagagtgccagaacgacagtggcgagatgcaagatccagacccagaccacgaggacgccaacagaaccatcagtccatcaacaagcaacaatatcccactcatgagggtagtgcagtctgtcaaacacacgaagaggaaaagcagcacagtcatgaaagaaggatggatggtccactacaccagcaaggacacgctgcggaaacggcactattggagattggatagcaaatgtattaccctctttcagaatgacacaggaagcaggtactacaaggaaattcctttatctgaaattttgtctctggaaccagtaaaaacttcagctttaattcctaatggggccaatcctcattgtttcgaaatcactacggcaaatgtagtgtattatgtgggagaaaatgtggtcaatccttccagcccatcaccaaataacagtgttctcaccagtggcgttggtgcagatgtggccaggatgtgggagatagccatccagcatgcccttatgcccgtcattcccaagggctcctccgtgggtacaggaaccaacttgcacagagatatctctgtgagtatttcagtatcaaattgccagattcaagaaaatgtggacatcagcacagtatatcagatttttcctgatgaagtactgggttctggacagtttggaattgtttatggaggaaaacatcgtaaaacaggaagagatgtagctattaaaatcattgacaaattacgatttccaacaaaacaagaaagccagcttcgtaatgaggttgcaattctacagaaccttcatcaccctggtgttgtaaatttggagtgtatgtttgagacgcctgaaagagtgtttgttgttatggaaaaactccatggagacatgctggaaatgatcttgtcaagtgaaaagggcaggttgccagagcacataacgaagtttttaattactcagatactcgtggctttgcggcaccttcattttaaaaatatcgttcactgtgacctcaaaccagaaaatgtgttgctagcctcagctgatccttttcctcaggtgaaactttgtgattttggttttgcccggatcattggagagaagtctttccggaggtcagtggtgggtacccccgcttacctggctcctgaggtcctaaggaacaagggctacaatcgctctctagacatgtggtctgttggggtcatcatctatgtaagcctaagcggcacattcccatttaatgaagatgaagacatacacgaccaaattcagaatgcagctttcatgtatccaccaaatccctggaaggaaatatctcatgaagccattgatcttatcaacaatttgctgcaagtaaaaatgagaaagcgctacagtgtggataagaccttgagccacccttggctacaggactatcagacctggttagatttgcgagagctggaatgcaaaatcggggagcgctacatcacccatgaaagtgatgacctgaggtgggagaagtatgcaggcgagcagcggctgcagtaccccacacacctgatcaatccaagtgctagccacagtgacactcctgagactgaagaaacagaaatgaaagccctcggtgagcgtgtcagcatcctctgagttccatctcctataatctgtcaaaacactgtggaactaataaatacatacggtcaggtttaacatttgccttgcagaactgccattattttctgtcagatgagaacaaagctgttaaactgttagcactgttgatgtatctgagttgccaagacaaatcaacagaagcatttgtattttgtgtgaccaactgtgttgtattaacaaaagttccctgaaacacgaaacttgttattgtgaatgattcatgttatatttaatgcattaaacctgtctccactgtgcctttgcaaatcagtgtttttcttactggagcttcattttggtaagagacagaatgtatctgtgaagtagttctgtttggtgtgtcccattggtgttgtcattgtaaacaaactcttgaagagtcgattatttccagtgttctatgaacaactccaaaacccatgtgggaaaaaaatgaatgaggagggtagggaataaaatcctaagacacaaatgcatgaacaagttttaatgtatagttttgaatcctttgcctgcctggtgtgcctcagtatatttaaactcaagacaatgcacctagctgtgcaagacctagtgctcttaagcctaaatgccttagaaatgtaaactgccatatataacagatacatttccctctttcttataatactctgttgtactatggaaaatcagctgctcagcaacctttcacctttgtgtatttttcaataataaaaaatattcttgtcaaaaaaaaaaaaa

SEQ ID NO: 127778 - DNA, 854 bp, Homo sapiens
atgagggctcgaaccaaggcagcagaggtgaggatgaagaaccttcatcaccctggtgttgtaaatttggagtgtatgtttgagacgcctgaaagagtgtttgttgttatggaaaaactccatggagacatgctggaaatgatcttgtcaagtgaaaagggcaggttgccagagcacataacgaagtttttaattactcaggtgaaactttgtgattttggttttgcccggatcattggagagaagtctttccggaggtcagtggtgggtacccccgcttacctggctcctgaggtcctaaggaacaagggctacaatcgctctctagacatgtggtctgttggggtcatcatctatgtaagcctaagcggcacattcccatttaatgaagatgaagacatacacgaccaaattcagaatgcagctttcatgtatccaccaaatccctggaaggaaatatctcatgaaggtggaaaaccagggcctccaagttcaggggaaggagaatcactttggactttaccagttaggactccactttcagaggagatagaatttaggccagtcagtgaagaatggaaagaaagagacatagcattttagcaagagggaattatacaggataattcaaaaggcatttatatttgactaggaagtacacattttacttggctatagaaatgtctaagcactaaaaatttcctaccactcagatgaagtgatatggagaccagctcagatgggagatagaaccctcacttttccaaatgactcaagtaccccccttatggctcactcttgcctttgaggcacaggcattttactgtttgcgaactaaagctctggatggcaaa

SEQ ID NO: 127779 - DNA, 477 bp, Homo sapiens
atggggagaaaccagagcagaaaagctgaaaatactaaaaatgagagtgcctcttctcctccaaaggatcgcaattcctcaccagtaagggaacaaagctggacggagaatgagtttgacgagttgacagaagtaggcttcagaaagttggtaataacaaacttctccgagctaaaggagcatgttctgaccgatcacaaggaagctaaaaaccttgaaaaaagtgttggaagtagtggccagggaaatcagtcaagagaaagaaataaaggtattcaattaggaaaagaggaagtcaaattgtccctgtttgcagatgacatgatgaattggaaagaaaactactttaaagttcatatggaaccaaaaagagcacgcattgccaagacaatcctaagcaaaaagaacaaagctggaggcatcatgctacctgacttcaagctattctacaaggctacagtaaccaaaacagcatga

SEQ ID NO: 127780 - DNA, 984 bp, Homo sapiens
atggggagaaaccagagcaaaaaagctgaaaattctaaaaaccagagcacctcttctcctccaaaggatctcagctcctcgccagcaacagaacaaagctggatggagaatgactttgatgagttgacagaagtaggcttcagaagaataaacagtgtagagaagaccttaaatgatctgatggagctgaaaaccgtggcacaagaacttcatgatgcatgcacaagcttcaatagccgattcaatcaagcggaagaaaggttatcagtgattgaagatcaaatgaatgaaataaagcgagaagacaagatcaaaagagacaaagaaggccattacctaatggtaaagggatcaattcgacaagaagagctaactatcctaaatatatatgccaccaatacaggagcacccagattcataaagaaagtgcttagagacctacaaagagacttagactcccacacagtaatagtgggagactttaacaccccactgtcaatattagacagatcaatgagacagaaggttaacaaggatatccaggacttgaactcagctctgcaccaagcagacctaatagacatctacagaactctccaccccaaatcaatagaatgtacattcttagcaccacatcacacttattccaaaattgaccacatagttggaagtaaagcactcctcagcgaatgtaaaagaacagaaattataacaaactgtctctcagaccacagtgcaatcaaactagaactcaggattaagaaactcactcaaaactgcacaactacatgggaactgaacaacctgctcctgaatgactactgggtaaataatgaaatgaaggcggaaataaagatgttctttgaaaccaatgagaacaaagacacaacgtaccagaatctctgggacacatttaaagcagtgtgtagcgggaaattaacgcccacaagagaaagcaggaaagatctaaaatggacaccctaa

SEQ ID NO: 127781 - DNA, 882 bp, Homo sapiens
atggggagaaaccagagcagaaaagctgaaaattccaaaaaccagagcacctcttctcctccaaaggattgcagctcctcaccagcaagagaacaaaattggacgaagaatgagtttgatgagttgacagaagtaggcttcagaagatcgttaatagcaaacttctccaagctaaaggagtgtgttctaacccatcgcaaggaagctaaaaaccttgaaaaaagtgatagggagaatggaaccaagttggaaaacactcttcaggatattatccaggagaacttccccaacctagcaaggcaggccaacattcaaattcaagaaatacagagaataccacaaagatactccttgagaagagcaaccccaagacacataattgtcagattcactaaggttgaaatgaaggaaaaaatgtcaagggcagccagagagaaaggtcgggttacccacaaagggaagccgatcagactaacagcggatctctcagcagaaaacctacaagccagaagagagtgtgggccagtgttcaacattcttaaagaattttcaacccagaatcccatatccagccaaactaagcttcataagtggaggagaaataaaatcctttacagacaagcaaatgctgagagattttttcaccaccaggcctgccttacaggagctcctaaaggaagcactaaacatggaaaggaacaaccagtacaagccactacaaaaacatgccaaatggtaaagaccatcaatcacttaacacagtggtttgcacccacagtttgctcatatgaggggaaaagtggttctatccacattttgatttctttgaaacaccatcaatttacgcttcccgagacatcacgaacacagctgcctgagtga

SEQ ID NO: 127782 - DNA, 1279 bp, Homo sapiens
atgaaagaacagaatgggggtggaggaagagaagaggaccacaaagacaaaggcatacggcagctgccttcactgctacctagtgctggcgaggccaagtctgacaagccagaacaccacaatagatacagaaaggaaatagcttcatttgaggatgaaaaaagggcaatgggagttgccaagatggccgaacaggaacagctccagtctgcagctcccagcatgaccaatgcagaagtgggaacagcccacggagggcgagctgaagcagggcggggcgttgactcacccgggaagcgcaaggtgttgggggatttccctttcctagccaagggaagccgtgacagactacctggaaaagcgggacactccctgcccaaatactatgcttttaccaaggtcttagcaaccggcagacaagaaaggaatagcatcaacatcagcaaaaaggtcatctacaccaaaaccacatctacaggtcaccaacatcaaagaccaaagatagataaaaccacaaagatggggagaaaccagagcagaaaagctgaaaattctaaaaatgagagcacctcttctcctccaaagggtcacagctcctcaccagcaacggaacaaagtgggacggagaatgactttgacgagttgacagaagtaggcttcagaaggtcggtaacaacaaacttctacgagctgaaggaggatgttcaaactcatcgcaaggaagctaaaaaccttgaaaaaagattagacaaatggctaactagaataaacagtgtagagaagaccttaagtgacatgatggagctgaaaaccatggcacgagaacttcgtgacacatgctcaagcttcaagagccgattcaatcaagtggaagaaagggtatcagtgattgaagatccaatttattgagttaagccgggaagacaaggttagagataaaaaagtaagaaacaaacaaagcctccaagaaatatgggactatgtcaaaagaccaaatctacgtgtgattggtgtacctgaaagtgatggggagaatggaaccaagttggaaaatatgcttcaggatattatccaggagaacttccccaacctagcaaggcaggccaacattcaaattcaggaaatacagagaacgccacaaagatactcctcgagaagagcaaccccaagacacataattgtcagattcaccaaggttgaaatgaagcaaaaagtgttaagggcagccagagagaaaggtccagttacccacaaagggaacagcggatctctcagctga

SEQ ID NO: 127783 - DNA, 1587 bp, Homo sapiens
atggtgaggtccctgagccctggtgccagtgcaccgcctaaggcctatcaggatgctgttcttccgagtggggcactagctgagatgcaagaccccatcatagtgagtgaaactcctcgtgttacaagatcagcatttctcagagatgtgcacaagggcattgccagcagcgttgttagtggtatgaagaataagaaacgaccaaatagccctgagcatgagactggactcataaattccaatatagtcaggggcaacgtctgggagaccctgaccgaagttatagaaaagcctgcaaatgaaggctctgctctggagaatggtcttccagctcacattccggctgaagaaggtgacaagggtttaattttgcttgctaattttgctaaacaaatagacaaaccaacaaacaaaagccctgccaatgccggcatccaacccaccagtaggaaagtcccccaagggaaaatgtatgcagtgtcagagtggcactgcgatgtctcctcgcccttccacacagagccccaaatccagcaggctctctgggctgagtcctgccctagcaggctcgagcatgaggaagctgggcggaggcagagtaggtctccagcccgcctccggaccctcgggctgtacccatgcagatctgctccatggatgccggccacctccctgtctaatgccactgtatattctgcacatattctcgctgctgacaaggccatccatttgcgttcacaaagactgttcggcattctagcaactcataggaagtgggagcacgttcccatcacgtgcactggggcttcgcggaaatgcttctctcctggcaataaaaagaagaaagaggaggaaatgactattttctgcaaacacagagaaaaactggctggccagggtgctccagtgcgcaccgtttcccacagctgctcgccccacctgggaagctttgcccagcctaactgggagacacctcccagtaggggccgacagatacccaggcaaacagggtctggagtgtacctccagcaaactccaacagacctgcagctgagaaacttgactgttagaaggaaaaccaacaagcacaaaggaacagcagcaacatcaacaaaaaggacaactcataccaaaactccatctgtaggtcaccatcatcaaagacgaaaggtagataaaaccacaaagatggggagaaaccagagcagaagagctgaaaattctaaaaatcagagtgcctcttctccttcaaaggatcgcagctcctcaccagcaacggaacaaagctggatggagaatgactttgacgagttgacagaagtaggcttcagaagatcagtaataacaaacttctctgagctaaaggaggatgttcgaatccatcgcaaggaagccaaaaaccttgaaaaaagattagacgaatggctaactagaataaacagtgtagagaagaacttaaatgacctgatggagctgaaaaccatggcacaagaacttcatgacacatgcacaagcttcaatacccaattcgatcaagtggaagaaagggtatcagtgattgaagatcaaattaatgaaataaagtga

SEQ ID NO: 127784 - DNA, 575 bp, Homo sapiens
agttcgtggaatttccaattcttcccccctaccccccgccacgcgaggctgctgcgcacgattgaagaatgtaccggattccactgaggaaggacctcctgaggaatgtcatctcgcacacagatgctcacaatatgattcaggaggattcacatatgtgcaacataagagaactggaacaacagatggaagatgcttaccgggggaccaaaaggaaaatgctacccagcagttcaagccggatgcgcagtgatggttttgatgaagaaagtcaaagatactattggaggccaaagaatgaaatttctgggacactggaagatgattttcttaaggctaaatcctggaatagaaagttctatgattatgaagcaaacatgccagacagatggggtcacagtggctataaagagttataccctgaagaatttgaaacagacagtagtgatcagcaagattttaccaacgggaagaaaacatctccccaggtaaagtcatctacccatgaatcccgcaaacacaagaagtcaaagaaatcccacaaaaaaaaagcagaaaaaaaacgtttgcggccg

SEQ ID NO: 127785 - DNA, 2296 bp, Homo sapiens
atggggagaaaccagagcagaaaagctgaagattctaaaaacgagagtacctcttctcctccaaaggatcgcagctcctcaccagcaagggaacaaagttggacggagaatgactttgatgagttgacagaagtcggcttcagaagccggatgcgcagtgatggttttgatgaagaaagtcaaagatactattggaggccaaagaatgaaatttctgggacactggaagatgattttcttaaggctaaatcctggaataaaaagttctatgattatgaagcaaacatgccagacagatggggtcacagtggttataaagagttataccctgaagaatttgaaacagacagtagtgatcagcaagatattaccaacgggaagaaaacatctccccaggtaaagtcatctacccatgaatcccgcaaacacaagaagtcaaagaaatcccacaaaaaaaagcagaaaaaaaggtcacacaaaaaacagaagaaaagcaaaaaggaagccacagatataacagcagattcctcgagtgagttctcagaagaaactggggcttctggtacaaggaaagggaaacaaccacataaacgcaagaaaaaatccaggaaaaagtctctcaaaaaacctgactttattcttagaggcagaaagtaacacttcacattcagatgattcagcatccagcagttctgaggaaagtgaggaaagagacactaagaaaaccaaaaggaaaaagagagagaaaaaagcccatacctctgtagccaacaatgaaatacaggagaggacaaacaaacggcacaaattggaaagtagctacagatgcaaaggtctgctgaggagctcagaggatgactaaatgggaaacacttttgttttccacatggactgtgggatatttacagttcttactccttgtgggttttgccagtgactcttgtttcaggcacggggcctgagggtcagagctgtcttgtgccatctgtatgttctgacagaccgtcttgtcttcctattttggcgttaagcttgatccccttttctttgttaaaagggaatctggtattttgttatgaaggttttcttgaaagagattttttttttttgcaattaattaccgtttagtgtagagtgccatattacgccaaatttaaaggaccccagaaagctggatcccaatagtgacctgggtacaccaatccggaataattgaaatttggggaagtccaagggctgggatccaagaggtgggattgggaactaatgccatgttaggatgggtatgaccaaggcaacactgtattgctctctgtttaaaatagcaggtgtccacaactaacttgtctttagccttgcgtgcttcgatccttctatattttgaccccacagcgtgtcgtccggtttacttaatcaggacatggcgcctaagaacaaacctttttccttcatgataacatccactagacaacttattagaagggactagagtttttggccaaatttccctgctggatgggggcctataagctatacttagtatatggcctaaaacatgggtaattggatagtaaatggttttctaagttccattgctgtatatttgcctaaaatggacttgtgttcaaaattatttcttcaattgtcatagataatcctgtaccaaatggggaagaattaggaaataatcatgttgtctaatggtactctggattcagggcagcaactgccatttaaatgttgtcttgttcatttctaaatctgttcatgaagtttaggttttcccctgaaactaaagttgaattatttccaaaatgaaaccaggcttctccagggacatatcccacttcttcccagtctgcctttgggattaaagcacccaagcagagaccacattaattccctttgctatactgtgatccttagtatgttaattcttaagaaaccaacatatcactgaaagaaggctggcagaacgcaagtgcattttttcactgtgggaagaaagatcaagtgacgtattattttttcctggttgtcacttaatgggctgagtaaaaagcttgaaaactcagactttcggtcttggttctgccactcattggttatgaggaggcccagagcaggtaagttcaccttcctggccttactttcctgatgtgtaatacggaattacttcacagtagcatgacagtataagacaccagcagtaggatacaactatggatggacatttccatgagttggtatttttagttctaactgctaaatttgttctctttacgggacagatttc

SEQ ID NO: 127786 - DNA, 1666 bp, Homo sapiens; identical to SEQ ID NO: 121336

SEQ ID NO: 127787 - DNA, 2367 bp, Homo sapiens; identical to SEQ ID NO: 121343

SEQ ID NO: 127788 - DNA, 224 bp, Homo sapiens
gttttattgactgataccaatactcaatttgtagagcaaaccctagatataatgaagaacttgctagataatcatactgaaggcagccctgaacatctagagcaagctagcattgaaacaatgatgttaaatctggtcaggaataagatggtggaatacctgacagactgggttatgggaacatcaaaccaagcagcagatgatgatgtaaaatgtcttacaag

SEQ ID NO: 127789 - DNA, 7790 bp, Homo sapiens; identical to SEQ ID NO: 121337

SEQ ID NO: 127790 - DNA, 8962 bp, Homo sapiens; identical to SEQ ID NO: 121342

SEQ ID NO: 127791 - DNA, 9026 bp, Homo sapiens; identical to SEQ ID NO: 121339

SEQ ID NO: 127792 - DNA, 5049 bp, Homo sapiens; identical to SEQ ID NO: 117737

SEQ ID NO: 127793 - DNA, 2301 bp, Homo sapiens
atgaccattgttaggagtcgaatgtcccatctgagtggaggaggatgcgcagatttgtctgacacagactccctacaggaatggatcaacatgactggcttcctttgtgcccttgggggagtgtgcctccagcagagaagtaattctggcctggcaacctatagcccacccatgggtccagtcagtgaatgtcagggttccatgatttcagtgatgtcctcagagggaaacgcaggtacacctgtcagcaaatgtatggatcagctgttgtccttaatggtgtgtaaccatgagaaagtgggacttcaaatacaggccaatgttaaggaactggtgggtctagaattgagtcctgctctttatctgatgctatttaacaaactgaagaatgccatcagcaagttttttgactcccaaggacaggttttattgacggataccaacactcaatttgtagagcaaaccatagctataatgaagaacttgctagataatcatactgaaggcagctctgaacatctagggcaagctagcattgaaccaatgatgttatatctggtcaggtatgttcgtgtgcttgggaatatggtccatgcaattcaaataaaaacgaaactgtgtcagttggttgaagtaacgatggcaaggagagatgacctcttattttgccaagagatgaaatttaggaataagattgtagaatacctgacagtctgggttatgggaacatcaaaccaagcagcagatgatgatgtaaaatgtattacaagatacttcacactatttatgaaccttttgagtgactgcagtgaagctgaagatgaaagtgcacaaacaggtggcaggaaacgtggcatgtctcggaggttggcatcacggaggcactgtgcagtccttgcaatgtcaaacttactcagtgccagcatagacggtggtctcatgcactccatagaaacggtattggctgatgggtttgagcaattggtggaactggtcacagtgatgggtgatcaaggagagctccctatagcgatggctctggccagtgtggttccttgttctcagtgggtgcccaagaattcccatccctccatggttcaaataatagaactactgatctgtctttgtaaacctgcaaacctgatcattgagaagtctgcatcactattgatgacaacttatggttcttcattaagtgacccagttcatttgctggaagattggctgcctgttagcgcagaaaaagatcctttttctagtgaatatcattgcaaagtgaaacaggaagagtggaaaggcattttaccagagcaaggcatagaagagtcattcaaaaaagcaacactaggaaaagcaacactgggaagatatgagagctgtggccttgaaaatttatgcttatggaaaaactgggaaagtataggtgaaggacaaaaagaatgttataatttatgtagccaatatttgacaacttctcataacaaaaatttaactgtgaaaggagatgaagaacatagaatatttctgaagaagcctcagtttctgccagctactcctacagaaccatgtattcctaaaactattacaaatgtaatgaatgtgagaaagtgttttatcaatcctcaaagtatccatattcaagaaaagccttacaaccctaatgaatgtggtgaaacttctaacccatcctcaaaacttactcaacatcgaagaacttatattggagagagctcacaaagatgtaataaaaaatgtataatagtctttagtcagtcacatctgaagagacataagataattaacactggagagaaatcagtaaaatgtaaagaacgtggcaaagcttttaccaggggcttacaacttggacatcagaaaattcatactggagagaaaccttacaaatgtgaaaaatgtgacaaagcctttaagaagagctcacaccttgctcaacatcagagaatccatactggaaacaaacctatcaaagaatccatactggagagaaagccttcaaatgtaaagaatgtggcaaagcctttaatagaagctcatacattactcagcatcagagaattcacactggagggaaacctttcaagtgtcaaaaaatgtggcaaagcttttaacagagcttcacaccttactcaacatcagagaatacatactggagagaaacacttcacacataaagaatgtggcaaagcctttaacaggggctcacaccttactcgacatcagagaatccacactggagagaagtctttcaaatgtaaagaatgcagcaaagcttttatctag

SEQ ID NO: 127794 - DNA, 5551 bp, Homo sapiens
gacctttatttgttacttttgagctacagtgacaagaaagatcacctaactgtggaagaactggctcagtttttgaaggtggagcaaaagatgaataatgtgacaacggactattgtcttgacatcataaagaagtttgaagtttcagaagaaaataaggtgaaaaatgttcttggcatagaaggcttcacgaacttcatgcgtagtcctgcctgtgacatatttaacccattgcaccatgaagtgtaccaagacatggatcagcccctctgcaactactacattgcttcctctcacaatacatacctgactggagaccagctcctttctcagtccaaagtggatatgtatgcacgggtgctgcaagagggctgtcgctgtgtggaagttgactgttgggatggcccagatggagagccagtagtacatcatggttacactctcacttcaaaaattctcttcagagatgttgtggagaccatcaacaagcatgcctttgtgaagaatgagtttcctgttatattgtctatcgagaatcactgcagtatccagcagcaaaggaagattgctcagtacctgaaaggaatattcggagacaaactggacctgtcatctgttgatacaggggagtgcaagcagcttccaagccctcaaagtttgaaaggcaaaattctagtgaagggtaagaagttgccttatcaccttggggatgatgcagaggaaggggaagtttccgatgaggacagtgcagatgaaattgaagacgagtgcaaattcaagctccattatagtaatgggaccactgagcatcaggtggaatctttcataaggaaaaaactggagtcactgttaaaagaatctcaaattcgagataaagaagatcctgatagtttcacagtgcgggcactactgaaggccacgcatgaaggcttaaatgcacacctgaagcagagtccagatgtaaaggaaagtggaaagaaatcacatggacgatccctcatgaccaactttggaaaacataagaaaactacaaaatcacggtctaaatcttacagtactgatgatgaggaagacacacagcagagtactggcaaggagggtggccagctgtacagattgggtcgccgaaggaaaaccatgaagctctgccgagaactctctgatttggttgtgtacacaaactccgtggccgctcaggacattgtggatgacggaaccacaggaaatgtgttatcattcagtgaaacaagagcacatcaggttgttcagcaaaaatcagagcagttcatgatttataatcaaaagcaactcacgaggatttacccctctgcctaccgcattgattccagtaacttcaaccctctcccctactggaacgcaggctgccagctagtggcactgaattatcaatctgaaggacgaatgatgcagttaaaccgagccaaattcaaggcaaatggcaattgtggctatgtcctcaaaccccagcaaatgtgcaaaggtactttcaaccctttctctggtgaccctcttcctgccaaccccaaaaagcagctcatcctgaaagttatcagtggacagcaactccccaaacctccagactccatgtttggagatcgaggcgagatcattgacccttttgttgaagttgaaattattggattgccagtagattgttgtaaagatcaaacccgtgtggtagatgacaatggatttaaccctgtgtgggaagaaacactgacatttacagtacacatgccagaaatagctttggttcggttccttgtgtgggatcacgatcccattggacgagactttgttggacaaagaactgtgaccttcagcagcttagtgcctggctaccggcatgtctatttggaaggactgacagaagcatccatatttgtacacataaccatcaatgaaatctatggaaagtggagccctttaatactcaaccccagttatactatattgcactttctaggagctacaaagaacagacaactccagggtctgaagggactgttcaataagaatcctaggcacagttcttcagaaaacaattcccattatgtacggaagcgatccattggagatagaattctgcgacgcacagctagcgccccagccaaaggcaggaaaaagagcaaaatgggcttccaagaaatggtggagataaaggattctgtgtccgaggccacaagagatcaagatggcgtgctgaggaggaccacacgcagtttgcaagcacgccctgtctctatgcctgttgacagaaaccttctgggagctttgtcgctgcctgtatctgaaacagcaaaagacattgaaggaaaagaaaactctctagtacaaatctgaataggaaacaacttaagcagaagataaagatggcagaagaaaagggaaagcaagtataaaagatccacattttctaaatttcaacaaaaagttatcatcctcctccagtgctctgctccacaaagataccagccaaggggacaccattgtatctactgcccacatgtcagtcacaggagaacagctgggcatgtcaagtcctaggggtgggagaaccacatcaaatgccacaagcaattgccaggaaaacccctgtcccagcaagtctctctccccaaagcagcatttggctcccgatcctgtagttaaccccacacaagatctgcatggtgtgaaaatcaaggaaaagggtaatcctgaggactttgtggaagggaaaagcatcttgtcaggaagcgtcctttctcatagcaacctagaaattaagaacctggaaggtaataggggtaagggccgagctgcaacatccttttctttgtcagacgtctccatgctctgttctgacatacctgacctacattcaactgcaattctgcaggagagtgtaatttcccatcttattgacaatgtcactttaacaaatgagaatgagccgggcagttccatctcagccctgattggccagtttgatgagaccaacaatcaggctctcacagttgtttctcatcttcataataccagtgtgatgtcaggccattgtcccttgcctagcctgggcctaaaaatgcccatcaagcatggtttttgcaagggaaaatccaagtcttccttcctgtgctcatctccggagctgatagcactctcgagttctgagaccaccaaacatgcaacgaacacagtttatgaaactacctgcactcccatctctaaaaccaaaccagatgatgacctttctagtaaggccaagacagcggccttagaaagcaacctgcctggatcccctaatacttctcgtggctggttaccaaaaagtcctaccaagggagaagactgggaaacactgaagagctgcagccctgcctcttcccctgatttgaccctggaggatgtaatagctgatcccactctctgtttcaattctggggagagcagccttgtggaaattgatggagaatcagaaaatctttctctaacaacctgtgaatataggagagagggcacaagtcaacttgcttctcctttaaaactcaagtacaatcagggtgtggtagaacactttcaaagaggtttgagaaacggctactgtaaagagaccctccgcccttctgtccctgaaatattcaacaatattcaagatgtcaaaactcaaagtatttcttatctagcctatcagggtgctggctttgtgcataatcatttctcagattcagatgcaaaaatgttccagacctgtgtgccccagcaatctagtgctcaagatatgcatgtccctgtacccaagcagttggcacatcttcctttgcctgctctgaaactgcctagtccttgcaaatccaaaagtctgggggacttaacatcagaggacattgcctgcaattttgagagcaagtaccagtgtattagtaagagttttgttacaactggcattagagacaagaagggcgtgactgtgaagacaaagtcgttagagcctatagatgccctgaccgagcagcttcggaagcttgtgtcctttgaccaggaagacaactgccaagtgctatattcaaagcaggatgccaatcagctcccccgggcactggtcaggaagttgtcatccagaagtcagagcagagtgcgcaatattgctagtcgtgccaaggagaaacaggaagccaacaagcagaaagttccaaaccccagcaatggggcaggagtggttcttagaaacaaaccctcagcacccacccctgcagtgaatcgccactccaccggctcctacatcgcaggctacctgaagaacacgaaagggggtggccttgaaggccggggcatcccagagggggcatgcacggctcttcactatggccacgttgaccagttttgttcagataattctgttttgcagactgagccaagcagtgatgataaaccagaaatttattttcttttgagactgtgaattatttaaaactgcattcttaaggttttcaaggtattctgtagaatgtcagagttttcagtaaataagttccttggctttggaatgattttcaaatgtatttttaaacttgtatttgggtctccctttgacttcatgtgttctccctgttaatgcgtttgtatatagatttggtgacatttcccatgtacctattatgatctttctcccttgagttgttgtaaactgtatcagtatgaaatatgtgcatgccctagatgtgaaactcctcagcagctcgggttataatgtgtgtgtgtttcaccaagatgtcctttactgtgtcctcagattgcagtcacaaatgtagtcatttttactctctaactgttgagttgattaagagactttgcaaacgacaaagggatgaattccttactttaatctgttatcatttttcctatgtttccctctttgttcagaagcccagatgcatttttataactcagttttaaaaactttaaaatagttaccttgccttttaggatgttcttatcccacccataatgagagttgaaaggggatggatagctgctccccatgcccttcccactttttggaataggccgtgagggtgtgaggaagaaggctgtcttttgtacataaggacaaaattgtttgttttacataaattttgttacatatttttgctaatggctttgtatgtaacaagaagcgagttgccaaactacctgttgtacttttgaattttctgattgaattacagactgcgaacaacggctttcagaatgagggacttccatcagactctaatgataatagtagcacaaattgaaaacttccccaaagctttcacagaatattttctcataataaaatccaagtgaacagataattagaagaaacccttttccttcagggaaccaagcaactctattttagtactgacatgcattattttcactgtgaattcacttttttattgcatgttcagatgtccctctttgttttttttttttgtaacattaactgcaatgatgttcttcctggaattcatgaaaatataattaaaacacatttttaaac

SEQ ID NO: 127795 - DNA, 2049 bp, Homo sapiens
atgagtaaaagctccctccagcctccccagagaagccaagcagatgctggcaccatgcttctggtacaacctgtagaatgtactttcaaccctttctctggtgaccctcttcctgccaaccccaaaaagcagctcatcctgaaagttatcagtggacagcaactccccaaacctccagactccatgtttggagatcgaggcgagatcattgacccttttgttgaagttgaaattattggattgccagtagattgttgtaaagatcaaacccgtgtggtagatgacaatggtaacattaaaagatggcaagaaccaaatgttagtgaggatgaagcagttgaattctcaaacactacttatggttgtgcacatttgtgcaagcacagttcttcagaaaacaattcccattatgtacggaagcgatccattggagatagaattctgcgacgcacagctagcgccccagccaaaggcaggaaaaagagcaaaatgggcttccaagaaatggtggagataaaggattctgtgtccgaggccacaagagatcaagatggcgtgctgaggaggaccacacgcagtttgcaagcacgccctgtctctatgcctgttgacagaaaccttctgggagctttgtcgctgcctgtatctgaccacgcaaaagccattgaaggaaaagaacactctctagcagaagataaagatggcagaagaaaagggaaagcaagtataaaagatccacattttctaaatttcaacaaaaagttatcatcctcctccagtgctctgctccacaaagataccagccaaggggacaccattgtatctactgcccacatgtcagtcacaggagaacagctgggcatgtcaagtcctaggggtgggagaaccacatcaaatgccacaagcaattgccaggaaaacccctgtcccagcaagtctctctccccaaagcagcatttggctcccgatcctgtagttaaccccacacaagatctgcatggtgtgaaaatcaaggaaaagggtaatcctgaggactttgtggaaggagaaaagcatcttgagagtgtaatttcccatcttattgacaatgtcactttaacaaatgagaatgagccgggcagttccatctcagccctgattggccagtttgatgagaccaacaatcaggctctcacagttgtttctcatcttcataataccagtgtgatgtcaggccattgtcccttgcctagcctgggcctaaaaatgcccatcaagcatggtttttgcaagggaaaatccaagtcttccttcctgtgctcatctccggagctgatagcactctcgagttctgagaccaccaaacatgcaacgaacacagtttatgaaactacctgcactcccatctctaaaaccaaaccagatgatgacctttctagtaaggccaagacagcggccttagaaagcaacctgcctggatcccctaatacttctcgtggctggttaccaaaaagtcctaccaagggagaagactgggaaacactgaagagctgcagccctgcctcttcccctgatttgaccctggaggatgtaatagctgatcccactctctgtttcaattctggggagagcagccttgtggaaattgatggagaatcagaaaatctttctctaacaacctgtgaatataggagagagggcacaagtcaacttgcttctcctttaaaactcaagtacaatcaggccaaagcccaatccagagcaactctcttaaattttgtgaaggctgagagaggtgaggaagctgcagaagaaaagtctggagctagcagagtttggtatatgaagtttaaggcaagaatccatctccataacataaaagtgcaaggtgaagcagcaagtgttggtggagaagctgcagcaagggatctacaaggtttagctaagataattgatgaaggctccacttctagttctcttgttatttctaacacatctacagtgactttctccactgaagtcttgaacccctcaacgtcatccatcaggattggaatcatcttcttctaa

SEQ ID NO: 127796 - DNA, 1506 bp, Homo sapiens
atgtgcaatgctgctccggggattgtttctgttttgtttctcgatgttttacccaacttggtgaagaaaaagaaaagaaaaatggataccacaaaatgtcctctctactcctccccaccacccactggcagcatgcggggatgcacgcacatgcacacgcacacacacgcgcacacacacacacacacacacactcttccagaatggaagggatggcagctgaatgcagtatcactcacatttatacctgccctagatgccatcatcagatctccccctcgtggcctcaccaagcactgctggccagcaacaaacacaggagaagaggggacgcctaaatacaccagttttgtgggagcgggtctggtattaaagaaacaaaccctggagggatcggctctccacgcgccagctgtgtgcaacgccacccaagggtgcatccaccctgaagatgaagggtgtggagctaaaacaaacacccacgcagccatggcattttctgagattcaaaattctcaacaagagaaactccaactaaaactcaaaaaagatacttcagaaccagcacctccgagacgcaagagggtaccttctggcagtggactatggacccatcagttacacggcaagcattcagcactgaattcttttccaagaagattgtttaaaaacaagcaacataaacggaaaactcccacagattttatggaaggcactattctgaaactggaggctgcagctcggtttgcgggaaagatgctgaactccagtgttttcgtcggaacaacaaggcttggtggggtggtgaggggtaaaggcctccccactgacccagctggcacagatctagcctccattacatgccacatgctggctctgaaactctctgctagggctcctcagagacttcagaacccaatagtctgtggggtacccctcctatacaaacctaacaccgactacgcctacagggcagctttcaccaacaccactgaggatgccttgctggggaaaactagagaggcaatccttccttccatgcttgtcagggccgcagcagtctcagctcgccaagccctagggacaggcaatcccttgcacagagtttctcacagaggggctaagaaatcggccagcagggatgtcaacatccactaccaagaacagccacttgatggcaatcttaacctattcccttggaattcgtccataaagggagaccccagaaggctagaagcaccaagcatgggctgcacaacgtggacagagctaagaaggacgtccctgcttgacctgagtgtgcggcagtgcggcgatgaacggatagagaaccccacaccaacaagcactgttgggttcttctccatatctaggcttctctggggactaggcagaagtggctataggctctgcagtcagacagctcaggagcatggaaacctctcgagctccatggcgcactcacattgggtttctcatcagactgaaatgcaagtggacagatga

SEQ ID NO: 127797 - DNA, 816 bp, Homo sapiens
atgcattttaaaaagtgggcaaaggacctgaacaggcgtttatcaaaagaagacatacaaatgacccgcaagttcctgaaaaaacattcaacatccctgatcatcagctataaggcttcacatactgtagccccggactttatccatgaaaatgtctcccagaagtctctcctggctcagcatgtttcagcagccacacccttctctctgttccttaaggatgccaagctcattcgcagcttggcgtatttgcataagctgtttcctccacccaaggtgccctttaccctaaacatctcacgcttacttctacagcttagcagcataaactcatcttcaggcatcagctttcttatctgcaaaattggtgcaacagatcctgtttcacaggattattatcaggatgaaataattaatatgagaaagaaagaggcttatgagaggggagccaagcaggaaaggcaaggaagcagctggggagagagaggattagtgggattatttgtaggaacaggaagttttgctaaaaagctaaatggtccagacaacccgattgctgcagaaaccactggccaagcccaacagagggtcctgttgtctgcctggagcaaatttccatggctttttgagtggtcaggaagtcaaaacatcaacatttgggagaagttcattctaacattcatgggtgactttgagaggttcaagccttcagtggaggaagttgctggagatgtgatggaaatagcaagaaaacgaggattagaaatggatcatggagatgtgactgaattgctgccatctaaagaacaaacttaa

SEQ ID NO: 127798 - DNA, 1031 bp, Homo sapiens
gtaagcagagatggacagtatattcaagaaatctgattaagataacacctaaagaagagaaggtccatccataggttggctgagttcttatttctgaaataatctctggaggaacttttaagaatcctgaaagattcaactatttaaaactcttctggaaaagtatatgcatatactcctytgaaacccctatgattgtcgtgcctccaaagatgccgtgggtcagatatctgttcatgtggacatcactgccaccccaggaacgggagatcataaagtcactgtaaaagtgattgctattaatgacctaaactggcagaccacagcaatgttccgcccctttgtggaagtttgtatactgggacccaaccttggagacaagaagagaaaacaaggcacaaaaacaaaaagcaacacatggtcaccaaagtacaatgaaacatttcagttcattctcggaaaggaaaatcgaccaggggcttatgaacttcatctctcagttaaggattactgctttgccagagaagatcgaattatcggaatgacagtcattcagctacagaacatagcagaaaagggaagctatggggcatggtatcctcttctgaaaaatatctctatggatgaaactggtttgactatccttagaatactctctcagaggaccagtgatgatgtggctaaagaatttgtaagacttaaatctgaaacaagatctactgaagagagtgcttgaaacaaacactgcaagctaaatacataactataattgtttgactactgcatgcatgtgcaaatacatgggaatgtttagttcactacatttcaatgtttggcagtactcatgtacgatgtctacaaggtatgtaaaaaacctgctgaacttttataccaattctggtctttgggaaataattgttccatgaagtgccaaaattatgttgtaaagtgaaatatcaagaacaccttttaacatgtttattttgtttctttacccatttcacattcattaaacattttttttaaaaact

SEQ ID NO: 127799 - DNA, 1242 bp, Homo sapiens
cagagggtgaaatggtgcggctgcaagccaaggcatatgggcagctgctaggaggttgaaaaggcaaggaatggattctccccttgagcctcccacctcctctaactggcaccagtaaaacgtccaacaaactcaccatacaaacttgcatcagtttttgtcggagtcagaggttcaaggtgatgactctgtggctgtgtaactatagaaaaatatgaaacaatcctgattactggaagtacggggaggcagccagtaccgaatgcaacagcgtctgcttcggggatcacacccaaccctgtggtggcgatggcaggatcatcctctttgatagtgagtatgccctgtgcccatcactgcccaaggcacagtcttctgtggtctattcccctgacttccccgacacctatgccacggggagggtctgctactggaccatccgggttccgggggcctcccacatccacttcagcttccccctatttgacatcagggactcggcggacatggtggagcttctggatggctacacccaccgtgtcctagcccgcttccacgggaggagccgcccacctctgtccttcaacgtctctctggacttcgtcatcttgtatttcttctctgatcgcatcaatcaggcccagggatttgctgttttataccaaggtaagacatctttgcctccttgggggttcttcagggccaaccagacggtggccgaggtgatcacggagcaggccaacctcagtgtcagcgctgcccggtcctccaaagtcctctatgtcatcaccaccagccccagccacccacctcagactgtcccaggtagcaattcctgggcgccacccatgggggctggaagcacagtcacagccattgtagcaaagatacttctgcacgtcacattcaagtgagtacaagagggagctgcccaattccaggaaaggatggtgctccggtacctgacatgggtgcctgagcggagagaggggccactcttcgacataaggaatgtaaaaggagccaggtgtgagaggaaacctgatgagttcttttgggctaagtccagacattaccgaattcatctttgccgcaacccaacaagggaactgagggtcagagaaggggtccagccaggggccgccaaggttcggactcagcctgggaccactggctccaaagctgggggtccttactcctgttgagctgcaggcccctccaacacaggcagtgggtgggccc

SEQ ID NO: 127800 - DNA, 870 bp, Homo sapiens
atgaaactcatggaaacacttaaccagtgcataaacgctggtcatgaaatgacgaaggctatcgccattgcacagtttaatgatgacagcccggaagcgaggaaaataacccggcgctggagaataggtgaagcagcggatttagttggggtttcttctcaggctatcagagatgccgagaaagcagggcgactaccgcacccggatatggaaattcgaggacgggttgagcaacgtgttggttatacaattgaacaaattaatcatatgcgtgatgtgtttggtacgcgattgcgacgtgctgaagacgtatttccaccggtgatcggggttgctgcccataaaggtggcgtttacaaaacctcagtttctgttcatcttgctcaggatctggctctgaaggggctacgtgttttgctcgtggaaggtaacgacccccagggaacagcctcaatgtatcacggatgggtaccagatcttcatattcatgcagaagacactctcctgcctttctatcttggggaaaaggacgatgtcacttatgcaataaagcccacttgctggccggggcttgacattattccttcctgtctggctctgcaccgtattgaaactgagttaatgggcaaatttgatgaagaagctaccactgttgcttatcagacgcagcgggccctgggtttttctggggccttaagcagtgaaccctggtcagctggcctgagtcccaacccaagcccatcaccacaagcctcaagacaggaagatctcagtgaaacctttcctctaatccaagtgacatcattgtcgcaggtgtttgtacatgaaagcagagtgatgaagaggctgtttagatccggggatctttag

SEQ ID NO: 127801 - DNA, 2325 bp, Homo sapiens
atggcctctagacccctggcccgtctcacagtatgcctggcaagcactctgtttcctccaggctgtgtactgcaggctcctctgccagggataacctccatctctgcttcaccagcaaagacaaaatccacagctccacgactatgccgtggctattacatcagttggcttctgccctggagatcaccgtctaagtcagggcagaaggactcatctatgatgcttgcaaccaatgatcatgctgtgggaagaacgggacagttcacagaaaaaggaaagaagtgtacctatggacacaagtgcaaatattaccatcccgaaaggggcagtcagccacagcggtcagtggctgatgaactccgtgccatgtctagaaatacggcagccaaaactgcaaacgaaggaggactggtgaaaagcaacagtgttccttgtagcaccaaggctgatagcacttctgatgtcaaacgaggtgctccaaagaggcaatcagatccaagcataaggacacaagtctaccaagacctagaagaaaagcttcccaccaaaaacaaattggaaaccaggtctgtaccttccttagttagcatcccagctacttctactgcaaaaccccaaagcactacatctttaagcaatggccttccatctggagttcatttcccacctcaggatcaaagaccacagggacaatatccttcaatgatgatggcaaccaaaaatcatggaacgccaatgccttatgaacagtatccaaaatgtgactcacctgtcgacatcggatattattccatgttgaatgcatactcaaatctgagtctctcaggcccacgaagccctgaaaggcgtttctccttagacacagattatagaataagttccgtagcttctgactgcagcagtgaagggagcatgagctgtgggagcagtgactcctacgtgggttacaatgaccggtcctatgtcagctcccccgacccacagctagaggagaatttgaagtgtcaacacatgcaccctcacagccgccttaatcctcaaccgttcctgcagaatttccacgaccccttaaccagagggcaaagttacagtcacgaagaaccaaagttccatcacaagcctcctcttccgcacctggctctgcacctgccgcactccgctgtgggcgcccggtccagctgtcctggcgactacccctctcctccaagttcagcacactctaaggcaccacacctagggaggtccttggtggccacgagaatagacagcatctctgactctcgactttatgacagttctccttcacgacaaagaaagccttattcccgccaggaaggcctgggaagctgggagaggccaggctatgggatcgacgcctatgggtaccggcagacttattccttgcccgataactccacacagccgtgttatgagcagttcaccttccagagcctccctgagcaacaggagccagcctggcggatcccatactgtggaatgccgcaagatcccccgagcttgacagaaccgatgtctctggaaatgtgtttcttttctctggaagatgcatttggctccagaaactctgagcctctcagagggtcttttgggcaaagcttcagtcacggtggaaggggaggtggtgtgcgcttggcccttggcaggctgcaggccagccgactgtgcgatgttgcgctggttccttcagaagctaccactgttgcttatcagacgcagcgggccctgggtttttctggggccttaagcagtgaaccctggtcagctggcctgagtcccaacccaagcccatcaccacaagcctcaagacaggaagatctcagtgaaacctttcctctaatccaagtgacatcattgtcgcaggtgtttgtacatgaaagcagagtgatgaaggttttatattgggcagtgtggtttgatctacaggccagtggatggcacttgtgggtaaaagccagctgcagccacacagatgggtgtatacttgatccttgttaccggaagaagctctcttttttcctcaggcaatgggttgatctgtgcagtgcaccatggtccgaactccctgctcaacccccggaaggggagaccaagatggtgggcctgatgactctaggagaaatgagggacagaagtgaacagcactgcggcaaggaatctgtggagctcagtagtcctcactcgctgagagctcagaggagaagggtagaattggaagtctcagctttttccactcagaaagctgctaaagcagctgctgggtgtctctcccccaccttctcttgtgctggccctggagcacagtag

SEQ ID NO: 127802 - DNA, 598 bp, Homo sapiens; identical to SEQ ID NO: 127218
  misc_feature (1)...(598): n = a,t,c or g

SEQ ID NO: 127803 - DNA, 870 bp, Homo sapiens; identical to SEQ ID NO: 127219

SEQ ID NO: 127804 - DNA, 1600 bp, Homo sapiens
acagcagttacactgcggcgggcgtctgttctagtgtttgagccgtcgtgcttcaccggtctacctcgctagcatgtcgggccgcggcaagactggcggcaaggcccgcgccaaggccaagtcgcgctcgtcgcgcgccggcctccagttcccagtgggccgtgtacaccggctgctgcggaagggccactacgccgagcgcgttggcgccggcgcgccagtgtagcctggcggcgagtgctggaggtagctcagccgctgagagtcctggagctggcgggcaatgcggccccggagcaacagagaagacgcgaatcatcccccgccacctgcagctggccatccgcaacgacgaggagctctaaaagcttcctgggctgccttgacgaattgcccagggaagccgttcctgccaaacattcaagcccgttctgctgcccaagatagactagcgccaccgttggggccgaaggcgccctcgggcggcaagaaggccacccaggcctcccaggagtactaagagggcccgcgccgcggccggccgccccagctccccatgccaccacaaaggcccttttaagggccaccaccgccctcatggaaagagctgagccgcttcagactgcggggcaagcgggccgcggctcccttcccctcccctcccctcgcccgccttcgccgcccggcctcgagtccccgcccgcccccgctcccgtcccgcaccgcctgccgcgtcggcctcgggcctgccctgtccgccgtccgccctccggtagggttcgggccttccggatgcggcttgggcgctcttcggggacctccgtggcgcggaagacccgagcctgccggggggaggccggcggcgccgcacctgcccgcctcggcgttcgtgactcagccgccccatcccgagtcgctaaggggctgcggggaggccgcagcaccttctggaagacttggccttccgctctgacgcagggccgaggtgggcagtccaggccgagagccggcggccctgaaggtgagtgaggccctcggcagctgcagccggggtgtctggtacccccccggcgtggtgcttagcccaggactttcagacggccgctggccgggaggctttggtgggagagacgcgatcgccgatttcggtctggcgccccttctgcggccgggacccaggcctttcacatcagctctccctccatcttcattcataggtctgcgctggggccgggacgaagcacttggtaacaggcacatcttcctcccgagtgactgcctcctaggaggacatttaggggagggcagaggcctgcagtttggcttcacggctggctatgtggacagcaagagtcgttttgcggaacgcgactggcagccaggcctgtcgggcccccgacgccgccccatttcccttccagcaaactcaactcggcaatccaagcacctagataccagcacaagtcggttaatccctgtctggactgagcctccgttggcttctgaactggaattctgcagctaacccttccacgactagaaccttaggcattggggagttttagatggactaattttattaaaggattgtttttttttt

SEQ ID NO: 127805 - DNA, 3100 bp, Homo sapiens
  misc_feature (1)...(3100): n = a,t,c or g
atggtggtcatcacggtgctgctctctgtcgccatgttcctgctggtgctgggcttcatcattgccctggcactgggctcccgcaagtctctgaagctctcagaagagagggtagctcctctccaccagcaggtcgtctctatggctctcagcagagagggtacaccctccgcagctggttgtcccatcgtcacctgctatcagcagaaaggagcaggaggtctgggtctgcagctgcgtttgggtggctgcagcggctcggggagctcccttcccaactcagaaggggcagggctcccattggccccacagagtatgcagacccagccgcggttacctgctgcagctgacatgatgccagcagccacggccatcactgggattacagatgtggaggcggcccgcaaggccatccgcgccgctcaggtggagcgctatgtgcccgaacacgagcgatgctgctggtgcctgtgctgcggctgtgaggtgcgggaacacctgagccatggaaacctgacggtgctgtacggggggctgctggagcatctggccagcccagagcacaagaaagcaaccaacaaattctggtgggagaacaaagctgaggtccagatgaaagagaagtttctggtcactccccaggattatgcgcgcagtcacctgtatggaacccccatggggtcggcggtgccgagccaggcctgcctggaggctctgctcctgatcgttccctggggcgcctgtggtgtttcccaggaggaagaggagagccctgcagaggggagcaaggacgagcctggggagcaggtggagctcaaggaggaagctgaggccccagtggaggatggctctcagcccccaccccctgaacctaagggagatgcaacccctgagggagaaaaggccacagaaaaagaaaatggggacaagtctgaggcncagaaaccaagtgagaaggcagaggcagggcctgagggcgtcgctccagccccagagggagagaagaagcagaagcccgccaggaagcggcgaatggtagaggagatcggggtggagctggttgttctggacctgcctgacttgccagaggataagctggctcagtcggtgcagaaacttcaggacttgacactccgagacctggagaagcaggaacgggaaaaagctgccaacagcttggaagcgttcatatttgagacccaggacaagctgtaccagcccgagtaccaggaagtgtccacagaggagcagcgtgaggagatctctgggaagctcagcgccgcatccacctggctggaggatgagggtgttggagccaccacagtgatgttgaaggagaagctggctgagctgaggaagctgtgccaagggctgttttttcgggtagaggagcgcaagaagtggcccgaacggctgtctgccctcgataatctcctcaaccattccagcatgttcctcaagggggcccggctcatcccagagatggaccagatcttcactgaggtggagatgacaacgttagagaaagtcatcaatgagacctgggcctggaagaatgcaactctggccgagcaggctaagctgcccgccacagagaagcctgtgttgctctcaaaagacattgaagctaagatgatggccctggaccgagaggtgcagtatctgctcaataaggccaagtttaccaagccccggccccggcctaaggacaagaatgggacccgggcagagccacccctcaatgccagtgccagtgaccagggggagaaggtcatccctccagcagttgccaggtataaactccgaattgttaagccaccaaaattacccctagagaaaaaacccaaccctgataaggatggtccagattatgagcccaacctctggatgtgggtaaatcccaacattgtgtatccccctggaaagctggaggtctcaggacgtaggaagagggaggacctgacaagcacactcccctcctctcagccaccccagaaggaggaagatgccagctgctcagaggccgcaggggtggaatcactgtcccagtcctccagcaagcggtctccccctcggaagcggtttgccttttcccccagcacctgggagctcacagaagaggaggaggctgaggaccaggaagacagctcctctatggctctcccatcccctcacaaaagggcccccctccagagtcggaggcttcggcaagccagcagccaggcggggaggctctggtcccggccccctctcaattacttccacctaattgccctggcattaagaaacagttccccctgtggcctcaacgtgcaacagatctacagtttcactcgaaagcacttcccctttttccggacggccccggaaggctggaagaatactgtccgtcacaatctctgttttcgagacagctttgagaaagtgcctgtcagcatgcagggcggggccagcacacggcctcgatcttgcctctggaagttgaccgaggagggacaccgccgctttgcggaggaggcccgcgccttggcttccactcggctagaaagtatccaacagtgcatgagccagccaggcaagcttcttcaaagagctgtctacactaactctagtgcctcaactcccagttacctctgcactcttacaggcagcttctgcctcctcaccccaaaaaggaatgtagtaggacagcagggtgataataaggagaaggtcaacaaattacatgtgagcaaaagaatgtatatcacgattaagttcaagggaaagtactatgcctggacgtgcacattcaagaaatccatggtgaaaggtttggattcctatgaagaaaaggaggataaagtgatcaaggagatggcagctcagatccgtgaggtggagcagagccgacaggaggtggttcggtctgtcttagaggatataccaggagttggtaacatccactcagatctaaggctgccagctgtccctgccctgaggctgtcccctgcaaccagggaggccacagccccccagctgggacctgcagcctcaaggactcttattccacaagtagcttttcctgagggtgtgctggagacaaacagcatggcgaagg

SEQ ID NO: 127806 - DNA, 1600 bp, Homo sapiens
atgtcgggccgcggcaagactggcggcaaggcccgcgccaaggccaagtcgcgctcgtcgcgcgccggcctccagttcccagtgggccgtgtacaccggctgctgcggaagggccactacgccgagcgcgttggcgccggcgcgccagtgtacctggcggcagtgctggagcgtccgacctgtggaaatctaacaagcataggggaaagcaaaggcagcatcttagtccccctggtacggatccccaaggccatgctcatcttcatctccaagaatatgaagcatcatactcttgaagcctccacatcttatttatttggaagaaggcttagcttcatttctgcagctcttatcttgaacaagagctccatccaaatcgcctttgaggaggtgccccaactcccacccagagccagcatcagtcatgtgacctgcgtagaccaatctgagcataccatggtgctgcgttgccagctctctgctgaggaggtgcggttcccagtctctgtgacccagcagtcccccgctgccgtctccatggagacctaccacgtcactctgacactgccaccaacacagttggaagtcaacctggaggaaatccctggtgaggggctgctcatatcctgggccttcactgatcgcccagatctcagcctaacggtgcttcccaagcttcaggccagggagagaggtgaagaacaagtggagctctccacaattgaggaactgatcaaggatgccatagtcagcacccagccagccatgatggtcaacctcagggcttgctctgccccaggaggcctggtacccagtgagaagccacccatgatgccccaggctcagccagccatccccagacctaaccggttattcctacggcagcttcgggcatctcacttgggaaatgagctggaaggcaccgaggaactgtgctgtgtagctgaactcgacaaccccatgcagcagaagtggaccaagcccgcgagggctggatccgaggtggagtggacagaagacctggcactggatctgggcccccagagccgggagctgacccttcaaagtgctgaggagcagcagctgtggagacagtaacatcacacctaccaagaagattgagcttgaccggaccatcatgcccgatggcaccattgtcaccacagtcaccactgtccagtcccggccccgtatagacggcaaattagatctaaggctgccagctgtccctgccctgaggctgtcccctgcaaccagggaggccacagccccccagctgggacctgcagcctcaaggactcttattccacaagtagcttttcctgagggtgtgctggagacaaacagcatggcgaagggacgtgtgtctgtacaaaagaagtggagccagtatggcaaaatgtttacaaggactctgggtgagagattcaagaaatccatggtgaaaggtttggattcctatgaagaaaaggaggataaagtgatcaaggagatggcagctcagatccgtgaggtggagcagagccgacaggaggtggttcggtctgtcttagaggttggtttccctcggaggatccagaccagtatccaaatccactga

SEQ ID NO: 127807 - DNA, 1515 bp, Homo sapiens
ttctttgtccagtcctagaaatgtgctgaacaaaggaggtgggtgggagggatatgcccacaacctaaagaaacaaccagttaaaacatttacagcaatcttatgtttttccctttgttcaggttactactttgggattgtgatgatcgaagctatagctactacgttgaggtttctaccaaccagcaacagtggaccatggttgctgacagaactaaagtctcctgcaagtcctggcagtcagtaacttttgaaaggcagcctgcctccttcatccgtatcgttgggacacacaacacagcaaatgagtcacactgtgtcaagcgtgtgcctccgaggaacctctggtttaagagaggcagcataggaaatgatgggtcgaaatgcaacagtttaggaggcaagagtgaggatgctgtcaccgcagccttgttcatcctgaacccaacgggataccacgagcgtccatccacagaggatggggtttttatcgatttgtttattcttgtgcaagaacccgagcaggtgttccactgtgtccactttgagtgtccagagcagcagagcagccagaaggaggaaaatagtgaggaatcggggacaggggacaccagcctggccgggagcagacaccagcgtcagtgtgaatgtggcccagcccatgtgcagagggagaggatgccgggctgggcgtgcatgttgaagtccgtggcccagagaggcttccagagaaggtggcagactgccagtttggagggcaagttgacagtcttgactaaaatggaatgtgtgcaaaagccctcttggggcagcagatcactaagagacaaggatgcaagaaagtggctgctgctcctggcaaacccgagcttcccctcagagctgctggaggccagagctcctggtgccagcccacctgctgtctgtctctgccgcgctccccaccctgctgttgcatgtacacggaaccacacgttcaccttcgtggctggctcctttcactttgcagaatgtttccgaggttcacctgggctgccgctcggtgccactcaacgtgtcatctcgtcacaagacaaggagcttataccagaagagacatcagcatgctgccccttcgtcaggacagtcttgtcagctgacccaactgcgctgcctctcagggtcctgggacacagcggaagaccccagcttgtggctttaaatactagctctatgcaggtgactcgaaactgtgtatctcatttgtacaccgacatccacagcagcctcattcacagtaactacaacatggaagcaaccccagtgcccactgacaaaggggtgggcaagcacgtgtgtttcatcatacggtgcagtagcatccaccttaagaaggacacagacatatctaccatgtggatgagcccggaggacatcgtgctgggtgaaatcggccagacacaaacagacgagtactgtatgattccacttccagttctggagatggacggtggcaatggttgcaccacattatga

SEQ ID NO: 127808 - DNA, 2378 bp, Homo sapiens; identical to SEQ ID NO: 127109

SEQ ID NO: 127809 - DNA, 1137 bp, Homo sapiens
gcaaagaaggggaactacgccttcctgtgggatgtggccgtggtggaatacgcagccctgacggatgacgactgctcggtgactgtcatcggcaacagcatcagcagcaagggttacgggattgccctgcagcatggcagcccctacagggacctcttctcccagagaccctgtggaagtatatggtccctgccaggaaggctcagagtctctgtgggatctctgataggagcagctcatgatccttcctgtgagtcctctaagtcaggacaatggagtgtgctcaaggggtccagatcacaggaagacagagagaaaaaaagtgacctgcaggacacattggcaaccactgtggacttgcactggcaaagccaggtgtttgaaaaacattatccaagcctgagtaagcatgtggcccaaaccaggcctgacttgtcttccatgtccaacggctatttcataaccattacccaaatgcagggcaccgtcttctctgttgattccaccaagcccactccaaatgggcagtgggttaaaactctgatgaagacgtacaaggggattaatgttgtcttcatgcctgttattacaacatccattctgcagcccatggatcaaggtataattttgactttcaagttttatcatttaagaaatacacttcataaggctgtagctgccatagatagtgattcttctgatggatctgggcaaaatgagcaaagaaagtggcttcttgagatagaatatactcctggtgaaaatactatgaacattgttgaaatgacaacaaaaggtttagaatattccatacatatagttgatgaagaagtggcaaggtttgagaagtgtgactccaacgttcacagaagttctactgttaaaatgagtttgctggtctttcactttttccacctttctctacctgacatagtaggtttagatgtggccagttcagatgcaatgtcctttgtgtttccttctatccatatttccaacgggatggcccacagccagcaactgactcacatgggaatgtcaaaggcagcctctttgcctcagggtgggatcaaatctgtggggccacttggaatccagagttcttgcgggatcaggctggagctagtttccacctga

SEQ ID NO: 127810 - DNA, 450 bp, Homo sapiens
tcattgagggtatctggcacgcttttcaaaaaccagttgggccattgacttgtgggttttattctggtatcttgtttctattccagtagtcgatatatctatctgtaccttgaccctcttattttgttctctgtatcttttgtcattgtagtcttgaatcgattgtttctgggcttctttgtctttattctttttcattgtgtttttggtatttcggatatttgtctgttcatccttatcctgggtcttttttgtcgtttttgctttttcagtttctgttttatgtcttgttggaacgtttgtgtcttttgggcttggttcctcttcatttctgtattttcccaaccaataaactgggtctcctggatagcctacaaatttgcccttaaagaatgctatgtagaagcatgaagagtagtagttgacaaactggaataagaacatcttcat

SEQ ID NO: 127811 - DNA, 2605 bp, Homo sapiens
atggtgaatactgataacgatggctatgatgttgacgagaacatgattagacaggcatatcccaacgttagttacttacggcccgggacccatcttcacggcaaccacacggctgggttccgtcattgatattgatcgtgaagcgaaaacaatcactattgcagaactgcgcgacgagaaaggtgaactgctggttccggaacgtaaaatcgcctatgacaccctggtaatggcgctgggtagcacctctaacgatttcaatacgccaggtgtcaaagagaactgcattttcctcgataacccgcaccaggcgcgtcgcttccaccaggagatgctgaatttgttcctgaaatactccgccaacctgggcgcgaatggcaaagtgaacattgcgattgtcggcggcggcgcgacgggtgtagaactcttcgctgaattgcacaacgcggtcaagcaactgcacagctacggttacaaaggcctgaccaacgaagccctgaacgtaacgctggtagaagcgggagaacgtattttgcctgcgttaccgccacgtatctctgctgcggcccacaacgagctaacgaaacttggcgttcgcgtgctgacgcaaaccatggtcaccagtgctgatgaaggcggcctgcacactaaagatggcgaatatattgaggctgatctgatggtatgggcagccgggatcaaagcgccagacttcctgaaagatatcggtggtcttgaaactaaccgtatcaaccagctggtggtggaaccgacgctgcaaaccaaccgcgatccagacatttacgctattggcgactgcgcgtcatgcgccgcgtcggaagggggctttgttccgccgcgtgctcaggctgcacaccagatggcgacttgcgcaatgaacaacattctggcgcagatgaacgctgcttttctccttcgcttgcatgattggcataactgcaaagaaggaggtgttcccgtgaataaatcaatgttggcgggtatcgggattggtgtcgcagctgcgctgggcgtagcggcagtggccagtctgaacgtgtttgaacggggcccgcaatacgctcaggttgtttctgcaaacccaatcaaggagacgtttagaagtttgccacgagacagagcccttgaaacaagatgttttgcgtggccccgaattggccagcccctgggacctcccttagcgaaccctaaatacccagagtgccacaatccgggcgcaaaaggcggggggtcaccatgggataaagcccttggtgcgcgaacaaactcacaaaataagggggactcccaactggcgttgctggaccttatcgaagagggcaacctggggctgatccgcgcggtagagaagtttgacccggaacgtggtttccgcttctcaacatacgcaacctggtggattcgccagacgattgaacgggcgattatgaaccaaacccgtactattcgtttgccgattcacatcgtaaaggagctgaacgtttacctgcgaaccgcacgtgagttgtcccataagctggaccatgaaccaagtgcggaagagatcgcagagcaactggataagccagttgatgacacgggctttaagcgactggtcatggcgggcggcgtgagtgctaaccgtacgttacgggcgaagctggctgaaatgatgaaaaaacgccgcggcgaagtgttatacgcgcgtccggaactttgtactgataacggcgcgatgatcgcctataacgaaaagacatacccgttcatcgcaccgtttatggataatctcgagcgaacagatgacgacaaacggaaaatattcttcgacaccatccaaacagtgcgtgggcgatcactcaatcacacgttcttcctgctcgacgaagcgcagaacgtcgacatacaaacgatgtgtgccgtcgctactcgaccaggcatgaacgccaaattcgtattttgcggaaacttcgcacaggtggacaatgctaagctccgcaatttgcatacaaacggcttgtatcggctactaaacggcttgtacgaacggcaggcgtatgagtattttgatcacgttaacttgaccgaagtcaagcgcttttgttgctatgtctcacaaccttacacaggttcaatgggtaatactgaaaccttgtttggaatgtcaggaactaaactcaaagaaatcagtcgaggagaagtacaacgtggagatatttttatctcaggtaacggacgaccccagcggaggttaacaaaggtagcggctattttaaaccgcttcacaatgccagctgagaccagcgccattgaaattctagttaaactcacagctccagacctaacatcccctgcactgtcgggggcccgggaagcaaccctgcccctgcagtttggaagtgcccactcccgatccctggcatctcccaactcccagtgcccactccaatttcgaaccaaagttgcagcagagcccaggtctgtcgcaacccggccagcttgcccttttaagtacgtggcagtacatactcttgtatcaagccatctggaggacaggaattttggagtgtatgtcagcgatgtgaaaattatctcaagcagttaa

SEQ ID NO: 127812 - DNA, 381 bp, Homo sapiens
atgcatggccttaacaaagacatcatctttccgttgcagatcttcgccctttcaaataacgtactttacaactttcccgaacaaggagttgtgcccgtgttgtatgttatttacgctcaagacaaagctgatagcctcgaaaaacgcctttccgttcgtccggcacatttagcacgtttacagttactgcacgatgaaggtcgtttgttgacagctggtccaatgccagcggtagacagtaacgatccaggggctgcgggatttactggctcaaccgttattgctgaatttgaatcgctggaagcagctcaagcctgggccgatgctgacccgtacgtagcggcaggagtctatgaacacgtttcagtgaaaaccatttaa

SEQ ID NO: 127813 - DNA, 699 bp, Homo sapiens
atgtgcccgggctttgctgcggattgtctggagacgctggaagagattgccgagcaaaaccgtgaggtcttcctcggtgccggcgggaaaaaatatgaatatattccggcgcttaatgccacgccgcgaacatatcgcaaatgcatggctaatcttgctgggtaccgcagctcgcaattcgtcaatccatgctcacatgccacgcctttcccacgtcggcgcaaaacctggtcgatgcccagcctgctatataatgcaaatcgggccacacgccagcaggcgcagagagagaggacacgcgctaatacggcagcgcaccacatatccgaatatccatcgccacacctgaactccgctgcacgctacaggtcgatcacggcactgccagcaacacccgcgtacccaagacaccaaagcaacatagagagacagagaggcactcacagacaaacggaagcacgggcagagcaaaacgaactgaggaggcaaaaagaaggacggcaagcaaaaacaggcacgacaaggaacgaacgaacaacagaacgcggcggggaacgaaccaacacaccagaacgaaccgaagaacaacaacagcggaacgagagacgcagaaagagcggcacagcgaagaaggaaccgcgacacaaagaggcagaaaaacgggaagaggcagtgcagcttgatctgcagcgactctaa

SEQ ID NO: 127814 - DNA, 2142 bp, Homo sapiens
tgctactgctctcttatcatggcattccccagcgttatgcagatgaaggcgatgattacccgcaacgttgccgcacaacgactcgtgaactggcttccgcattggggatggcaccggaaaaagtgatgatgacctttcagtcgcgctttggtcgggaaccctggctgatgccttataccgacgaaacgctgaaaatgctcggagaaaaaggcgtaggtcatattcaggtgatgtgcccgggctttgctgcggattgtctggagacgctggaagagattgccgagcaaacccgtgaggtcttcctcggtgccggcgggaaaaaatatgaatatattccggcgcttaatgccacgccggaacatatcgaaatgatggctaatcttgttgccgcgtatcgctaaagctgagcggtaaagaactgagcgccgtcgcgaagagcctcgtcggcggttttcatcatccgtgaataatgcaaaaaggcgtgcagcgtgcttcgcgagtgagatcattattaaacagacagtaatacggcgactcgcggtccgcgtcgttgcttaaatatgcctcttcgtacatctgcaaatcctgttgcgttaagccatcccagacaccgcccaacagacgacgagtcacggaatcccgtaatccgtaaagcccataccacagcaaaacgcccgcaactttaccgcaatcgatctgtttatcacgcaaccacaacgcactggcgagcgccagcatggcacctgcggaatcaccggcaaagccaatgcgggacatattgatttgataatcctccgcctgctggtggaaataacaacaagcagccacaatttcctctatcgcttgcggaaaacgcgcttcaggtgaaagggtgtaatcaataccaatcaccgtacattggctgtagcttgccagcaggcgcatgatgcgatcgtgggtatcgagattgccgagaataaaaccgcctccatgcaaataaaatagcgtcgctgggctatctggctgctggtggcggcagatgtggtagagccgcgttactaccaggcgattctggatggcgttgaactccagcggctttttcagcgttaccagagagaaaccggttttcttaacgccctcttccggacgatacggcgtggagcgcggaatatgatgaatggggcaaccagatacagcgtttgccatcggcagacagtttttgagctttttgagcaaacgggtgggcaggggagccatatcgtggctacccatatgaatactgccaatcagatgaaaatggcgattgccggggagggtgatatcgatggcaggccaggtgtaatgattaccgcgcagcgcggcccaaagcgtttttacccggtacaacagtatcggtattccggtcgccgccggtattttgtggccgttcactggaacactgcttaacccggtagttgccggagcggcaatggcgtcaagcactgcaggttgcccggcataacgggcaatcgcatccagcggcaagccactaaggtaattcttaagaagctttaaggggtatttcttcttcttcaacatggtttttgcatttctccattttccagagtaaatgccactcccagccccccaactatgaccaaagtagcccatatctttcagggcttctaagacctttagatgataataaccgtactgcccggtatctccgcagccttgcctttcaagatcctcaatgcgtcggtcttttgacagctccaatgctgatgccgctttttctggatcaactgatattgcaatgtttcttttggtgccaatcttgagcgcgcgtaaaccagcttctccgcgctcttcatagaccttcagccacctggctacagaaccactaccagcaagcataaagtgagcagcagcctgattaagggacatgtgctgctcgatcacagctttcacgaccttaatacgcaactctggatcagcactaacgcctttaggtttgggaattaaacctttttctccatgtttttcatagagggcaacccatgtcctgacctgggttcgggggacaccaaaacgtgccgagatgatcctgtaaccatcatcagttgtgaagtagtgattcacgacttcaaggcgcttttcaaaagggtattttggctttgacat

SEQ ID NO: 127815 - DNA, 2316 bp, Homo sapiens
atggcggtaacgcaaacagcccaggcctgtgacctggtcattttcggcgcgaaaggcgaccttgcgcgtcgtaaattgctgccttccctgtatcaactggaaaaagccggtcagctcaacccggacacccggattatcggcgtagggcgtgctgactgggataaagcggcatataccaaagttgtccgcgaggcgctcgaaactttcatgaaagaaaccattgatgaaggtttatgggacaccctgagtgcacgtctggatttttgtaatctcgatgtcaatgacactgctgcattcagccgtctcggcgcgatgctggatcaaaaaaatcgtatcaccattaactactttgccatgccgcccagcacttttggcgcaatttgcaaagggcttggcgaggcaaaactgaatgctaaaccggcacgcgtagtcatggagaaaccgctggggacgtcgctggcgacctcgcaggaaatcaatgatcaggttggcgaatacttcgaggagtgccaggtttaccgtatcgaccactatcttggtaaagaaacggtgctgaacctgttggcgctgcgttttgctaactccctgtttgtgaataactgggacaatcgcaccattgatcatgttgagattccgtggcagaagaatggatatgcctggattgtctgtcaatgccaggaaagtgcgatggttttcattctagattgggttctgcagcactgtgttgagatgggctacgaaggcaccggacgtggttttttgctgaaattttgcgctcgctttccgcatttacaccgttttgaactgcaacagccgatccgctgggcgcagggatgcccgctggaaaaaatggtcagcgaggcactggtttttgacgatgaaaacttcacccatacaccacaaggcaatattgtcatttccgcatttgaacagacgttatggcaaagcgatccagaaacgccgttaaaggtttatcagctcttgtctggtgcgcactatcggacttcgccgctggatttacgccggatgatggatgcaccagggcaacattttttacaggcggctggcgaaaacgagattgccggggcgctgtggctggtggatgagggtggattatctcaacaactcagtcaggcggtatgggcaggttttcgtcgcccgcggggtaatctggtggcccagtcgctggcggcgcacggcaacaatccactggcggcgacattgcgtggacggcgggtcagccggatagcagttcatccggctcgtcagcgggaaggcacagggcggcaacttattgctggtgctttgcaatatacgcaagacctcgactatctttcggtgagttttggttacaccggggagttatggcgtttctggcaacgctgcggttttgtgctggtgcggatgggtaatcatcgggaagccagcagcggttgctatacggcgatggcgctgttaccgatgagtgatgcgggtaaacagctggctgaacgtgagcattaccgtttacgtcgcgatgcgcaagctctcgcgcagtggaatggcgaaacgcttcctgttgatccactaaacgatgccgtcctttctgacgacgactggcttgaactggccggttttgctttcgctcatcgtccgctattaacgtcgttaggttgcttattgcgtctgttacaaaccagtgaactggcattaccggcgctgcgtgggcgtttacagaaaaacgccagtgatgcgcagttatgtaccacacttaaactttcaggccgcagatgttcgcccgttgtcacctgcggtttgaagcggaggatgaatgaaactgcaaggggtaatttcgatctggatggtgtaatcaccgataccgcgcatctgcatttccaggcgtggcagcagattgccgctgaaattggcatcagcattgatgcgcagtttaacgaatccctaaaagggatcagccgcgatgagtctctgcggcgcattctgcaacacgggggcaaagagggcgactttaactcgcaggagagggcgcaactggcgtatcgcaaaaatctgctctatgtccactcactacgcgagttgacggtcaacgctgttctacccggcattcgctctttgctggcagatctccgtgcacagcagatctcggttgggctggcttctgtctccctgaatgcgccgacggattttagcggcgctggagctgcgcagagtttttcaccttctggcgcgatgttcccaactaaaaacgggaccaggcatttacccgggggtgactcgtggactgcggaagatatccagcatcagaccgcaatcagctga

SEQ ID NO: 127816 - DNA, 1232 bp, Homo sapiens
ctattgttcatccgaagatgcgacgtagacgacatcgatagagtatcgatacgagactacgtactgcagtgtagacactgatgctgcgtcgatacgtcgaatctgacgatcgtatgacgtatcgaatagatgctgacgatgtgcgatcgcgatcggaccgacgatgtcgtgacggctagacgacgatatgacgtactctatgctagtactatgatcgcgacgatgaactgatgcgtacgacgcacaactaatgtagagtaagaagctcgtgacgacgccgcagtctaatgagacgactaaatgtaggctgacgagatagctagctactacgtcatcgatgatcagctgaacccgaacggtacggactgatatgcccaaacctgcgacaatgtgatacatcatcgagacgatcgatactacacgaactcgcaatgagacgtacgagtcgggactgactagactactgcgctgatgatgacgacgatgtgatatgacgagatgacgctgaggagctctagtcacgatgctcgcatcgtactgctgtgtgcggtctacaatgaatgagctctgagacgcgagagatgcgagagctagtgcgtcagaccgcagcgtgagttgcgggcgaagtgccgacagtcgaggatatggagatgcgtcactgtcagtggtagagatgtggatctgtagcgtcgctacagtgtggtcggagaccaaagttatcagttctggcgcgaggggactgaaatcgatcttggtgctgatccgcatagttgtgatgatggtatccatgctgccgcaactggcgctatctggctgggggcgattcagggttttgccggggtgaccccgcgtgacggtgaattgcatctcaatccggcgttacctgagcagtggcaacagttgtctttccctctgttctggcagggctgcgaattacaggtcactcttgacgcgcagcgtattgcgattcgaacttctgcgcccgtttcactgcgtttgaacggtcagcttataaccggggctgaagaatctgttttctgtttgggtgattttattttgcccttcaatgggaccgctaccaaacatcaggaggatgaatgaaactgcaaggggtaattttcgatctggatggagaaatcaccgataccgcgcatctgcatttccaggcgtggcagcaaattgccgctgaaattggcatcagcattgatgcgcaggttaacgaatccctaaaa

SEQ ID NO: 127817 - DNA, 641 bp, Homo sapiens
gcagcgcagcccttgctccaaagtaattccggtgcttcgccaattattctgtcgcccttcatgaggtctgcgtgtgcctgtagggtcgtgtcgtcccagtttttgccgttataaaaaataattgtgagttcacagccttccgctgccagtgtcgcctgtaggcgttctgccatggtaggaagttctatcggtaggtgataaaccagcgtcaaggttttcggtagtttgacttcatccggtacctgccaatgcggaatagtccagcctggcagtaatgcatgactggcggtgatcaggttttctccgacttctaacgtttgtaataaaccggattgatgaataatggagatcacttttcgcgcctgccagagggagagtcggggacttttgcgcaacgtcaaatagcaaaaacctaaactgatgccgctactgacctggctgacccgttgcagctcctccggtttgccgatggtgatttgcacgggatgccgacaactggttcccaaatctttttcgaaaagcggcggagttatccagtactcaaccgctttaagcagcggatgacgtaaatggtaataatcatggctttccaggcgcaccagctatgctgtgaattgtgttaagcgaaaaggacccgtgcc

SEQ ID NO: 127818 - DNA, 1107 bp, Homo sapiens
atgccacggggctctctctttgtttccaggtggatcggcacggttgagacaatcatagacacacaccagatagtgaaaactgggtccaaggtgggtcaaccgccttctggtcccctggtgccaaccatgcactggatataccagcatttattattaagtttagtgagggcacgggtaatggctacggatattatagatctggctgctcagagagaccaggagccttctctaaagtggttctcaaaccctggtgtagatgagaatatattatggggtttgaaaatggacttctcctctgagtattctgatgcagaaaccagttgtcggcatcccgtgcaaatcaccatcggcaaaccggaggagctgcaacggggttcaagccaaggcgcgaaaagtgatctccattattcatcaatccggtttattacaaacgttagaagtcggagaaaacctgatcaccgccagtcatgcattactgccaggctggactattccgcattggcaggcacacgcagacctcatgatgggcgacagattaatgtggcgaagcaccggaatatactctggaaccatgatgcctgcgatgcattgttgaaactgggctatggctctccttcgctttgttatgcgatgggcgggagtgcggggggcatgttgatgggcgttgcaattaatcaacgcccggaattattccacggcgttatcgcccaggtaccgtttgttgatgttgtaacaacgatgcttgatgaatcaattcctcttaccactggtgagtttgaagagtggggtaacccgcaggatccgcaatattacgagtacatgaaaagctacagcccgtatgacaacgtcaccgcacaggcttatccgcatttactggtaacgaccggtttgcacgattctcaggtgcaatattgggaaccggcaaaatgggtcgctaaattgcgcgagctgaaaaccgatgaccatcttttattgctctgtaccgacatggactcaggccatggcggtaaatctggtcgctttaaatcgtacgaaggcgtagcgatggaatatgcttttctggtcgcgctggcgcagggaacattacccgctacgcctgcggactaa

SEQ ID NO: 127819 - DNA, 201 bp, Homo sapiens
atggtgcgtggcttgttgaacgacggcctggcagtggttggtggttttaaaattggtgatatcgatcctcgtggtgaaaccgctgatttcaccagcgtttctgataaagcccgggcgattggcggcggcgtacttgaggcgttaatgatgttgatgcatcagggcgtgaaagcgacaaaagaagtgctggaagtggcttaa

SEQ ID NO: 127820 - DNA, 638 bp, Homo sapiens
attccgagcacggggcgcaattatggtttgaaacagacccgcaattatgacgcgcgtcgcgatgttgttgcttcaacaactgccgcgctgaatatgatgcagcgtctgaacaaaatgtttgacggcgactggcttctgaccgtagcggcttataacagcggcgaaggtcgggtcatgaaggcaattaaaacgaacaaagcgcgtgggaaatccacggacttctggtcgttaccgttgccgcaggaaacgaagcagtacgtgcctaaaatgctggcattgagtgatattctcaaaaacagcaagcgttatggcgtacgtctgccaacgaccgatgaaagccgtgctctggcgcgtgtgcacctgagcagcccggttgaaatggcgaaggtagcagatatggcggggatttccgtcagcaagctgaagacattcaacgctggcgtaaaaggctccacgctgggcgcaagtggcccgcagtacgtgatggtgccaaagaagcatgcagatcaactgcgtgaatctctggcttcaggcgaaattgctgctgtacagtcgacgctggttgccgacaatacgccgcttaacagccgtgtttacaccgtacgctctggcgacacgctttcaagtatcgcttctcg

SEQ ID NO: 127821 - DNA, 735 bp, Homo sapiens
atgagagttgtaactgaaaagcttgtgaggcagtcttctaagatcaggggctcccattgggcccaaaggtccaggggcagtgggattggttcccaggacccggcgcgctacggcaccaacaaagtgtcgcgcatcaagcaggtggcttccggtcgctttggggttactccggcgtatctggtcaatgccgacgtcattcagattaaagtcgcccagggcgcgaagccaggcgaaggcggtcagttgccgggtgataaagtcacgccttacatcgccaaactgcgctattcggtgcccggagtgacgctgatctccccgccgccgcaccacgatatctactctatcgaggacttagcgcagctcattttcgacctcaagcaggttaacccgaaagcgatgatctccgtgaagctggtttccgaaccgggagtaggcaccatcgcgactggcgtggcaaaagcttatgcggacttgcgccggtgccgccgtcatagcctgcgatggtcccaagggtatggctgttcgccatttaaagtggtacgcgagctgggtttagaacgtcgtgagacagttcggtccctatctgccgtgggcgctggagaactgaggggggctgctcctagtacgagaggaccggagtggacgcatcactggtgttcgggttgtcatgccaatggcaaaggagcgccttcagcacgcagcagcatttacacaaccagagacactcggcagtga

SEQ ID NO: 127822 - DNA, 4446 bp, Homo sapiens
atgtgcgaactcgatattttacacgactctctttaccaattctgccccgaattacacttaaaacgactcaacagcttaacgttggcttgccacgccttacttgactgtaaaactctcactcttaccgaacttggccgtaacctgccaaccaaagcgagaacaaaacataacatcaaacgaatcgaccgattgttaggtaatcgtcacctccacaaagagcgactcgctgtataccgttggcatgctagctttatctgttcgggcaatacgatgcccattgtacttgttgactggtctgatatccgtgagcaaaaacggcttatggtattgcgagcttcagtcgcactacacggtcgttctgttactctttatgagaaagcgttcccgctttcagagcaatgttcaaagaaagctcatgaccaatttctagccgaccttgcgagcattctaccgagtaacaccacaccgctcattgtcagtgatgctggctttaaagtgccatggtataaatccgttgagaagctgggttggtactggttaagtcgagtaagaggaaaagtacaatatgcagacctaggagcggaaaactggaaacctatcagcaacttacatgatatgtcatctagtcactcaaagactttaggctataagaggctgactaaaagcaatccaatctcatgccaaattctattgtataaatctcgctctaaaggccgaaaaaatcagcgctcgacacggactcattgtcaccacccgtcacctaaaatctactcagcgtcggcaaaggagccatgggttctagcaactaacttacctgttgaaattcgaacacccaaacaacttgttaatatctattcgaagcgaatgcagattgaagaaaccttccgagacttgaaaagtcctgcctacggactaggcctacgccatagccgaacgagcagctcagagcgttttgatatcatgctgctaatcgccctgatgcttcaactaacatgttggcttgcgggcgttcatgctcagaaacaaggttgggacaagcacttccaggctaacacagtcagaaatcgaaacgtactctcaacagttcgcttaggcatggaagttttgcggcattctggctacacaataacaagggaagacttactcgtggctgcaaccctactagctcaaaatttattaacacatggtgtgcctgcttcccctttgccttcttccatgactcgttatggcggagtggatgcaaatcagcaacttgtgctggataaaccgcaccaccagacaccgcgcggcctgaagtttgagctggcggcggaatcaccgctgatgatagatcatgctataatagcgctgtcgaaacagatctaccaacgttacccgcaggcgaccatcaaattacgtaactgggattacgattccttagatgccattactcgtggtgaagtggatatcggtttttccggtcgcgaaagccatcctcgctcgcgggagctgttaagctcgctaccgttagccattgattcatgcaagtgctgtttagtgatgtgccctgcgtctggttacgcaaagatcatccggcactgcatcaaacgtggaatctgtgacaccgttctatacgattatccgacatatcagcatttgctgggaacagagcgatacctgggcgctggacaatgtgttacaggagctgggacgcgaacgcacgattgctatgagcctgccggaattcgagcagtcactgtctatggcagcgcaacccgacaatctgctactggcgaccgcgccgcgctacttactacaatcaactccatcaactgccgttggttgctcttcctctcccgtttgacgaaagccagcaaaaaaagctggaagttccttttaccctgctgtggcataaacggaacagccataatccgaagatcgtctggttacgggaaaccattaaaaacctttacgcgtcgatggcataaccgaatctgtcatcaagaagcccgaaacattccccctcatcgtcaaagccgttttctggcgtccagaggtttactcgcagaactgatgttcatgctgtatggcattggcgaattgccggaaatcgtcaccctgccgaaaggcgccgctggtggacagcttcgtggccccaagacgggggaagtaccccaaagagtgacaaacccacaggggccaaaccaagcacgagagcagggagaacaggtacgcgagcacagagtgacccgcgggactggagatacgggcaaacagcagctgggtacagagaagatcgtctcagaaagaagtacaccatacacaacgctttctagaatggaaagtagaattattcttggatctacagcatcaccctcaatggtcggggaggaatcagccctccctgatttatgtggccacatggggcagcagagctacttggacagaattgagattttgttaggaagaaagaaaggggaactgggggaaccggatgctgagaggtcaaccaacagcaaaagattgttagtgtctggcataggacggtcccgggccaattgtcccagcaatccgctcacggttcagccattcggcgttacctcctattatcggatttcggcgctgccaacacaagtcgacgaattcttgaactcttaccatgaaaatgtgccactcatacctgctgccgtgggaccatggttgactgacagcccagctgcatgctcccctgcatttgccccaggccgtgctcctcacagcaaccctcggctgctcccagccaatgcccgacccctgggggaactagtactgtcccattcctgtgggtcccctccacctgggtcagcactgagttatcctgccttcctgcctcctccagctgcctggcggcaatccttcaccagtgaaccccctagtaaatctcctgtgtgtctaattccatcttggcatatgcttcttagagacctccgacggtctttgttaagttacctacccactcaatgggtaaacgtgtttcattgtgttgtcaccattgtactcaagtcgtgtcacgttcacggtccaccggtcacatgtcaccgtgtgcacacgagtagttacggtcagtgtccgtgtccgtggtcggggtcgcgggcacatgtccggtcacggtgtcggactttgtcgtttttgtcgtgttccgtgtgtccgcgggtcacgggtcccagtgtttccattgttgctacacagtgggttcgatgttgtggtgaggtggtgtccagatatggtggttcccgggggtggttccacggtggtgtttgttgccagtatgggttccagggtgttgttcccggggtggggaaccaggggttcaaaggtgttcaggggtcagtggtcggagtgtcaggggtcgtggttcgttggttcagtgtcatggtcagggtcacagaccgggttcatgtgtctggtcgtgtccgggtctggtcggttacggcacagggcacggtccggtcggggtcaggtcacgggtcacgggcacaggtaggcgtttcggttgtcgtgtcattgtcacggaagtcaagggacagggttttgctgtcagcagcctgcctgcctcctttgaacgagcacgagatccctgatcctgggagacggacgctgcagggagcccgagacctgtgcccactgccactcccagcactgggcggaccaggagtcgggactcccattctcaagaacaaatacaatacaatacgaaaccacgcccattggaaccgcaagccttccctccagggggttaacagttcagtggcctgccggttcccttccaagttggccgctttggcattaatcgacggtatggttgaccatgccagtgatgatgagttgtttgccagtgggtatttgcgtggccacctgacattagccatcgcagaactggaaagtggtgatgaccactccgctcaggcggtgcatacgaccgttagccagagtctggaaaaagccattggtgctggcgctggtgaccgatatgtgggaaaacctgtttcagcaggcgtcacagcagtaagttgcggcgtctggagcagcatgcctgatgcgacgcttatcgcgtcttatcaggcctacacgtcacacgtagcgtactggcatccatcggaatcggttcgtcgctcatctgcgccgccagaatctccggcacacagcggggcagaacacaaccgcgagaaccaaagccgcaaacataaagagatcgtcaaaaaccggcgcgcttaccgcctcatctttctgctccgccaacgacgcatattccacgagtgttgcctcataatcgggaacattgcctaccattggcagatgatcgcgggtggcacaacgcacaccgcagcgcgcctctttatcactgacatcaacctcttttgcccactgtgcctgcgggaaacaagtcggtaccgagctattctctgttgcttaggcatcccaggatga

SEQ ID NO: 127823 - DNA, 575 bp, Homo sapiens
gcggagtttgaatcacgcattctggcattaatcgacggtatggttgaccatgccagtgatgatgagttgtttgccagtgggtatttgcgtggccacctgacattagccatcgcagaactggaaagtggtgatgaccactccgctcaggcggtgcatacgaccgttagccagagtctggaaaaagccattggtgctggtgaattgtcgccgcgtgaccaggcgctggtgaccgatatgtgggaaaacctgtttcagcaggcgtcacagcagtaagttgcggcgtctggagcagcatgcctgatgcgacgcttatcgcgtcttatcaggcctacacgtcacacgtaggtcggataaggcgttcacgccgcatccggcaaacactgcgagagcagattaccccgccttaaccgctttacccttcaacaatttccgcacccataaccgattcgggtttaacgccgccagcgtactggcatccatcggaatcggttcgtcgctcatctgcgccgccagaatctcggcacacagcggggcagaacacaaaccgcgagaacctaaagccgcaaacataaaga

SEQ ID NO: 127824 - DNA, 1630 bp, Homo sapiens
tcacttccagctggaaacgccacgctgggcggtactgacagcggcgattgttgccgcggtccggcctttgctgcgggaggtgaaccgtattctggcgctattcgctatcgtggctttttgcgcatcatcggcacatttattggctggatatcctcgctggtacgaatagaaaactcgtatgcgtgggggctggccggttataccgcgctgatcattgtgatcaccattcggccggatctcactctgtacgccgcagtttgccgtcgaacgttgtaggacctgcagagatgcttgacactgaccattggcctgaattttagaataggtgggaggctctgaagtgtgaacccagtttgcatgagccgaccttgaaatacaaccctttactgtttgatgttctaacgttgaccgtaatccggcttgcggacagtgtctgtgggtagtttgactggggcgttctcctcctaaagagtaacggaggagcacgaagcttgcataatcctgctcggacatcaggaggttagtgcaatgcataagccagcttgactgcgagcgtgacggcgcgagcaggtgcgaaagcaggtcatagtgatccggtggttctgaatggaagggccatcgctcaacggataaaaggtactccggggataacaggctgataccgcccaagagttcatatcgacggcggtgtttggcacctcgatgtcggctcatcacatcctggggctgaagtaggtcccaagggctatggctgttcgccatttaaagtggtacgcgagctgggtttagaacgtcgtgagacagttcggtccctatctgccgtgggcgctggagaactgaggggggctgctcctagtacgagaggaccggagtggacgcactcactggtgttcgggttgtcactgccaattgcactgcccggtagctgcgataaaaatgccctcgtacgctctgatttaggatgcgcaaaaaattcatcaggtgcagcttgctccactatttccccacgatccataaaaattacccggtcagcgacggttcgtgcaaaccccatctcatgtgttacacacaacattgtcatacccgactgcgccagcccaatcatcgtatccagcacctctttcaccatctcaggatcgagcgccgacgttggctcatcaaacaacataattttcggcttcatacacagcgaacgcgcaatggcaacgcgttgctgctgaccacctgaaatctgtccgggaaacttatgcgcatgttcggcaattctcacccgctctaggtaatgcaccgccagatcttcagcctctttcttaggcatcttgcgtacccaaatcgggcgcacggtacagttctgtaattcgtcaaaataggcgcgacttttttcgcgcgaccgatcacatgtacgtgactgtgccgacgaacaggccaaaaatgtggaacccggtgaatacgcagatgaattcttttcgcgccgacacttgcgaacggtaaagttccttgctaaaccgttgctgaaaaatctgggaccatccttttgcaatggcggtttggggcagtatttgcggtactccgggcaatcagcgcagtttgcgtgattttcgtcggcatcctcggcgcggtatttggccat

SEQ ID NO: 127825 - DNA, 2115 bp, Homo sapiens
ctaagtgtagcgaaattccttgtcgggtaagttccgacctgcacgaatggcgtaatgatggccaggctgtctccacccgagactcagtgaaattgaactcgctgtgaagatgcagtgtacccgcggcaagacggaaagaccccgtgaacctttactatagcttgacactgaacattgagccttgatgtgtaggataggtgggaggctttgaagtgtggacgccagtctgcatggagccgaccttgaaataccaccctttaatgtttgatgttctaacgttgacccgtaatccgggttgcggacagtgtctggtgggtagtttgactggggcggtctcctcctaaagagtaacggaggagcacgaaggttggctaatccgcccaagagttcatatcgacggcggtgtttggcacctcgatgtcggctcatcacatcctggggctgaagtaggtcccaagggtatggctgttcgccatttaaagtggtacgcgagctgggtttagaacgtcgtgagacagttcggtccctatctgccgtgggcgctggagaactgaggggggctgctccccatgccgaactcagaagtgaaacgccgtagcgccgatggtagtgtggggtctccccatgcgagagtagggaactgccaggcatcaaatttagcgtgctgatatggctcagttggtagagcgcacccttggtaagggtgaggtccccagttcgactctttttgcgatgggcccgaccggtttttcccatgcgctgttccggtatgtcaaaccgtttgggcatcatgcactccagcctcggaccatccccggaaccctcctgcgtccttaggttgttgagtgcatccgggagtgcgtggactgacggctccggggtcccagccagcaagcgagacccagcatcctgggagtggccacggcggcgcacgtggaccagcaagagcgcagcgccggccacgcccgcggccacgagcagtcccagagccggaggcaaaaggtagcgctgagggtccccgggcctgaggcccggcggggccgcgggcaaggcgcttgcgccgtcggggtgcactgggaactcacaccgcgctcccatgtagccgggagcgcaagcgcagacgaggccggagaagtgggcgtagcagcggccgccgtgagcacaggggcgcgcggcgcacgggtccgcgcgctcgcggcagtcgcggccgccgaagcccagcgcgcaggagcagcggtgcgcgccgccgccctccacacacgtgccgccgttagcgcaggcgcggcccgcgcagtcgtccaggtcgtgctcgcagcgaggacccgcgaagccggcgcggcagcggcagcgcagggcgtggcccaggtccaggcagagtccgccattgcggcatggctgcaggctgcaccggtccaccctcttctcacagttggagccttggaaaccgggtgggcagtggcagatgtaggcagagtcagggtctgcacccccgacacacaagccgccgttgaagcagggtccatctgcacatgtcaccccgctcacctcacaccgcagcccgtagaacccacgcgggcaggtgcattcaaaggacctgggtgtctcactacagctgcctccattggcacacgggttcccgtcacagggcccaggcccagggacaaggcatccggtggtagcagaggacgggcccctggggctgaggcagctgctggtggagacagggaccgtgcagaggggtccagtccagccctctaggcatcggcattcaccgggctgttcacagaagccatgctcagggctgcagcctgctcggcacaccagcggcgcctcacattcgtcctcgagcggtgcgcaggggcgcagtcccggaccgcaccgcgagggggcgctgcgcggacggcagaggcgcgtgcacgcggtcccgacggcaggcggctcgcagcgcgcgcggtacgagaagcgcagctcccaggcgcctgcgcgctgaatgtcccgggcccacgggcctccggctgccaagcgccgcctgccagccacgcgcgccagcaggctccaggcgggccctgcgaggacaggcaaaggaggggtgctggggtgggcccggccgaacat

SEQ ID NO: 127826 - DNA, 1239 bp, Homo sapiens
atggacgatgggacgtctatcgcgccagatggtgacttgtgggctttcattggcgacgagctaaagatgggaattccggaaaatgaccggattcgcgaacagaaacagaaatatttacgcaataagagctatctccacgatgtaactttacgggcagagccgtatatgtactggatagcagggcaagttaaaaaacgtaacatgcctatggaactggtactactacccatagtggagagcgcttttgatcctcacgcaacgtctggcgccaatgccgcaggcatctggcagatcattccgagcacggggcgcaattatggtttgaaacagacccgcaattatgacgcgcgtcgcgatgttgttgcttcaacaactgccgcgctgaatatgatgcagcgtctgaacaaaatgtttgacggcgactggcttctgaccgtagcggcttataacagcggcgaaggtcgggtcatgaaggcaattaaaacgaacaaagcgcgtgggaaatccacggacttctggtcgttaccgttgccgcaggaaacgaagcagtacgtgcctaaaatgctggcattgagtgatattctcaaaaacagcaagcgttatggcgtacgtctgccaacgaccgatgaaagccgtgctctggcgcgtgtgcacctgatcagcccggttaaatgtgcgaggttctcgcggtttgtgttctgccccgctgtgtgccgagattctggcggcgcagatgagcgacgaaccgattccgatggatgccagtacgctggcggcgttaaacccgaatcggttatgggtgcggaaattgttgaagggttttcccacatatcggtcaccagcgcctggtcacgcggcgacaattcaccagcaccaatggctttttccagactctggctaacggtcttctcaatggtcttcaaacgtcgtgagacagttcggtccctatctgccgtgggcgctggagaactgaggggggctgctcctagtacgagaggaccggagtggacgcatcactggtgttcgggttgtcatgccaatggcactgcccgtagcgcggtggtcccacctgaccccatgccgaactcagaagtgaaacgccgtagcgccgatggtagtgtggggtctccccatgcgagagtagggaactgccaggcatcaaataaaacgaaaggctcagtcgaaagactgggccttacaactgttttcaataactgtgacacaacagctgaaaaataa

SEQ ID NO: 127827 - DNA, 459 bp, Homo sapiens
atggtaccgtgcgatttcatcgctccggctatcacccataacccgctctctgatcatcaccagaaactggtgtctaacttcttcgcccagaccgaagcgctggcgtttggtaaatcccgcgaagtggttgagcaggaatatcgtgatcagggtaaagatccggcaacgcttgactacgtggtgccgttcaaagtattcgaaggtaaccgcccgaccaactccatcctgctgcgtgaaatcactccgttcagcctgggtgcgttgattgcgctgtatgagcacaaaatctttactcagggcgtgatcctgaacatcttcaccttcgaccagtggggcgtggaactgggtaaacagctggcgaaccgtattctgccagagctgaaagatgataaagaaatcagcagccacgatagctcgaccaatggtctgattaaccgctataaagcgtggcgcggttaa

SEQ ID NO: 127828 - DNA, 222 bp, Homo sapiens
tcgcctctagaggatcccccgtcggtgcgtagcaacagcccgcaagaagaacgctatgagaaaaaaacggcaagtaacggcaaattctatttcaatctgaaagccgctaatcatcaaattgtcggctccagccagatgtacgccaccgcgcaatctcgtgaaaccggaattgcctccgttaaagccaatggcacaagccagacggtgaaagacaatacgtaa

SEQ ID NO: 127829 - DNA, 2349 bp, Homo sapiens
tcataatttccccaaagcgtaaccatgtgtgaataaagtttgagctagtagggttgcagccacgagtaagtcttcccttgttattgtgtagccagaatgccgcaaaacttccatgcctaagcgaactgttgagagtacgtttcgatttctgactgtgttagcctggaagtgcttgtcccaaccttgtttctgagcatgaacgcccgcaagccaacatgttagttgaagcatcagggcgattagcagcatgatatcaaaacgctctgagctgctcgttcggctatggcgtaggctcagtccgtaggcaggacttttcaagtctcggaaggtttcttcaatctgcattcgcttcgaatagatattaacaagttgtttgggtgttcgaatttcaacaggtaagttagttgctagaacccatggctcctttgccgacgtcggtagaatgctcgcaaggtcggctagaaattggtcatgagctttctttgaacattgctctgaaagcgggaacgctttctcataaagagtaacagaacgaccgtgtagtgcgactgaagctcgcaataccataagtcgtttttgctcacgaatatcagaccagtcaacaagtacaatgggcatcgtattgcccgaacagataaagctagcatgccaacggtatacagcgagtcgctctttgtggaggtgacgattacctaacaatcggtcgattcgtttgatgttatgttttgttctcgctttggttggcaggttacggccaagttcggtaagagtgagagttttacagtcaagtaatgcgtgcaagccaacgttaagctgatgaactgaaaacgctcttccggaaccgcctgaatttatcaccggaagcgaatgacgattttctcgatcgttgcctggacggcggtgactggtatcccttttcagaaggtcgccgttttgtatcattccatcacgtggatgagcttcgtatctgtgcctaacagctttatttccgatgcaacggcgaatggtctgattctcatgaaactgccggaaacctggagtacaaatgagaaaatgtttgcttccggagggcagggacatgggtttgccgctgaacggggaaaccatattgtcgacaagaacgcttcctccatatagagcgtgtccacagaaccaagcgtggcggccttctcctcgattaagctgcgtcaggatccgccgacgataatcttcatcatcaatataattgaggagatatagcgttttgtttacacgccctacttccataattgcctgtgccagtcctgatgggcgcgagcttttcagtaaagagcgaatgagttctgacgcatgaattgtacccaacttgcacgaaccagcggttcgcatcatctcatcccactgactctccgcttttgacagatctgcatatcctcgggccaacttatccagtactccgtagtttgccgatttattcacccgccagaacaccgcctcaccattcacccgctggcggggcagggggtaaatctcggctttatggatgctgcagagctgattgccgaactgaaacggttgcatcgtcaggggaaagacatcgggcagtacatttatctgcgtcgctatgagcgtagccgcaagcacagtgcggcgttgatgctggctggtatgcagggattccgcgatctgttttccggtaccaatccggcgaaaaaactgctgcgtgatattggtttgaaactggccgacacgcttccctgaccggtgattacagtaatcagcatctggtgccgatgaagcaagtggtgccgccacgctatcaagcgcgtaatgattttgatgtttttgccgagttaagtgaacggcggtgctaacgctgaatggtgccatcagctctaccagcacgcggcccgtcagcgtctcgccactctccagcgtcacttcaacgtgactctgagtacgggcaacgttagccacgcgatcagggcaatgcagcgttacgccaggtgctttacgcagcaatgcaaacagccgttgcccgacattgtgcaattcgacaacctgtcccagcgccgccagttggtaatcttctgcggcgagggtgacaaatccagcgtgaccacgatcgctgacatgcacggtggtgatggcagttgcgcaatccgccagagattgccagacgccgatgcgcgccagttgcatcaacgcttcgatttcttccggctttttcaccacgctggcggtgaggttttcgttaccggtttcggtaatcacaatgtcgtcttcaatacgaatgccgataccgcgatattgttctggcacttctgcatccggcgcaatatacagccctggctctacggtcagtaccat

SEQ ID NO: 127830 - DNA, 1065 bp, Homo sapiens
caactcgcaaccttcttttttggtgggggcctccccggtgggtctgccccctgggaccccccgggtgaggcttgtttgtgggtccttgttcgcctccctggtagaacagtctgggtcatccagtttgttcagttgagaagtttctttgcccccccctttgcgcacaatggtagagcctcgagtggtcgtgtctcggtccattacggaatagcgcaaaccgccgaatgggcagcagagatttgtggtgttggcgcacggaaaatccgcgagctggcggctattttccaccaaaataccatcatgcattttgccaatggtggtaccccacgcggcgttctgcggtgctctcttccatgcaaggcagcttgccgggtggctgccgatgcggtggatatacatcctgttgcccgcattgttgaagcactggaaaaccctggtggcgcatatcaacacaacggtatgaaccgacatttcccggatattcgttttatctggtgggcgggcggtgccaactttactcatcatcaggataccaatcgcctgatacgtgcctggcaaaatgattcctattttagaaaagggcgtataaaagccaaaatgggtccaaaacttttctaaagcttgtttccggatttcaaccagtgcctccagcaccactttccagtcatcaaccacgccaacatctgcctgtggaaataccgcagcgctggcgtcatgattaatcgccaccacaaacttgctattgcgtacgcccgccattaacgctgctgcgccagaagcgccaacaacaatacacacctcaggtgccagcagatgtccggaaataccaatcactttttcagcatcaacgcacacgttcatccatcggggccgactgtatgccacttcggctcccagctttcctgcagcatagcgattcctggtatctgctctccgccgggggctaaaggtccatttggcatcctgggaccggtgaccgttttctaaatcaaattctcgttgggcggcctggtcccaccaaggtgcggggtggggcttgggtaagggtgtgggtttcttccccat

SEQ ID NO: 127831 - DNA, 1068 bp, Homo sapiens
atgaaacagtatttagaactgatgcaaaaagtgctcgacgaaggcacacagaaaaacgaccgtaccggaaccggaacgctttccatttttggtcatcagatgcgttttaacctgcaagatggattcccgctggtgacaactaaacgttgccacctgcgttccatcatccatgaactgctgtggtttctgcagggcgacactaacattgcttatctacacgaaaacaatgtcaccatctgggacgaatgggccgatgaaaacggcgacctcgggccagtgtatggtaaacagtggcgcgcctggccaacgccagatggtcgtcatattgaccagatcactacggtactgaaccagctgaaaaacgacccggattcgcgccgcattattgtttcagcgtggaacgtaggcgaactggataaaatggcgctggcaccgtgccatgcattcttccagttctatgtggcagacggcaaactctcttgccagctttatcagcgctcctgtgacgtcttcctcggcctgccgttcaacattgccagctacgcgttattggtgcatatgatggcgcagcagtgcgatctggaagtgggtgattttgtctggaccggtggcgacacgcatctgtacagcaaccatatggatccaactcatctgcaattaagccgcgaacagagtccgctgcccgagttgattatcaaacgtaaacccgaatccatcttcgactaccgtttcgaagactttgagattgaaggctacgatccgcatccgggcattaaagcgccggtggctattggcaggacgggatggtgtttgcggtttattggtgagtgggctggctgccagacggaacgcggaaactgcttgcgttaaacgactcgcctgttcttccagcgcagcggcggcggcagctgattcctgcaccagcgatgcgttctgttgcgtgacgcgatccatttccgaaaccgccaatgcgacttgatcgatgccacggctctgttcatccgatgccgatgcaatctcgcccataatgtcagtcacgcgagtgacagcattgacgatattgttcat

SEQ ID NO: 127832 - DNA, 2451 bp, Homo sapiens
atgacgccaggtgaagtacggcgcctatatttcatcattcgcacttttttaagctacggacttgatgaactgatccccaaaatgcgtatcaccctgccgctacggctatggcgatactcattattctggatgccaaatcggcataaagacaaacttttaggtgagcgactacgactggccctgcaagaactggggccggtttggatcaagttcgggcaaatgttatcaacccgccgcgatctttttccaccgcatattgccgatcagctggcgttattgcaggacaaagttgctccgtttgatggcaagctggcgaagcagcagattgaagctgcaatgggcggcttgccggtagaagcgtggtttgacgattttgaaatcaagccgctggcttctgcttctatcgcccaggttcataccgcgcgattgaaatcgaatggtccagacgtggtgattaccgtcgatttctttggcgataaaatggagtgggtggcaccgcacatgggcaccgatgttgcgctgatgctggggatcgcccatacgctggtggaaaatggttggcacgacgaagcgtttctggcgcgttgcaccacaggttatgccgtcttcgcctcttatttgctgggcgagagtgacggaatagcgaaaaccgccgaatgggcagcagagatttgtggtgttggcgcagcgaaaatccgcgagctggcggctattttccaccaaaataccaccatgctgatggcaggctggggaatgcagcgccaacagtttggtgagcaaaaacactggatgatcgtcacgctggcagcaatgttggggcaaatcggcacacccggcggcggttttggtctttcttaccattttgccaatggtggtaaccccacgcggcgttctgcggtgctctcttccatgcagggcagcttgccgggtggctgcgatgcggtggataaaatccctgttgcccgcattgttgaagcactggaaaaccctggtggcgcatatcaacacaacggtatgaaccgacatttcccggatattcgttttatctggtgggcgggcggtgccaactttactcatcatcaggataccaatcgcctgatccgtgcctggcaaaaaccggagctggtggtgatctctgaatgcttctggacggcggcggcaaaacacgcggatatcgttctgcctgcgactacctcttttgagcgtaatgatctcaccatgaccggtgattacagtaatcagcatctggtgccgatgaagcaagtggtgccgccacgctatgaagcgcgtaatgattttgatgtttttgccgagttaagtgaacgctgggagaagggcggttatgcacgttttacggaaggaaaaagtgagctgcaatggctggaaacgttttataacgttgcccgacagcgcggggcaagccagcaggttgaattgccgccatttgctgagttctggcaagccaaccagttaattgagatgccggaaaacccggacagcgagcggtttattcgcttcgctgatttttgccgcgatccgctggcgcatccgttaaaaaccgccagcggcaagattgaaatcttctcacagcgtattgccgattacggttacccggattgccctgggcatccaatgtggctggagccggacgaatggcagggcaatgccgaaccagaacagttgcagatgctcgccgggatgattgacctgatgccgtcgtcgatggcgttgctggcaccaaacgtgaactcgtatcgccgcttccagccgggaatgcgtccgtggggccataacaaccgcaccgtcgccctgcgtattccgtgcggcgaccgtcataatcaccgcgtggaatatcgcgtggcgggtgccgatgccaacccatatctggtgatggcagcgatttttgccggtattttgcatggccttgataacgagctgccgttgcaggaagaagtcgaaggcaacgggctggaacaggaaggcttaccctttccgattcgccagagcgatgccctggacttgtgtttcagcgacatacttgtatctccgaacatgtacattgacgatggcatgaaacgcgactggccagttatgaaacagtgcgcgctgcaacgcagatggcgtatattgccagatcactacggtactgaaccagctgaaaaacgacccggattcgcgccgcattattgtttcagctacgcgttattggtgcatatgatggcgcagcagtgcgatctggaagtgggtgattttgtctggaccggtggcgacacgcatctgtacagcaaccatatggatcaaactcatctgcaattaagccgcgaaccgcgtccgctgccgaagttgattatcaaacgtaaacccgaatccatcttcgactaccgtttcgaagactttgagattgaaggctacgatccgcatccgggcattaaagcgccggtggctatctaa

SEQ ID NO: 127833 - DNA, 1613 bp, Homo sapiens
actggaaactggcgttaggttttagcgttgaacaggctgatggtcgcattacgccaccgccattcccggtactgctgtggctgtggaactcggtaaaggtcgccgggatttccccgattggcattgtggcgctctccaccacctgcgcctacgctttcgcccgtatgcgctttccaggcaaagcgacgctgctgaaaggaatgctgattttccagatgttcccggcagtactttcactggtcgcgttgtatgcgttgtttgatcgtctgggtgagtacattccattcattggcctgaatactcacggcggcgtaattttcgcgtatctgggtgggattgcgctgcatgtctggaccatcaaaggctatttcgaaaccatcgacagttcgctggaagaagctgctgcgctggatggtgcgacaccgtggcaggccttccgccttgtcctgttgccgctgtcagtaccgattctggcggtggtattcatcctgtcgtttatcgctgccattactgaagttccggtcgcgtcgctgttactgcgtgacgtaaacagctacaccctggccgtggggatgcagcaatacctcaacccgcaaaactacctgtggggtgactttgccgccgctgccgtgatgtctgcattaccgatcaccatcgtcttcttgctggctcaacgctggctggtcaacggcctgacggcagtcgctacattaggtggtttattatttggctacgacaccgccgttatttccggtactgttgagtcactcaataccgtctttgttgctccacaaaacttaagtgaatccgctgccaactccctgttatgtccggaaaatgaccttaaggcatttatcgcttttccgtcatcactttatttcgacgatccaaactggataccccctttattcattgaacgcaacgagcatttgtctgcgaaaaatccggggacggaccatatcatctggcaggcgtgggtggcaaaaaaagcggggcagatagttgggcgtattaccgcgcaaatagataccttgcaccgcgagcgttacggcaaagataccggtcatttcggcatgattgacgccattgatgatccgcaggtttttgccgcgttgtttggcgcagcggaagcgtggttgaagtcacaaggtgcaagtaagatcagcggtcctttcagcctgaatatcaatcaggaaagcggattactgattgaaggttttgacacaccaccctgtgcgatgatgccacacggcaaaccgtggtatgccgcgcatattgaacaactgggttatcacaaaggcattgatttactggcgtggtggatgcagcgaaccgatctcactttctctccggcgctaaaaaaactgatggatcaggtgcgcaaaaaggtgaccattcgctgcatcaatcgtcagcggtttggcgaagagatgcagatcctgcgtgagattttcaactctggctggaagcacaactggcgatttgtgccgattaccgaacatgaatttccgaccatgggccgaccacttaaatatctggtgcccgacgatatgatctatatcgctgagattgattctgcacctgcgcgtttattgtcggcttgccaacaataa

SEQ ID NO: 127834 - DNA, 1629 bp, Homo sapiens
atggacatttggctttgtgagagttatgtggccgatcaggcaatcaggtgcggcatgggttctgcggtggaggtgcagccgaagaagaggcggctagagcgcgacaaagaagaggcagatgtatggaggcagtgggctggaactggggcacgggggctgtgccagactcgagacaaagctggcagggcactaggcgagagcgacgcgagaagcgagctggctgcgacagcagctgcagccgcgaagactgactggagaggctgccctggctacactcggagacgacagcggaagacaggacgacgcacgcgacctccagcgatagccgaggtctgcgcgcgcggcgcccgcgactggcgccgaactggcgaagagaagaagcagagctgcgcaggactgcgtccgacgacacagcacacgaaacgagacctggagcagcagacagctgcacgggaggacctctcatgggactacctctcctacaccctggccgtggggatgcagcaatacctcaacccgcaaaactacctgtggggtgactttgccgccgctgccgtgatgtctgcattaccgatcaccatcgtcttcttgctggctcaacgctggctggtcaacggcctgacggcagaggtcgctagcagccgaaagcactggaacaagttctgtgcatgcggagctgacgagaacggagcaccgaactggaagatagtactcatgagacataaacgctccctctgcgagaagcgtagtgacgcgtcgggttcacaacgacatgagcaccggagagcagcaggtgcgaagcctgaaggagccgagtacataggcgaactggcagcagccatcagcgacatcggtcgacgagtgaagaccagcgatgagccagcaagggagaccaacagcaacgagcagccgcgggcgagagcgagcagctgcaacagacacggaccgccagcgagcgcgggcctccgcgcacaagcaacgaactgcgatcgagacgcaaccacagcgacaagcatgcgaccccacggaacagcgggagccagctgccgcaatgcgagcaacagcaacgtgctgccggctgcagcaactggctgcgagcgaccaccagccagcagcgagcgagcaggcagcatgcaagcagccggcaagacggcggcaaccgaccagccagcagaacagcagacacgcgtggacaacccagcagacaccagcgaacgagcagccaggcgagcagcgcacgaaccaacgcaacgtgacaggccagcagccacgcaagacaacaaggcgcggcagacagccggcccacacgagccggaaggaccgagccgaacaagccagcgccagccagaccagcgcgcacagagcaaacgacaagcgagcagcgaagcgaggatcaacgagagacggacgagaggagacgaaggcacggcagagcgcaggcaacaccggagagagcgaggcgcacacacggacaaacggaaccgagatgggagcacgctgccgacggctgagacggacactcgcgacaagacgggagccttgccctgtcatcggctgactgcccgaccaggagctcactcgctcgccacgacgctctgcgcgagagacgtgcggcaccgagcaggctag

SEQ ID NO: 127835 - DNA, 119 bp, Homo sapiens
cgcagatagctcgaaaagagattgccgcaatcgccagtaaaaaaggggctgaataccgtcggcgctatgagatgctagacgctattcagccacaaatggccacgatgtttcgcggttaa

SEQ ID NO: 127836 - DNA, 5421 bp, Homo sapiens; identical to SEQ ID NO: 123348

SEQ ID NO: 127837 - DNA, 933 bp, Homo sapiens
ttattgcgttggttgttgtttgacgacattaatcatccacggtacgccaaatttatcggtgactttgccaaagccatgcgcccagaaagtttcctgccaggccatttcgatttttccgttagcggcaagattgtcaaaccagcgttttccttcttcgacctgttgcgaatcgagcaccagcgtaaagccggagtagctggcttttcctgacggcatggcatcgctcatcatgatgtcgcttccggcaatgcgcacattggcgtgggcgatggcggtatcgggaaattgcattccggaagggcagttctcggcgctgtcctgcgctgattttggcatttcgccgaagctgattggtatagagcagttccgcgcccaacgtacgttgataataggcaatcgcgtcggaacagttaccggccaacgagagttcgaaatttatacggatgagaggcggcctgataagacgcgcgagcgtcgcatcaggcagtcggcactgttgccggatgcgggcgtaaacgccttatccggcctacggagggtgcgggaatttgtaggcctgataagacgcgcaagcgtcgcatcaggcagtcggtaccattgccggatgcggcgtaaacgccttatccggcctacggagggtgcgggaattcgtaggcctgataagacgcgcaagcgtcgcatcaggcagtcggcaccgatgccggaactacctggtcccccggtgattgaaacttcaactaggaacttcaaagaaaactgggaagaaaacttctgttatctggaattcacaattgccaaattaggaaccaccaggaaaagaatacaggaaaactgcaaagggcagcccctgggtcctgcgggagttcaggtgtctctgagaaacactgggaccgaagcaaagatccagtccacagttacacagcctggcggaaa

SEQ ID NO: 127838 - DNA, 1000 bp, Homo sapiens
gataatacttttaaactcggccccggcgtggatgtgaactatatgctgcacacgcagaataagtgaggttgatgtttggccgcgccaatgcctgatgcgacgcttgccgcgtcttatcaggcctacaaatgctccccgtaggccggataaggcgtttacgccgcatccggcgatattagtttacgccgttaacagattagctatcgtgcgcacaccaagtcccgtagcgcccgcagaccactgttcaaccggcgctttacgtcgccgagcagtcgatatgcagccagccttgctgatagttctcaacaaagtgcgacaggaagcccgccgccgtgctcgcgcctgccggatacgccgcgcttccggtattgttcagttcggcaaagttagacggcagctggctgcggtggaactccgccagcggcagacgccagaacggttcgttctcctgcgcggcactcgccagcaagcgaccggccagcgcatcgtcaaaactgaacagcgcgtgataatcattacccagcgcagttttcgccgccccggtgagggtcgccgcatcaatgatcatttccggtttctgcgcactggcatcaatcagaccatcggcaagcaccagacgcccttcggcatcagtgttcatcacttcaacttttttaccgttgcgatagaacctgcacaggaaagcgacgagctgatcgttaaagatgctaacggcaatctgctggctgacggcgacagcgttaccatcattaaagatctgaaggtgaaaggccggataaggcgtttacgccgcatccggcaacggtgccgactgcctgatgcgacgcttgcgcgtcttatcaggcctacaaattcccgcaacctccttaacagctgctccgcggcgcccgaggcccggaccaccgatcccataaagcgctacaacaggcccacaaacgtggggaacagcggaaccagcgaccgagccacaaagaggatccagccggaacccacagactaa

SEQ ID NO: 127839 - DNA, 858 bp, Homo sapiens
atgaatggcactatttatcagcggatagaagacaatgcgcatttcagggagttagtcgaaaaacggcaacggtttgccaccatcctgtcgattattatgctggcagtttatatcggctttattttactgatcgccttcgcgcccggctggctgggcacgccgctgaatccgaacaccagcgtcacacgcggtattccaattggtgttggagtgattgtgatctcctttgttctcaccggtatctacatctggcgggcgaacggcgaattcgaccgtcttaataatgaagtcctgcatgagcggggccgtagagcgccagccaacgaactggcaggcgattcttatgttcctgattttcgtcgtgtttacgctcggcattacctactgggcatcaaacgcgtacgttctcgccggataaggcgtttaccccgcatccggcaacggtgccgactgcctgatgcgacgcttgcgcgtcttatcaggcctacaaattcccgcaccctccgtaggccggataagggcgtttacgccgcatccggcaacagtgccaactgcctgatgcgacgcttgcgcgtcttatcaggcctacaaattcccgcaccatccgtaggccggataaggcgtttacgccgcatccggcaatcgggtgcacgatgccctgatgcgacgcttgcgcgtcttatcaggcctacaaattcccgcaccctccgccggataaggcgtttacgccgcatccggcaatggtgccgactgcctgatgcgacgcttgcgcgtcttatcaggcctacaaattcccgcaccctccgtaggccggataaggcgtttacgccgcatccggcaacagtgccgactgcctga

SEQ ID NO: 127840 - DNA, 1605 bp, Homo sapiens
atgcagtttgccgtcagcggcaaccggttcagtctggaaaccggaactatcaactttttgctgggcaacgaaacgaccatcttcgacgttaatccagtgcagataaccttcactgtcaccgaccaccaggttgccattatacagcaccggagaagtcagcaggcgatgcagcagatcgctttgtgtccacagcgtaacgccgccatcaatggtcaacgccatcacccggtcattttgatcgaccagatagatgcgattgccgtcgacgatgaaatcattcaccgaacccagttcgcgtttccacataatctgaccactgcgcagatcaagcgccgtcaggttaccattataccccagcgcgaaaacaacgccgttaacaacgacgggagtcgtgtcaacatcgctcagacggtcaatttcggggatcctctagagcgcctcagaaaggagctcaccgcagaggaaatagccaacagcgtcagtcacggcattgggttggtgtttggtatcgttgggctggtgttgctactggttcagccggtggatcttaatgccagcgccacagcgataaccagctacagcctctatggcggcagtatgatcttgctgttcctcgcttcgacgctctatcacgccattcctcatcaacgggcaaaaatgtggctgaagaaatttgaccattgcgctatttacctgttgattgccggaacctacacgccgtttttgctggtggggctggattctccgttagcgcgcgggttgatgattgttatctggagcctggcattgctgggtattctgtttaaactgaccatcgcgcaccgattcaaaattttatctctggtgacctatctggcgatgggctggctgtcgctggtggtaatttatgaaatggcagttaagctcgcggcgggcagcgttaccttactggcggtaggcggcgtggtttattcgctcggggtgattttctacgtctgcaaacgcattccatacaaccatgccatctggcacggcttcgtgctcggcggtaacgatgctatcgcctggggtaaaaaaaatggcaagacccaggaccaacaggtggtcgcagcgtgtgacaaactgccggtcaatttcggtgctgaaatcctcaaaatcgtacccggtcgcgtgtcaacagaagttgatgcacgcctctcttttgataaagaaaagagtattgagaaggcgcgccatctggtggacttgtatcagcaacaaggcgttgagaaatcacgcattctgatcaagctggcttcgacctgggaaggaattcgcgcggcagaagagctggaaaaagaaggtattaactgcaacctgacgctgctgttttcttttgcacaggcacgggcctgtgcggaagcaggcgtttttctgatttcgccgtttgtcgggcgtatttatgactggtatcaggcacgcaagccgatggacccgtatgtggtggaagaagatccgggcgttaaatcggtgcgcaatatctacgactactataagcaacaccactatgaaaccattgtgatgggcgcgagcttccgtcgcaccgaacaaatcctcgccttaaccggctgcgaggggatcctctag

SEQ ID NO: 127841 - DNA, 591 bp, Homo sapiens
atgaaacaatgcaacgcaacgggagaaataacatggccgaacatcgtggtggttcaggaaatttcgccgaagaccgtgagaaggcatccgacgcaggccgtaaaggcggtcagcatagcggcggtaattttaaaaatgatccgcaacgcgcatctgaagcgggtaaaaaaggcggtcaacaaagcggtgctgaccatcgcgcaccgattcaaaattttatctctggtgacctatctggcgatgggctggctgtcgctggtggtaatttatgaaatggcagttaagctcgcggcgggcagcgttaccttactggcggtaggcggcgtggtttattcgctcggggtgattttctacgtctgcaaacgcattccatacaaccatgccatctggcacggcttcgtgctcggcggtagtcgaataccgcagcggctcgatatgcaatgtattcgcatcgtcgcgtacgcggaagatgctatccggttccatatcgttattcatgacgacctgtaccacgacctgaccatcttccagttttaccgcagccagtaccgcaccgggacgacgccagttctcgcccattttcagctctaa

SEQ ID NO: 127842 - DNA, 2772 bp, Homo sapiens
atgatcgaaccttttaccattgcggctaacgtaaccggacatggtcaaccgactgaaaatgataccgttctggtttatggtgccggtccaatcggcctgacgatcgttcaggtattaaaaggcgtctataacgttaaaaatgtgattgttgccgatcgcattgatgaacgactggaaaaagcgaaagagagcggggctgactgggcgattaataacagccagacaccgcttggcgagattttcactgaaaaaggcatcaagccgacattaattatcgatgcggcttgtcatccttctatcctgaaagaggccgtaacgctggcttctccagcggcacgctttgaacagtggttacatatcgttagtgtatttgagtcaaatgtgaccaccggcatcatgcagtacgggtatcggatagtggaagatatggcaagcgggttgtcgcattatctcgccgatcagggatttgattcgctgcaggagatggtaggtctggcgaataacaatattgtcccggcggaagatttagaccgcagttatattgtctatccccgtatcaatcttgataaatgtgttggctgtggacgctgttatatttcctgttacgacggcggtcaccaggcgatggaatggagcgagaaaacccgcacaccgcattgtaataccgagaaatgtgtgggttgtctgctttgtggtcacgtctgcccggtgggttgtattgagctcggggaagtgaagtttaagaaaggcgagaaagaacacccgagacgcatccggcatttggttcctgtcgccggatgcggcttgaacgccttatccggcctacaaaaccataccaatcagtatgttgagcttattgtaggcccggataaaacgccccagcgcttgcatacgggatttggcttcctggtggccggatactgcgttgaacgcctttatctggcctacaaaacccgcctagacgaactctactatggacccgcggctttactgcgcggctggggctataacgtcgcgctggcgaacagcgggcgacaggcgttggagcaggtgcgggaacaggtttttgatcttgtgctttgcgatgtgcgaatggcggagatggacggcatcgccacgctgaaagagatcaaagcgttaaacccggcaattccggtgctgattatgactgcgtactccagcgtcgagacggcggtagaggcactgaaaactggggcgctggattatctcatcaagccgctggatttcgataacctacaggcgacgctggaaaaagcgctcgcgcatacgcacagtattgatgctgaaacacctgcggtgactgccagccagttcgccctcattctttacgaagcccagcgtcagcggcaaaatgcaggcatgtacctgcgtgaaaacagcatgttgccggaagcagagcaacaacgcctgttgtttgaaggcggctatccggtgctggcgaaagtcgcaaaacgcaaaggcctgccttatccccacgtcaatcagcaaggcgagatcgaagctgatgccgactggtgggctactatgcaggctgcaggttccctaacgggcgttggcgcagcacttagtaacaaactggcgaaaatcaacctgcataccgtgcaggatctactcttacaccttcccctgcgctacgaagatcgcacccatctctaccccatcggagaactactgccgggcgtttatgccacggtggaaggcgaagtgctgaactgcaatatctccttcggcggtcggcggatgatgacctgccagatcagcgacggttccggcatcctcaccatgcgctttttcaatttcagcgcggcaatgaaaaatagcctggcggcgggccgccgtgtactggcttatggcgaagcaaagcgcggtaaatatggtgcggagatgatccacccggaataccgcgcagatccgcccattcgtgctaaagccgcggaaattgccgttgcgcatgctcattatctgagtatcgagttttatcgaattgtccgcatcgacccgcatgccgaagaattcttgagtaatgaacaagttgagcggcagttgaagagtgcgatggaacgctggattattaacgtgctttctgcccaggttgacgatgtcgaaaggctaatacaaatccagcataccgtcgcggaagtgcatgcccgcataggaattccggtagaaattgtcgagatggggtttcgggtgctgaaaaaaatcctctatccggtgatcttctcttcggattattccgccgcagaaaaacttcaggtctaccatttctcgattaacagtattgatatcgcgatggaagtgatgactcgcgcgtttaccttctggcgtttgttattccggtatggctggcgaatatcctcttctctgttatctggctgcgttacttccgccaggggccggtggaatggctctggcgtagtgaatatgatcaccattcgtgatgtagcgcgtcaggctggcgtctctgtggcaacggtttcccgggtgctcaataacagcacgctggtcagtgccgacacgcgtgaagcagtaatgaaagccgcgagtgagctggattatcggccaaacgccaatgcccaggcgctggcaactcaagttagcgacaccattggcgtggtggtgatggacgtttctgatgcgttttttggcgcgctggtaaaaacggtggatctgggtcctcagcagcatcagaaatacgtgctaatcggcaatagctattatgaagcggaaaagcaggccttaattgattga

SEQ ID NO: 127843 - DNA, 1534 bp, Homo sapiens
tcaaagcaagcgttcgttaaaagcttgcgttagagcgtgcgcaagagcctcgtgtagcaagtgctctgtgcgatacagaggtatcttcaggcgagtgactgcggttccggtgctgctggcgtccagggaagcgtgcgcgctggctttttccgcgccatctttcatcacctgttgcaggaaggcttcatcgttgcggaaacggtgatagcgttcctgcaattcagtcagcataccggaaacggcatcagccacttcacctttcagatgaccatacatcttgccttcgaactgtttttccagttctgggatgctctggcccgttaccgagcagactacatgcttcactaagttgccctcatttatcccgggagccagcacactttccaggatgatgtatgcgcccgtcttcacccaagtatcatagaattccatacgcaggtaatttgaagatccagatttcacattcatctgaggtgaacaggtcccgtttattgagtatgaaataggaatatccagattcctcgcgagtatggaattgtatgattctctgtgacctgccagcagttccagcacttcatccacgctggtggtgtgtgccagacgctcgatgacggactcatcatccagtgcattggtcaggctggtgataacctgaatgtgctcgttgttacgggcagcaataccaatcaccagacgggcaatgtcatcttcttcttcaccgaagcgcacgccttccgggtactggcagaacacgacgcccgttttcagtacgcgatctttcgcttcaaccgtaccgtgtggcaccgcgatagactcacccagataagtcggggtcagtttttcacgatccagcatcgcctgaacgtattccggctcaacgtaaccgcctttcaccagctgctcgccagcaaaacgaatcgcttcttctttggttgccgctttgcgaccgaggaagatgttctccgcgcctagtttctcttcgttgccgtgtggcgtgggcagcaccaacgttcggacccgatcagggatttgattcgctgcaggagatggtaggtctggcgaataacaatattgtcccggcggaagatttagaccgcagttatattgtctatccccgtatcaatcttgataaatgtgttggctgtggacgctgttatatttcctgttacgacggcggtcaccaggcgatggaatggagcgagaaaacccgcacaccgcattgtaataccgagaaatgtgtgggttgtctgctttgtggtcacgtctgcccggtgggttgtattgagctcggggaagtgaagtttaagaaaggcgagaaagaacacccggtaacgttgtaaaaccagagacgcatccggcatttggttcctgtcgccggatgcggcttgaacgccttatccggcctacaaaaccatacaaatcagtatgttgagcttattgtaggccggataaaacgcgccagcgttgcatccggcatttggctcctgttgccggatgcggcgtgaacgccttatccggcctacaaaaccacaca

SEQ ID NO: 127844 - DNA, 999 bp, Homo sapiens
atggctggcttcctcgggcttgccctcctaaggcgcccgcttcgaacgctttttccacgtacaccgagtcccttggtacaggcaccggtcggccctacgtcctcgcgcatacagccggttcggtgcgttaagccgcgctgtttcccgatagcgatttctggttttgacagtggcttctctacctttgctcagggctttgtcgcgctggggagtttccgtctctcttacatcaccttctacgcgttgattgcggtggcgttcgtctgggtgttgtggaacaaaacccgcttcggtaagaacatttttgccattggcggtaacccggaagcggcaaaagtatctggtgtcaacgtcggcctgaacctgctgatgatctacgcgttgtctggcgtgttctatgcctttggcgggatgttagaagccggacgtatcggctctgccaccaacaacctcggctttatgtatgagctggatgctatcgcggcgtgcgtggtaggcggtgtatcgttcagcggcggtgtggggacggtgattggcgtggtgaccggggtaattatttttaccgtcatcaactatggcctgacgtatatcggcgtaaacccatactggcagtacatcatcaaaggggcgattattatcttcgccgtagcgctggattcactgaaatacgcgcgccggataaggcgttcacgccgcatccggcagtggtgcaccaatgctggatacttacatcaacgcccccataatcttcaactccagctcatccggcacttcgttatacgacagcacatgcagccccggcgcaaacaaccttgcataacgcgccagcaaagggcgcagctgcggtggcaccagcagcaccgggtctttccccgccgctttcatctgctctttcacctgtggcatcgtactctggaactggttgagcatattcggatcgaccggcacgctgtcgagcatcactttcccgccctgttgcgcctgattcaccacagttag

SEQ ID NO: 127845 - DNA, 989 bp, Homo sapiens
ctacaatgggctggtgtagaaactgctggctttttgtttcccccagcccttgggaaccaaagtaatcttgataaatgtgttggctgtggacgctgttatatttcctgttacgacggcggtcaccaggcgatggaatggagcgagaaaacccgcacaccgcattgtaataccgagaaatgtgtgggttgtctgctttgtggtcacgtctgcccggtgggttgtattgagctcggggaagtgaagtttaagaaaggcgagaaagaacacccggtaacgttgtaaaaccagagacgcatccggcatttggttcaaaaccatacaaatcagtatgttgagcttattgtaggccggataaaacgcgccagcgttgcatccggcatttggctcctgttgccggatgcggcgtgaacgccttatccggcgcgcgtatttcagtgaatccagcgctacggcgaagataataatcgcccctttgatgatgtactgccagtatgggtttaccccgatatacgtcaggccatagttgatgacggtaaaaataattaccccggtcaccacgccaatcaccgtcccacaacggcccccacacagagttagttctctgtttgaacgcagcccagtctgcaaataaacacggcgcatactggcgtgaatatcgcggatgcgttcgaggacagaagaaccgacaggcggattcttcagccgctcatcgtccatcacaaaaccttagaccagcgtggccgtactataggagagcagggtggacgcgtgtagacccgttgaacgagctgtgcgaagagaggactacgatgtgcgtcaggaccctcagctgcaggtctgtggagtttgcgtggaggtctgctagacaataccattcagaccataggcagggcaaggacttcatgactataacaccagaagcgaatgtggccacagtcaatagccccaatgaacttggacgaagactgggcgcagtcgttaaactttaa

SEQ ID NO: 127846 - DNA, 1335 bp, Homo sapiens
atggatggtcgtctggacgctgttgtattcactggtggtatcggtgaaaatgccgcaatggttcgtgaactgtctctgggcaaactgggcgtgcttggctttgaagttgatcatgaacgcaacctggctgcacgtttcggcaaatcaggcagtcaggcggctcgcgtcttgcgcgataaccagttcttcgttggttgggataaccaccgcaggacgggtaccttctttgttgatgaaaccagatttgccgaaacgtgcagccaggtgctgttttttacattggcaacaaggtcaatatctgtccagcaatggctggacaggcgatgcaaaacagtaatgacagaaacagaattattctcttcatcagcttacgttgagtgggatgcatatatagttcctgaatctgcggcgaaacggaaactgtgccgcactcttacccgcatgaccataaacaaagtgagactggataggacctacagggaggaaatgcagatcggtagccgtggatctctagagtcatctttggatctgatgaatactattattaatatgatcgccgcaggtccatgcttccgccgttattacatcctgccgacttatccgagcgatctggcagcgattcagtttgaccgttccggcaccacccacatcggtcgcttcgtcatcaaccacagctttattctgccggggttgattggtgtgagcgtatcgtgcgtcttcggctggatcttcgccgcgatcgttgccgacttcgacggcgaaaccatcatgaaagtggaaccagaagccctgcgccctgctggcgcagcaagcctttcacgacgcttcttttatgctccgcccggcacaccagaaacaggttgcggctattcttcacgatccagaagccagcgaaaacgacaagtacgtggcgctgcaattcttaagaaactccgaaaatcgcccaaaggcgtgtcccgacctgccagcataccgcacgcgatcatcgtcggccagcgcgtgtggaccggcggcggtgatgaagaaacgctaccgggttgcaccactacagtgactcaccgcttcactaaaaatctgcgtcatcacgtagaaaatgccgatctattgatcgttgccgttggcaagccaggctttattcccggtgactggatcaaagaaggcgcaattgtgattgatgtcggcatcaaccgtctggaaaatgtcgccatgttactcatcctgttgatctcgctcggtaccctggatccgctagagtcctttgattcgctgccgtggtatcagataatcaccgattatctgtggcatatcacgctgccggtgctggcttattggtag

SEQ ID NO: 127847 - DNA, 3288 bp, Homo sapiens
atgccgatcacattacggcggtcagtggaaaaagagcagctgattgaaatagccaatacgataatgccgtttggcaaatacaaagggcgtcgcttaatcgacctgccggaggagtatctgctgtggtttgcccgcaaagatgagttcccggcagaagctcgctacacccacatcgacttgcacgtaccagccccacttctcgtcatgttcacgctagacacgcgccagagcgcctgtgaccggaacccgcatttgcccatacacgtctgcagtagctggacatcgccgaaatgcgcccctcgattgtggacacgcgctctacttccacgcacacggacgccgccatacgccacgggcacgaccatcgggtcaagagcatcctggtttgtaacgtttcctgatgcgtcgttttaccgccggaaagcgccccgccaagaatttcacacatcgctgcaagggcgtagcctttatgttcggcaaaggtcaacagcgaacccaaccgaaattacccgtcgtacactgatccacaaaatggtggaagtgaacgcctgtttaaaacagctcgataacaaagatatcgctgactacgaacacaaccagctgatgcgtcgcctgcgccagttgatcgcccagtcatggcataccgatgaaatccgtaagctgcgtccaagcccggaagccataatgacggaacaagaaaaaacctccgccgtggttgaagagaccagggaggccgtggacaccacgtcacaacctgtcgcaacagaaaaaaagagtaagaacaataccgcattgattctcagcgcggtggctatcgctattgctctggcggcgggcatcggtttgtatggctgggacagaaatatattgaaaacgagggtgtggcaaactaaactcccgctgatcgccattttgcgcggtattacgcccgacgaggcgctggcgcatgttggcgcggtgattgacgccgggttcgacgcggttgaaatcccgctgaattccccacaatgggagcaaagcattcccgccatcgttgatgcgtacggcgacaaggcgttgattggcgcagttgggcgggcagcgagagttgcgagaggaatgctttactgtaatgcggcagcgaattatcgtagttacgtgatcgacacaatgcaccagctgagtcctggttattcagatgtttatgctgctgaccggggcgctgattattatcctgaccaaaaccaatcccgcgtctatctcaaaaaacgaagtcttccgttccggtatgatcgccatcgtggcggtgtacggtatcgcatggatggcagaaaccatgttcgcgaagcgattcgcgtggtgctggcgattatcgcctttgcctccatcatcttcggtaacctgatggcgctgagccagaccaatatcaaacgtctgctcggttactcatctatctctcacctcggctatctgctggtagcgctgattcgctgcaaaccggcgagatgtcgatggaagcgcagcctcggcgcgttcggcgtggtcagcctgatgtccagcccgtatcgtggcccggatgctgattccctgttctcttaccgcgtgatgacggtgatgatgctgtctctggccggtaacccgatgaagcttatttatcgaacagttatacgtgctagcggtcgatgtctagacacacttgtagacgcacagactttcgcggctaatgcagcaaactatgatacctggacttatatcgataatcccgttacagcacttgattgggatcatatggataaggcaggcactgtagatggcaactatgtaaactatagtggttttgtctattacaacaacaccaatggtgattccgatcagtcctttagcggcgacaaggacatgatttttgccatcctgaagcagcacgcaaagagtggcgaagatatctttggtgatggcgtacttgatgtaatgcaggatggctttggtttcctccgctccgcagacagctcctacctcgccggtcctgagggattaaaggtcgcggttattgcggtcgatcccagcagcccggtcactggcggtagcattctcggggataaaacccgcatgaatgacctggcgcgtgccgaagcggcgtttattcgcccggtaccatcctccggtcatatgggcggtgccagtcagcgagcgcgggaattaatgctgttatgcgaagcagcgggttatgacgtagtgattgtcgaaacggttggcgtcgggcagtcggaaacagaagtcgcccgcatggtggactgttttatctcgttgcaaattgccggtggcggcgatgatctgcagggcattaaaaaagggctgatggaagtggctgatctgatcgttatcaacaaagacgatggcgataaccataccaatgtcgccattgcccggcatatgtacgagagtgccctgcatattctgcgacgtaaatacgacgaatggcagccacgggttctgacttgtagcgcactggaaaaacgtggaatcgatgagatctgggacctgcaggcatgcaagaacaaactgaaaaacccgccacaaagcctgaaagaactggttgagagcgatcaaaactggcgggtgatttatcaggatccgcgcaccagtacaccggggctgggtctgttgctatggatgcaaaaagtctatggcgatgacgccccacaagcctggcagaaactggcgaagaaaacggtcacggtcaccaaaggctggagcgaagcctacggcctgtttttaaaaggtgaaagcgatctggtactgagttacaccacctctccggcttatcacattctcgaagagaagaaagataactacgccgccgcgaacttcagcgaaggtcactatctgcaagtggaagtcgccgcccgcaccgctgccagcaagcagccggagctggcgcaaaaattcctccagtttatggttctccggtttccagaatgcgactgccagccatcgtggcgactcgataaaacaaaatccatcgcgttctggattgacctgcagagcaagagcatcatgctggaactactttttgtgattggcttttttgtcatgctgatggtcaccggcgtttcgttgctgggcattatcgccgcgctggttgtggcgacggccattatgttcctcggcggtatgctggcattgatgataaagttgctgccgtggcaactactggcgattgcggtggtaaggtcccgggtccggaggggaaacttacccccccgggtcgaagaaccccaaggaaagtatttcgggttacggcaaccgtaa

SEQ ID NO: 127848 - DNA, 2004 bp, Homo sapiens
atgacgcaacaaatcaccctcattaaagacaaaattctctccgataactatttcaccctgcacaacattacttacgatctcacgcgcaaagacggcgaagttatccgccataaacgtgaagtgtacgatcgcggcaatggtgcgacgatcctcctgtacaacacgaagaaaaagaccgtggttctgattcgtcagttccgtgtcgctacctgggttaatggcaatgaaagcgggcagctgattgaaagctgcgccgggctgctggataacgacgaaccggaagtgtgtattcgcaaagaagcgattgaagagacgggctatgaagtgggtgaagtgcgcaaattatttgaactgtatatgtcgccaggcggtgtgactgagctaatccacttttttatcgccgaatacagtgacaatcagcgcgctaacgcccgtggcggtgtcgaagatgaagatattgaagtgctcgagctggtccagtgcggcgggcagatcggtgtaccagataccgtgcttgctgttttcgccaccggtattggttttttggctatgtccgtgaccaaaccccggattaacgcgcagccatacccgatgccctggcgaaacctggcccagttggtcgagcatatcaacagaacccgcattcaccggaatttgcaattcactgacgcgttcaagcgtcgcctgatcgataacatctgccgtaaaaacaatatcatcgggacccacaccgggcagtcgaaattcagcgggcaaacgcaacagattttcggcgagatcccccaggttgttcctgcctctgaacttgctgccgccatgaagcagattaaagaactccagcgcctgctcggcaagaaaacgatggaaaatgaactcctcaaagaagccgttgaatatggacgggcaaaaaagtggatagcgcacgcgcccttattgcccggggatggggaacgaaccgatgactggatggatggccgccgcagtcgtcacactgatgatacggatgtgcttctccgtatacaccatgttatcggagagctgccaacgtatggttatcgtcgggtatgggcgctgcttcgcagacaggcagaacttgatggtatgcctgcgatcaatgccaaacgtgtttaccggatcatgcgccagaatgcgctgttgcttgagcgaaaacctgctgtaccgccatcgaaacgggcacatacaggcagagtggccgtgaaagaaagcaatcagcgatggtgctctgacgggttcgagttctgctgtgataacggagagagactgcgtgtcacgttcgcgctggactgctgtgatcgtcttagttccagagggaggaatgctgccgccaaaagacagagggatgatccattgcgctggaagtttaggctgccatctggtggcaccaagctcctcatgcctctggatcaacaggctcccgctagattcgcgccgtttgtgacctgtacactgaccattctttgcggtacgggtcatgtggtttacaccattctgccgatcatctacgacgtcgccattaagaacaacatccgtccggaacgtccgatggcggcaagttctatcggtgcacagatggggattatcgccagtccggtgtcggttgcggtcgtgtctctggttgcgatgctgggtaatgtcacctttgatggtcgccatcttgagttcctcgatctgctggcaatcaccattccatcgacgttaatcggtatcctggcgatcggtatcttcagctggttccgcggtaaagatctggataaagacgaagagttccagaaattcatctccgtaccggaaaaccgtgagtatgtttacggtgataccgcgacgctgctggataaaaaactgccgaaaagcaactggctggcaatgtggattttcctcggggcaatcgctgtaatcgcccttcttggtgctgattcggacctgcgttcatccttcgggggaaaccgcttgcgatggttctggttattaaaatgtttatgctga

SEQ ID NO: 127849 - DNA, 921 bp, Homo sapiens
atgataagacgcgtaagcgtcgcatcaggcaatgaatacccaatgcgaccagcttcttatatcagaacagccccaacggtttatccgagtagctcaccagcaggcacttggtttgctggtaatgctccagcatcatcttgtgggtttcgcgaccgatacctgattgtttgtagccaccaaacgccgcatgtgccgggccagattaccgttgcggctccagacgcccgcgcccaggccatattgcgtatcgttcgccagctccagcgcttcttccatcgttttgaaggtggtcaccgccagcaccgggccaaaaatctcctcctggaacacccgcatattgttctgaccaaacaaaatcgtcggttcgaggcagatgcgctccagcctgatccagcatggcaacaggggacgctttccaacggtttacagtggcaagtgctgaccaccccccagcgtcccagcgatcgtgttgaaattcgcctgctggttaataccggttcgctcgccgaaagtacacaacagagcggttacagtcacgccatccctcgtattgcgctaacgcaaagcggtggccttgacgcagcacaggcgcgttcattgtggcagcaggggatcgaccctaaacgcccgatgccgccggtaattgtctcttatgacaccacgctgtttaatctgagtttgcccaataaccgtaacgatttgctgaaagaagcgctctcttatctggcaaatgccactggcaaattgaccatcacaccagaaaccatcaaccacgcgctgcaaagtcatgacatggtggcaaccctggtctttcgatacttaaagaagggctggtggcgctatcgtctgaaagggtcaaccttgttaagtcacgatcctgcccatccgctgaaacaacccgttgaagcggaaaaaatttaa

SEQ ID NO: 127850 - DNA, 1371 bp, Homo sapiens
atgtgccccattgaggaaactgcgtcatccttcggcggcaaaccgctgtcgatggtactggttattcagatgtttatgctgctgaccggggcgctgattattatcctgaccaaaaccaatcccgcgtctatctcaaaaaacgaagtcttccgttccggtatgatcgccatcgtggcggtgtacggtatcgcatggatggcagaaaccatgttcgcaccggcttgctacggttattacatcctgccgacttatccgagcgatctggcagcgattcagtttgaccgttccggcaccacccacatcggtcgcttcgtcatcaaccacagctttattctgccggggttgattggtgtgagcgtatcgtgcgtcttcggctggatcttcgccgcgataaagcgtgacgccgccgccggacgtgcgaaagaaaatgtcatctttcatcacttcccgttccagagcgtcaaggctgatatcgcgaccaatccgttcaaacgccccggaggggcattcatccgcatcacgcaaacatttcgcacagtgcagacatttcgcctctctgcgtaccgtctggattttgccggagatcgactccggattagcacaccacgggcaaagatgcggacagcctttaaaaaagaccaccttcgacaaagaaggcgctgtatccggcaacgcgcaccaccagcccggcataatcttgtgggcgctgttgcgcttcccgcaacggtcgccggagtgaatttcacgttcagcaacgtaccgttagacagcagcgtgttatcgagcttactgactgacttcagtaccgctgttggcagcattgttatgctggcggtgatcatgggtctgatgctggcgttcgatatgggcggtccggttaacaaagtggcctatgccttcatgctgatttgcgttgctcagggtgtttataccgtggtggccatcgctgccgtgggtatttgtatcccgccgctggggatggggctggcgacgctgattggtcgtaaaaatttctccgcagaagagcgcgaaaccggcaaagcggcactggtgatgggctgtgttggcgttactgaaggggcgattcctttcgccgctgccgatccgctgcgtgtcattccttccatcatggtcggttcagtttgtggtgcagtaactgcggcgctggtcggtgcgcagtgctatgcaggctggggtggtctgattgtgctgccggtggttgaaggcaagctgggttatatcgcagcagtggctgtcggagcagtggtgacggctgtttgtgtgaacgtgctgaaaagtctggcgcgtaaaaatgggtcttcgactgatgaaaaagaagacgacctggatttggattttgaaattaattaa

SEQ ID NO: 127851 - DNA, 2186 bp, Homo sapiens
gttgtatttctcggtattcagcaggtagtgtctattactatccctcttaccatcatcagcacaacccagtccaagtacagaaattacagaaggaactacagagataccttactcggaagattggctttgaggcagtcatgaggattcggtgcaccaaagaagaagaaagtcaaacaaaatcaaagcagcaggacagtgataaactgaactccctcagcgttccttccgtttcaaagcgagtagtgctgggtgattcagtcagtacaggaacaactgaccagcagggtggtgtggccgagtgcagtagtgatgtcaaccttgagctccggcagcggaacagaggggacctgacagcggactcggtccagaggggttcccgccatggcctagagcagtacctttccagattcgaagaagcaatgaagctaaggaaacagctgattagtgaaaaacccagtcaagaggatggaaatacaacagaagaatttgactcttttcgaatatttagattggtgggatgtgctcttcttgctcttggagtcagagcttttgtttgcaaatacttggctcgcagcaacatcggaaagtgtggacgattgcagcggtgtaaagcccccgagcgggaagaacggcacgtaggcaatgccatcgtgggccaaagcatcaatcattgcatcatcagcacggtgcgcgatgttgtattcgttttgcacacagacaatttcggcaatcttgcgcgcctctgcaacctgcgtcggtgtgacgttgctcaggccaatatgttttaccaggccttgttgttgcatctctgccagcacggtcaggctggcctcaatcgatccttccgctgggccatgaccatcccccatcataacgcgcaggttaaccacatccagcacgtccagcccgagattacctctgccggagaaaatgcgggcaaccaggatgcgtacctgcgtccatccttcggcggcaaaccgctgtcgatggtactggttattcagatgtttatgctgctgaccggggcgctgattattatcctgaccaaaaccaatcccgcgtctatctcaaaaaacgaagtcttccgttccggtatgatcgccatcgtggcggtgtacggtatcgcatggatggcagaaaccatgttcggtgcgcatatgtctgaaattcagggcgtactgggtgaaatggtgaaagagtatccgtgggcctatgccattgttctgctgctggtttccaagtttgtaaactctcaggctgcggcgctggcggcgattgttccggtcgcgctggcgatcggcgttgatccggcatacatcgtggcttcagcaccggcttgctacggttattacatcctgccgacttatccgagcgatctggcagcgattcagtttgaccgttccggcaccacccacatcggtcgcttcgtcatcaaccacagctttattctgccggggttgattggtgtgagcgtatcgtgcgtcttcggctggatcttcgccgcgatatctaggtccaaagagaaaactgatggtggggaaagttctaaagagaagaaaaaagacaaagatgacaaggaggatgaaaaagaaaaagatgctggcgaggggaaaataattaaaaagagtagtgggttctctggtaagggattcaagtttgatgaaacagaacaagctttggctaatgagaggaagaagttacaaaaagcagctcttggtctacaagattcagatgatgaggatgctgcagttgatccagcctttttccacgagtcagatatactttccctacactgtgttaataaggatatgctggtgagaacacgacatctggtcggccttatttcgggagtactgattctttcagtattgctgcctgtcggcttaagcatctggctggcccatcagcaggtagaaacatcgtttattgaagagctggatacctattcctcccgcgtcgctattcgagccaataaggaagtggcttatatcgataacaacgttccccagtgttcgtctctggagcatgaaagtccgcccgataccttccccgagccaggtaaaatttcgaaagatggttatcgtgtctggttaacatcgcataacgagtttaggcattatccgttacatggtcgccatgggaacggcacattatgtcgtcatgatcgaccccgcttcctttattga

SEQ ID NO: 127852 - DNA, 1925 bp, Homo sapiens
atggggattatcgccagtccggtgtcggttgcggtcgtgtctctggttgcgatgctgggtaatgtcacctttgatggtcgccatcttgagttcctcgatctgctggcaatcaccattccatcgacgttaatcggtatcctggcgatcggtatcttcagctggttccgcggtaaagatctggataaagacgaagagttccagaaattcatctccgtaccggaaaaccgtgagtatgtttacggtgataccgcgacgctgctggataaaaaactgccgaaaagcaactggctggcaatgtggtgtttcctcggggcaatcgctgtagtcgcccttcttggtgctgattcggacctgcgtccatccttcggcggcaaaccgctgtcgatggtactggttattcagatgtttatgctgctgaccggggcgctgattattatcctgaccaaaaccaatcccgcgtctatctcaaaaaacgaagtcttccgttccggtatgatcgccatcgtggcggtgtacggtatcgcatggatggcagaaaccatgttcggtgcgcatatgtctgaaattcagggcgtactgggtgaaatggtgaaagagtatccgtgggcctatgccattgttctgctgctggtttccaagtttgtaaactctcaggctgcggcgctggcggcgattgttccggtcgcgctggcgatcggcgttgatccggcatacatcgtggcttcagcaccggcttgctacggttattacatcatgccgacttatccgagcgatctggcagcgattcagtttgaccgtcccgccacaacccacatcggtggtttcgtcatcaaccacagctttattctgccggggttgattggtgtgagcgtatcgtgcgtcttcggctggatcttcgccgcgatgtacgggttcttataaatgcactttgcgtgccgcccgtgactacgcggcacgccattttcgaataacaaatacagagttacaggctggaagttatgtcaaacaaaccctttatctaccaggcacctttcccgatggggaaagacaataccgaatactatctactcacttccgattacgttagcgttgccgacttcgacggcgaaaccatcctgaaagtggaaccagaagccctgaccttgctggcgcagcaagcctttcacgacgcttcttttatgctccgcccggcacaccagaaacaggttgcggctattcttcacgatccagaagccagcgaaaacgacaagtacgtggcgctgcaattcttaagaaactccgaaatcgccgccaaaggcgtgctgccgacctgccaggataccggcaccgcgatcatcgtcggtaaaaaaggccagcgcgtgtggaccggcggcggtgatgaagaaacgctgtcgaaaggcgtctataacacctatatcgaagataacctgcgctattcacagaatgcggcgctggacatgtacaaagagtggcaagtgctgaccaccccccagcgtcccagcgatcgtgttgaaattcgcctgctggttaataccggttcgctcgccgaaagtacacaacagagcggttacagtcacgccatccctagtattgcgctaacgcaaagcggtggccttgacgcagcacaggcgcgttcattgtggcagcaggggatcgaccctaaacgcccgatgccgccggtaattgtctcttatgacaccacgctgtttaatctgagtttgcccaataaccgtaacgatttgctgaaagaagcgctctcttatctggcaaatgccactggcaaattgaccatcacaccagaaaccatcaaccacgcgctgcaaagtcaggacatgagacagggggctctaaccacaagggtgtcagcatccctggtccagcacgagaggagggaagtgcacaaggcagctcgaggcttgctataa

SEQ ID NO: 127853 - DNA, 682 bp, Homo sapiens
ggacgcccagaaagcgcgaaagggtaatatatggcgccgaggcaggggggcgaacacaaccgcgcggagacgacggcgaaccggaacaaataaaccgggcgcctaaggacgggaagagtggagtgaacaggcccagcaggctgaatagcaagaccagggcccagagccacgggggaaaggacagcggccaaaatgccagtgcgaaagcgggtcggatagctcgatatgcagcccgcccaatccgtgatagacccagcgggtagattggcgctcgcgcagtagcatctccccaggcgatggtttgcacgcctttccagcgttcggtaaggaagggggaaagatgctcgatagattgcgcgaacgtcgtgacgttaaaacgttgcagcagtccggcagcgcggcaggcgcagagttcgccctggcaggtgcccatccccacacgggtacgacggcgtaaatccagcaggctattaacgtttaaattttataccgcgtactgcacttcacccgcagttaccgcttcgcactcacataccaggctacggtgcagacggccttcgctcagccaggcaggcgtgcgatcgccatgacaataaaccgcagaaccgcacagcggggcaggcagggacatggcttaacgcaaggtagcttcaaaaaattattgtgacacaggcagtgccaa

SEQ ID NO: 127854 - DNA, 942 bp, Homo sapiens
atggtgttggggcgcgaagggccaaccgtgcagatcggcggtaacattggccgtatggtgcttgatattttccgcctgaaaggtgacgaagctcgccatacgctgctggcaaccggtgctgctgcggggctggctgcggcctttaacgcgccgctggcgggtattttgtttattatcgaagagatgcgtccgcagtttcgctatacgttaatttcgattaaagcggtatttattggtgtcattatgtcgaccattatgtaccggatttttaatcatgaagttgcgttgattgacgtcggtaaactttctgatgcgccgcttaatacgctgtggctttatctgatcctcggtattatttttggcattttcggccctatttttaataaatgggtgctggggatgcaggatttgctgcaccgtgtgcacggcggcaatattaccaaatgggtgctaatgggcggtgcgattggcggtctgtgtggattgctggggtttgtggcaccagcaacgtcgggcggcggttttaacctgattcctatcgctaccgcggggaatttcagcatgggaatgctggtgtttatcttcgtcgcgcgggtcattaccaccttactctgcttctcttccggcgcgccgggcggtatgtttgcacaggtcgcccagaagctggcggcagaacaggttgatctctacctcacctggggcgaaccgccggaactggttaaagagaaaatcgaacaagtgcgggcgaaagctgccgcgcatggacgcaaaattcgtttcggtattcgtctgcatgtgattgttcgtgaaactaacgacgaagcgtggcaggccgccgagcggttaatctcgcatcttgatgatgaaactatcgccaaagcacaggccgcattccgcccggacggattccgtagggcaacagcgaatggcggcgttacataa

SEQ ID NO: 127855 - DNA, 1007 bp, Homo sapiens
atgcttgcaaccgctgctgctgcggggctggctgcggcctttaacgcgccgctggcgggtattttgtttattatcgaagagatgcgtccgcagtttcgctatacgttaatttcgattaaagcggtatttattggtgtcattatgtcgaccattatgtaccggatttttaatcatgaagttgcgttgattgacgtcggtaaactttctgatgcgccgcttaatacgctgtggctttatctgatcctcggtattatttttggcattttcggccctatttttaataaatgggtgctggggatgcaggatttgctgcaccgtgtgcacgcaggtactattaccaaaggggtgctttactatattggcgacaggaataagcgcatcaagtaacagcggccagttttcttcattatcaaggaaacgggcgatattcaccgcgcgaaattcggtggcgttattgcgcagcacatacagttccggcagctctatttctgcggtttcaacggcaaggccgagttcacgcaacgaagctgccgcaagttaccgcttcgcactcacataccaggctacggtgcagacggccttcgctcagccaggcaggcgtgcgatcgccatgacgataaaccgcagaaccgcgcagcggggcaggcagggagatgactttacgcaaggtaacttcagcgggttcttgtgaaccagaaagaagccagatcggcagtcgtacaggggcgcgtgttgcccagtttgcggcataccgcgtcggtagcccattcagccatcagccgataggtcatcagtttgccaccggtgatggtgataaatccgtccagaccatcgcgttcagcatggtcgagcagcacgatgccacggctgacgttacgtccgctcgggtcgtcatcgttggcacccagagggctgatgaactggtgtcccgaaagacggcatctccctctgttactgaggctgaactccaactcctaagcttacaagatccttccacacttgattaa

SEQ ID NO: 127856 - DNA, 615 bp, Homo sapiens
aggtaagacaaccaagtgattatataatgaacaaaacagaattttacgcggatttaaatcgcgactttaacgcgctgatggcgggagaaaccagttttctggcaacgcttgcgaacaccagtgcgttgttatatgagcgtctcactgacataaactgggcaggtttttatttgcttgaggacgatacactggtactcggaccatttcagggcaaaattgcctgtgtccggatacccgtcgggcgcggcgtgtgcggcactgcggttgcccgcaatcaagtgcagcgtatcgaggatgttcatgtgtttgacgggcatattgcctgtgatgcggcgagtaattctgaaattgttctgccgctggtggtgaaaaatcagattattggtgttctcgacatcgatagtaccgtcttcggtcgctttacagacgaggacgagcaaggcttacgtcagcttgtggcacagcttgaaaaagtgcttgcaacgacggattacaaaaaattctttgcgagcgtcgcaggataatcaacggataacgtagcatttactgatagcgtcattataatgacgcctgttcatgcctgcgcttgttggctacgtccgttgtaatcaggaa

SEQ ID NO: 127857 - DNA, 548 bp, Homo sapiens
atgagccgtctggggccgaaagccttcgagcagtgcgcgggcttcttgcgcattaaccacggtgataacccgctggacgcgtctaccgttcacccggaagcctatccggtggtggaacgcattctggcagcaacacagcaggcactgaaagatctgatgggtaacagcagcgaactgcgtaacctgaaagcgtctgactttactgatgagaaattcggtgtgccgacggtaaccgacatcatcaaagagctggaaaaaccgggtcgcgatccgcgtccggaatttaaaaccgctcagtttgccgatggcgtcgagacaatgaacgacctgcaaccgggtatgatcctcgaaggcgcagtgaccaacgtcaccaactttggcgcgtttgtcgatattggcgtgcatcaggacggcctgggcagcaaagtgactggagatgtggaggaaagcgtcatctcggcaacgcagagtcatgagaaggactgggtgcagatgaaggatgttgagtgtgctgatgcagtggtgatggcatattctgcagttggaag

SEQ ID NO: 127858 - DNA, 1192 bp, Homo sapiens
ttcaaaaacagaggctttttcctctgctgtaaatgttcgtctcattcaaaaaacctccgcaaccccatgttttcacataactgttgcgttgaccaattgaatctacaattacagtatgatggccacggctggctgacagacatcagccacctgagcgaaggccaccgtgttgccgtccactatggctatgacgataaaggccgcctgaccggcgaatgccagacggtggagaacccggagacgggggaactgctgtggcagcatgagacgaaacacgcatacaacgagcaggggctggcaaaccgcgtcacgccggacagcctgccgccggtggagtggctgacgtatggcagcggttacctggcgggaatgaagctgggcgggacgccgctggtcgagtatacgcgggacaggctgcaccgtgagacggagtatcgcgacattatcaaactgctggggcgtcagagcgtcggcccggatgcctccggctgggtgttccgcctgacgccgtatgtgatggtgggcgtcatgctgactatcgctactgcgctgccggtggtgaccgtcggttctccgctgccgcaactgggtgatttgatcaccttactgtatctctttgccatcgcgcgtttcttctttgccatttctggtctggataccggtagcccgtttaccgctatcggcgcgagccgtgaagcgatgcttggcgtgctggtcgaaccgatgctgctgcttggtctgtgggttgccgcacaggttgccggttccaccaacatcagcaacatcaccgacaccgtttatcactggccgctgagccagagcatcccgctggtactggcgctttgtgcctgtgcgttcgccacctttatcgaaatgggcaaactgccgttcgacctggcggaagccgagcaggagctgcaggaaggcccgctctctgaatacagcggcagcggctttggcgtcatgaaatggggtatcagcctgaaacagctggtggtgttgcagatgttcgtcggggtgtttattccgtggggacaaatggaaaccttcaccgccggtggactgctgctggcgctggtgattgccatcgtaaaactggtggtcggcgtcctggttatcgcgctgttcgaaaacagcatggcccgtctgcgtcttgatattactccgcgggacatgatacgaatcgagctcg

SEQ ID NO: 127859 - DNA, 1397 bp, Homo sapiens
ctatgtgacgccggactggaagaagatctgtttgtctctgcgcgtccgaatattgaactgctgccggaaggccagtttaaataccacgtcgattttgagcatctgcatattggcgaagaaaccgggatgatttgcgtctcccggccgacgaatccaacaggcaatgtgattactgacgaagagttgctgaagcttgacgcgctggcgaatcaacacggcattccgctggtgattgataacgctggctcccgctgcggcattatcatcgccaatgaaaaaatcatcaccgccatcaccaatatgaacggcattatcagcctggcacctggcggtattggtccggcgatgatgtgtgaaatgattaagcgtaacgatctgctgcgcctgtctgaaacagtcatcaaaccgttttactaccagcgtgttcaggaaactatcgccatcattcgccggaccaagcagctctatcagcgcctgaaagcacgcggcgtgctgaactgccgatttcgtcgtgccggcaccatccacggcaaaatgccacgccatccgggataccaccagacactcggtgctgccttcccacagttggcgagtgaagaccgcggtgtcgttttcaagtacataggtgagggcgatcaggttggtggcgtggcagtgcatgatcacccgatctttgccgttggtggctttaatgcgctcgcagtgggaaaggaagtgagccggaagttcggaagtggggacggcttcgttggttaacccccaaagaatgtggtagcccgcgccgtcgctgtcgacttttacgatgcctaagttagccgcaggatcaagctggacgttacggaagaatttgcccgagccggtgacaataaacggtgtatttgccagtaaaggcatgggctggctgagcgggatatagcgcggttgttggtggaaattgtcgtgatatggtgcgatatcggcgtcatccaggcgtagcgtcaggttgccgccgttgcgctcatcccagcctttcagccagccgtcggtggtggctttgatcattccctggacaaaccaggactgagtaatgttttgcatgttctgtgttcctgtaaattcggtgttgtcggctgcacgacccgtaggccggataacgcgctcgcgccgcatccggcaatcaatgcctgatgcgctgctgtcgcgtcttatcaggcctacaactattgccgacctgtaggccgtaatatcaaagcgaagatcaaccgtcaggggatctggatcgaaaaactggaacataatccaggcaaatatatcccggaagacgtgcgcaaagcgggagaaggcgaagcggtgcgcgttgaccttaaccgtccgatgaaagagatcctcgcacagttgtcgcagtatcccgtttctac

SEQ ID NO: 127860 - DNA, 2334 bp, Homo sapiens; identical to SEQ ID NO: 124439

SEQ ID NO: 127861 - DNA, 1709 bp, Homo sapiens
gcgtttctttaatcccatcaacgaatgcctgcaactcctccaccgtgccattaaatacattaaaatccaccggaccattgatgccatctacctgtccacggtcggaatgctgccagaagcgccaggccattccgtcattgtccggacgacgttgatagtaaaccgtcagcaactgttaaaagtgagccgtctggggccgaaagccttcgagcagtgcgcgggcttcttgcgcattaaccacggtgataacccgctggacgcgtctaccgttcacccggaagcctatccggtggtggaacgcattctggcagcaacacagcaggcactgaaagatctgatgggtaacagcagcgaactgcgtaacctgaaagcgtctgactttactgatgagaaattcggtgtgccgacggtaaccgacatcatcaaagagctggaaaaaccgggtcgcgatccgcgtccggaatttaaaaccgctcagtttgccgatggcgtcgagacaatgaacgacctgcaaccgggtatgatcctcgaaggcgcagtgaccaacgtcaccaactttggcgcgtttgtcgatattggcgtgcatcaggacggcctggttcacatctcttcattgtcgaacaagtttgtggaagatccgcataccgtggtgaaagcgggcgacattgtgaaggtgaaagtgctggaagtggatcttcagcgtaaacgtatcgccctgactatgcgcctggatgagcagcctggcgaaaccaacgctcgtcgcggcggcggtaatgaacgcccgcaaaacaaccgcccggcagccaaaccacgcggtcgtgaagcgcagcctgccggtaatagcgcgatgatggatgcgcgctatcccggacgcgcatcactattatcacggtgaaaaagtggcattcggtacgctgacgcagctggttctggaaaatgcgccggtggaggaaatcgaaaccgtagctgcccttagccatgcggtaggtttgccaataactctcgctcaactggatattaaagaagatgtcccggcgaaaatgcgaattgtggcagaagcggcatgtgcagaaggtgaaaccattcacaacatgccgccggtgaacgcgaaccggcagagcagtgcagtatgatggcccggcgctgacagacatcagccacctgagcgaaggccccgtgttccgtccactatggctatgacgataaagccgcctgaccggcgaatgccagacggtggagaacccggagacgggggaactgctgtgcagcatgagacgaaacacgcatacacgagcaggggctggcaaccgcgtcacgccggacagcctccgccggtggagtgctacgtatgcagcgtacctgcggtaccgaatcgagtttctgtcgctgagctgcgcaatctggaagcgtcggtcgattactctgcgcgtctggcactgctggaagagcagaaatcgttgccgtggcagtcgttctgggaaatgtattgccaacgtcacgatacgccagcaggtagcgaatggctggagagcgtgcgggaggtcggcaatagttgtaggcctgataagacgcgacagcgtcgcatcaggcattgattgccggatgcggcgcgagcgccttatccggcctacgggtcgtgcatccgacaacaacgaatttacaggaacacagaaggtaacagcatttctcaacaaggtcactactgccat

SEQ ID NO: 127862 - DNA, 1587 bp, Homo sapiens
atggtaaaagaaggcaccttccgtgaagatctcttttatcgccttaacgttattcatttaatactgccgcctctgcgcgatcgccgggaagatatttccctgttagctaatcactttttgcaaaaattcagtagtgagaatcagcgcgatattatcgacatcgatccgatggcaatgtcactgcttaccgcctggtcatggccgggaaatattcgagagctttccaacgttattgaacgcgccgtcgtgatgaattcaggcccgatcattttttctgaggatcttccgccacagattcgtcagccagtctgtaatgctggcgaggtaaaaacagcccctgtcggtgagcgtaatttaaaagaggaaattaaacgcgtcgaaaaacgcatcattatggaagtgctggaacaacaagaaggaaaccgaacccgcactgctttaatgctgggcatcagtcgccgtgcattgatgtataaactccaggaatacgacgccaccggcttctttcgtgacggcatgaccatcatggtgggcggatttatggggattggcactccatcccgcctggttgaagcattactggaatctggtgttcgcgacctgacattgatagccaatgataccgcgtttgttgataccggcatcggtccgctcatcgtcaatggtcgagtccgcaaagtgattgcttcacatatcggcaccaacccggaaacaggtcggcgcatgatatctggtgagatggacgtcgttctggtgccgcaaggtacgctaatcgagcaaattcgctgtggtggagctggacttggtgggtttctcaacccaacgggtgtcggcaccgtcgtagaagaaaggcaaacaagcattgacacttcgacgcgcaaaaggccatttgaactgggacgtccgtcgcgcaataatgacaagggcatccgcccgagatcaggcgctggatcggaagaatatccgcgaacgctgcatgacagcctcaagcgcctacagactgattacctcgatctttatcaggtgcactggccgctgcgcccgttctactgcttcggcaaactcggttatagctggacggattctgcgcctgcggtttcgcagctggatacgctggacgcactggcagagtaccaacgcgcgggaaaaattcgttatatcggcgtgtcgaacgaaactgcatttggcgtaatgcgctacctgcatctggcggacaaacacgatctgccgcgtattgtcaccattcagaacccttacagtctgttaaaccgcagttttgaagtaggtctggcagaagtcagccagtatgaaggggtcgaactgctggcctattcgtgcctgggtttcggcacgctgaccgggaaatatctcaatggtgcaaaacccgctggcgcacgtaatacgctctttagtcggttcacccgctatagcggtgagcaaacgcaaaaagccgtcgcggcgtatgttgatatcgccagacgtcatggcctggaccctgctcagatggcgctcgcgtttgtacgccgtcaaccgtttgttgccagcactctgcctgggcgcaaccacgatggatcagctgaaaactaa

SEQ ID NO: 127863 - DNA, 621 bp, Homo sapiens
atggctgtcagcagaatgaatcttgttggctcaggcctgaagactgcactggattcttttgctgacttgaaccttttcatgccttcagctcttttagatcgatttatgaagaaacacaatctaaacagaccaataaaaggtaaggagattgaatcagaaataaaaagatactcatcaaagaaaagcccaagaactggtcattccgtcgcggcgtatgttgatatcgccagacgtcatggcctggaccctgctcagatggcgctcgcgtttgtacgccgtcaaccgtttgttgccagcactctgctgggcgcaaccacgatggatcagctgaaaactaacatcgaaagtttgcatctggagttaagcgaagacgtattagctgaaattgaagcggtgcatcagcgccgttattgccagcgcaaacagcgcaccgaagccaatgccaatgggcacgaccgggatgcctatcattaccgccagcgagtaaatgcccagcatcaacaacatggcgctgttttcgccaagcaacgcattgagcggaacgacaaaaaagcccccatcacgccaatcagttcgggggatatgtgcatattgggcgctctagaccaatccgatcagtaa

SEQ ID NO: 127864 - DNA, 952 bp, Homo sapiens
aactttccggcatccgcgaagaataaggcaatcaaaatgacgcagaaaattgaacaatctcaacgacaagaacgggtagcggcctggaatcgtcgcgctgaatgcgatcttgccgctttccagaactcgccaaagcaaacctaccaggctgaaaaagcgcgcgatcgcaaactgtgcgccaacctggaagaagcgattcgtcgctctggtttacaggacggcatgacggtttccttccatcacgctttccgtggcggtgacctgaccgtcaatatggtgatggacgtcatcgcgaagatgggctttaaaaacctgaccctggcgtccagctccctgagtgattgccatgcgccgctggtagaacacattcgccagggcgtggttacccgcatttatacctccggcctgcgtggtccactggcggaagagatctcccgtgcttactgcgccgacagtcaccacggaccatttgcaatggtgaacaatatgaccgacttaaccgcgcaagaacccgcctggcagacccgcgatcatcttgatgatccggtgattggcgaactgcgcaaccgttttgggccggatgcctttactgttcaggcgactcgcaccggggttcccgttgtgtggatcaagcgtgaacaattactggaagttggcgatttcttaaagaaactgccgaaaccttacgtcatgctgtttgacttacacggcatggacgaacgtctgcgcacacaccgcgaagggttacctgccgcggatttttccgttttctaccatctgatttctatcgatcgtaaccgcgacatcatgctgaaggtggcgctggcagaaaacgacctgcacgtaccgaccttcaccaaactgttcccgaacgctaactggtatgagcgtgaaacctgggatctgtttggcattactttcgacggtcacccgaacctgcgatggatcccct

SEQ ID NO: 127865 - DNA, 738 bp, Homo sapiens
attttcaatggatttaatgcgctcgacgttggcgatactcatggcatttttatcccatgcgtcaacatcataaccattggctgccaggtaaagactgttacgaccattgccacagcccagatccagcgttttacccggtttaaccacttttcacgcttccagtacttcagaaactcgccaaagcaaacctaccaggctgaaaaagcgcgcgatcgcaaactgtgcgccaacctggaagaagcgattcgtcgctctggtttacaggacggcatgacggtttccttccatcacgctttccgtggcggtgacctgaccgtcaatatggtgatggacgtcatcgcgaagatgggctttaaaaacctgaccctggcgtccagctccctgagtgattgccatgcgccgctggtagaacacattcgccagggcgtggttacccgcatttatacctccggcctgcgtggtccactggcggaagagatctcccgtggtctgctggcagaaccggtgcagatccactctcacggcggtcgtgtgcatctggtacagaacggcgaactgaatatcgacgtggctttcctcggcgtcccgtcctgtgatgaattcggtaatgccaacggatacaccggtaaagcctgctgcggatccctcggctatgcaatagtcgatgccgacaacgcaaaacaggtcgtgatgcttaccgaagaactgctgccttatacggataatccggaagcctga

SEQ ID NO: 127866 - DNA, 1116 bp, Homo sapiens
atggctgagctggttcgtcctttaaccgtccattgtaatgttatacgccgtgaattacccttaatgttgatggtcagcgtggtgcctggttccgtactctatgacggacaacttagtcgcagcgatggtatctttctcctctttctggctgtgctatggctgctgttcattgttaaacttgcacgtcaggctgaacgtcaggggactgacagcctgaccagagagcagcttgcagagctgccgcgtgacggcggattgcccgtcgcgtttttatggctcggcattgcgcttatcatcatgccagtggccacgcggatggtggttgataacgccacggtgctggcgaatttttttgccatcagcgagttgacgatgggtctgacggcaattgctatcggaaccagcctgccggaactggcaaccgcaatagcgggggttcgcaaaggtgaaaacgccattgctgtcggaaatatcattggcgcaaacatttttaatattgtcatcgtgttgggtttacccgcgctgataacgccaggagagattgattgcatcaggaattcgcactggaagttaacccgtgtgaagaaggctatttgctggccaacctttatggattatggatggctgctaacgaagaggtttgaagctcccgacaaatccacttcgcacaacctgcatttccttaacctgccaggaatcgaccgtagcaaactggaacgtattgatattcgtacatcgcagctgattacaccgctgtttgaatattcagataatgccgaatttggccttggtttccgcctgacggtcgatcaacaccgtgtccgcgtgctgcgtctgctggatcaatttgccgataaaatcccggcggaattactgacggcgttgaaatcagacgccacgccagaggttcgtcgtgaacaggttgcagctttacgccagcaactcaacgatgttgccgaagcacatgaactgctacgtgatgcagatgcactggtggaaaaatcaatctggctgattggtggtgatggctgggcttacgatatcggctttggcggtctggatcatgtattgagtttgacggaaaaaggagcaactttatttaacctctctctataa

SEQ ID NO: 127867 - DNA, 6231 bp, Homo sapiens
atgctacgctccactggcttcttccgggccattgactgcccctattggtctggggcgcccggggggccctgccggcggccctactgccacttccggcaccgcggggcccggggctccggcgcgcccggtgacggcggagaggcgccccccgcagcagcgtttcttggaggagatgtgggatttggattggagaaaaagagggacatcgcaaggaaagtcgtggagggagggttatcgagtgtgatgtcattcagactcccctgttacctctgtcccttgatagtggctctctgcttcacccagcccctgacttccttcgtcccagatttcctcattgggcggagtctgtgtcctactgagaggcaggacactgtcttccaggagagggaacccttccggggaggattgcaggaaagtccagggctctccagagtggctcagaggccctcagagaccaaaagggagccagcactgcctcaggagcaggccctagggagacaggatctggaagccatggaagtgggcctgcgcagtcctgagttggccaccgccccgtgcaccacggccgaggaggaggtggacttcaggggtgctgtcctccagacccctcttcccagagggtctgttatgggatgggcgctcccgtggacacaaccagcccctgccttgcgcttcgcgaggcctccgggtcccggcctcccgctgtccctgcagggttcccgggaacaggaggggccttccgccttcgcagttggtgttgggtgcagcataaatgaaggccagattgcatttgctgtaccccatgggactgcgggcttggtgtgggcccgtgcgcctttgttggaatctgatctcactgggtttgtggagctgcttttcaaagggctgggttacgacccctacaaccctgagctgcccaagccccccgcgcagagggagaatggcaccctgggcctgggggaggagccgcgcccggatgtgctggagttggagctggtcaaccaggccatcgaggccgtgcgcagtgaggtggagctggagcagcggcgctaccgggagctgctggagacgacccgtgagcaccgctccgccgaggcccccgccctggcgccccgcggccccaacgccagccccactgtgggcccggacgaggatgccttcccactggccttcgactacagccccggcagccacggcctattaagccctgatgccggctaccagcccaccccactggccgcccctgccgagccgggcagcaagtactcgctggcgtccctggacaggggtcagggcagaggtggagggggtggcggtgccctggaatacgtccccaaggctgtgagccagccccggcggcacagccgccccgttcccagtggcaagtacgtggtggacaactccaggccacccacagacctggagtatgaccctctctccaactactcggcccggcacctcagcagggccagctcccgggatgagcgggccgccaagcggccccggggctcccgcggcagtgagccctacacacctgctcccaagaagctctgtgacccctttggcagttgcgatgcaaggttctcagactcagaagatgaggccgccacggtcccaggtaacgagcccaccacggccagcacccccaaagccagggccgaccctgagatcaaggccaccgggcagccaccctccaaagagggcctggaggccgaggggggcggcctgcgggagaccaaggagacggccgtgcagtgcgacgtgggggacctccagccgcccccagccaagcccgcctccccagcccaggtccagtcctcacaggatgggggctgccccaaggagggaaaacccaagaagaaaaaaaccggggccccacctgcccccagctgcaaagacggggcccaggggaaggacaagaccaaggacaagggccgagggcggcctgtggagaagccccgtgcggacaagaagggcccgcaggccagcagcccccggcgcaaggcagagcggccggaagggaccaagaagaagccatcttcggccactcctgtggccacctcagggaaagggaggcctgaccggccagcgcggcggccgagccccacaagcggggactcccgaccggcggccggcagaggcccaccccgccccctccagctgcccgacaggaagagcaccaaggccccgtcggggaagctagtggagcggaaagcccgctcactagacgagggcgcctcccaggacgcccccaagctgaagaagcgggccctgagccacgccgacctctttggggacgagagtgaggacgaggccgcagggccaggggtgccgagcgtgtggccctctgccctccccagcctcagctcggactcagactccgactcagactccagcctgggcttcccggaggcgcaggggccgcccaagcggctcaaggcctccccgcccccctcccccgccccatcctcctcctcctcctcctcctcctccacctccagcgcgggggcggatgtggactactcggccctggagaaggaggtggactttgactccgaccccatggaggagtgcctgcggatcttcaacgagtccaccagcgtcaagacggaggacagaggccggctggcccggcagaggtcactggcccgtggccaccagccaggcttctgtggccacgtgcacacgccccccaaggaagagaagagtgaggagaaggggctttcgggtctgaccactctgttccccgggcagaagaggaggatctcccacctttccaagcaaggccaggaggtgcccccgctgtgctgccaggccttagcatttgtggtgacgcaggtggagcccccgaggaggggtcccgcggtgcccccggcccggcccccgacggcgcaggaggtgtgctacctgcgggcccagcaggcgcagagggcatcggcgagcttgctgcaggcccccgccaggctggcagagaagtcgccctccgtccacatttccgcccctggcgagaagaggaggatcgcccacatccccaacccccgcctggctgcagggccagatggcatttcgagggatgttgctctgagactagggccagatgtccctgctcacagctccccttcctgggtcggtgccgagcccccagtccagaagcccccctgccacacagacgtacatgcccagatgcacgtgctgctggcgctgagcggccgcggctgcctggtgctccgccacgtggtgatgggcagccactcgccctgtgcccacaccccctgtgccccgccagcccccacaggtgccaagaggacccttgcggccagcggcagccagtcctccaacggccctgagccaggtggccagcagctgaaaacacgcacattgtcggggatggcgtccaagactaccaccaccatcatccctaagcgaatcgcccacagtccatccttacagagtttaaagaaacccattatccccaaagagtttgggggcaaagtccccaccgtcatccgccagcgctatctcaacctgttcatcgaggagtgtctcaagttctgtacctccaaccaggaggccatagagaaggcactgaacgaggagaaggtggcctatgaccgcagccccagcaagaacatctacctgaatgtggccgtgaacaccctcaagaagctcaggggcctggcccccagcgctgtgcccggcctcagcaaaaccagtggccgcagggttgtgtcccacgaggtggtgttggggggcaggttggccgccaagaccagcttctcgctcagccgtccaagcagcccccgggtggaggacctgaaaggggctgccctgtacagccgcctcagggagtacctgctcacccaggaccagctcaaggagaacggctaccccttcccgcacccagagcggcccgggggcgcaatcatcttcacagctgaggagaagaggcccaaggactgtgagtcgctggcctgcgacggcctagcttcctgcaggacctgctgccgctgtggcaccgagtacctcgtgtcctcttcaggccgctgcatccgggacgaggagtgttattaccactggggacggctgcgccggaaccggggcaaccacgcagccacgctcagggcacatggccagccttgcacagccctgtggcggcccctaaagccatcgcctcagggatacctggagggtgctgcccggggcagcgctgccaagaggcctctgcagagggcactggtctccctggatccaggcctgggcgtcctggctgccacacgactgccggggcctgtggccggaggctgggagacccagtacatgtgctgctcggctgccgccggctctgtcggctgccaagtcgcaaagcaacacgtgcaggatggccggaaggagcgccttgagggcttcgtgaagacctttgagaaagagctctcaggagacacccacccggggatctacgccctggactgcgagatgtcctacaccacatatggcctggagctgacgcgcgtcacggtggtcgacacggacgtgcacgtggtttatgacaccttcgtgaagcctgacaacgagatcgtggactacaacaccaggttttcgggggtgacggaggctgaccttgccgacacaagtgtcacgctgcgtgacgtccaggccgttctgctgagcatgttcagcgctgacaccatcctcatcggacacagcctggagagcgacctcctggccctgaaggtgccctgccggcccgggtcccgcgcggttctccagcaggacctgcgcaggccccacgtcatccacagcaccgtggtggacacgtctgtgctcttcccccaccgcctgggcctcccctacaagcggtccctgcggaacctcatggccgactacctcagacagatcatccaggacaatgtggatgggcacagctccagcgaggacgccggcgcctgcatgcacctggtgatctggaaggaccgttggcaccgggctaacggttccaccacgtccgccgccctggacgcccgcggcctgcccccccctgcctctcctgcgccgactcccaggagcaccagagctggccctgagccaagccctgccccaccaggacctggggacacgggtgactcagacgtgactcaggaaggctcaggtcctgctggcatccgcggagccccaccagcatgggcagcctcggccagagagaagatctccaagatgaggacaggaactcaggtgctgatcctgggcagagggggcggtgcagcattcacctggaaggtccaggccaacaaccgtgcctacaacgggcagttcaaggagaaggtgatcctgtgctggcaaaggaagaaatacaagaccaatgtcatccgcacggccaagtacaacttctactcgttcctgccgctgaacctgtacgagcagttccaccgcgtgtccaacctgttcttcctcatcatcatcatcctgcagaactttccggcatccgcgaagaataaggcaatcaaaatgacgcagaaaattgaacaatctcaacgacaagaacgggtagcggcctggaatcgtcgcgctgaatgcgatcttgccgctttccagaactcgccaaagcaaacctaccaggctgaaaaagcgcgcgatcgcaaactgtgcgccaacctggaagaagcgattcgtcgctctggtttacaggacggcatgacggtttccttccatcacgctttccgtggcggtgacctgaccgtcaatatggtgatggacgtcatcgcgaagatgggctttaaaaacctgaccctggcgtccagctccctgagtgattgccatgcgccgctggtagaacacattcgccagggcgtggttacccgcatttatacctccggcctgcgtggtccactggcggaagagatctcccgtggtctgctggcagaaccggtgcagatccactctcacgggggtcgtgtgaatctggtacagagcggcgaactgaatatccacgtggctttcctcggcgtcccgtcctgtgatgaattcggtaatccaaacggctacaccgcctgctgcggctccctcggctatgcaatagttgatgccgacaacgcaaaacaggtcgtgatgcttaccgaagaactgctgccttatccgcataatccggcaagcattgagcaagatcaggttgatttgatcgtcaaagttgaccgcgttggcgatgctgcaaaaattcgcctggcgcgacccgtatga

SEQ ID NO: 127868 - DNA, 587 bp, Homo sapiens
aggatccccattcggcgctggcactgtatgatcagctttccaccatcgccccgacattaatcatcaattacgacgacaaaagctggcagtcgctgttaacgcagcttggcgaaattaccgggcatgagaaacaagcggcagagcggattgcgcagtttgataagcaactggcggcggcgaaagagcaaatcaaattaccgccgcagccggtcactgccattgtctatactgccgctgcacacagtgccaatctctggacgccagaatcagcacaagggcagatgctggaacaactcggctttacgctggcgaagttacccgcagggttaaatgccagccaaagtcagggtaaacgccatgacatcattcagcttggtggggaaaatctggctgcagggttaaatggcgagtcactattcctgttcgccggtgatcagaaagatgccgatgctatttatgctaatccgctgctcgcgcacctgcctgcagtacaaaacaagcaggtttatgcgctgggaaccgagacgttccgtctggattactacagcgccatgcaagtgctggataggcttaaggcgctgttttaa

SEQ ID NO: 127869 - DNA, 2403 bp, Homo sapiens
ccatctggaaagaggaactctgtacccaatgtaaccactgcgttgccgcttgcccacactcagctattcgcgcaaaagtggtgccgcctgaagcgatggaaaacgcccctgccagcctgcattcgctggatgtgaaatcgcgtgatatgcgcgggcagaaatatgtcttgcaggtggcaccggaagattgcaccggttgtaacctgtgcgtcgaagtttgcccggcgaaagaccgtcagaatccagagattaaagccatcaatatgatgtctcgcctggaacatgtcgaagaagagaaaatcaattacgatttcttcctcaacctgccagaaatcgaccgtagcaaactggaacgtattgatattcgtacatcgcagctgattacaccgctgtttgaatattcaggtgcttgctccggttgtggcgagacgccgtatattaaattactgactcagctctatggcgaccggatgttgatcgctaacgccactggctgttcttcaatttatggcgggaacctgccctctacaccgtataccaccgatgccaacggtcgtgggccgggatgtgcgaactctctatttgaagataatgccgaatttggccttggtttccgcctgacggtcgatcaacaccgtgtccgcgtgctgcgtctgctggatcaatttgccgataaaatcccggcggaattactgacggcgttgaaatcagacgccacgccagaggttcgtcgtgaacaggttgcagctttacgccagcaactcaacgatgttgccgaagcacatgaactgctacgtgatgcagatgcactggtggaaaaatcaatctggctgattggtggtgatggctgggcttacgatatcggctttggcggtctggatcatgtattgagtttgacggaaaacgtcaacattctggtgctggatacgcaatgctattccaacaccggtggtcaggcgtcgaaagcgacaccgctgggtgcagtaactaaatttggcgagcacggcaaacgtaaagcgcgtaaagatcttggcgtcagtatgatgatgtacggtcatgtttatgtggcgcagatttctctcggcgcgcagctgaaccagacggtgaaagcgattcaggaagcggaagcgtatccggggccatcgctgatcattgcttatagcccgtgtgaagagcatggttacgatttggcactcagccacgaccagatgcgccaactcacagctaccggcttctggccgctatatcgctttgatccgcgtcgtgccgatgaaggcaaactgccgctggccttggattcacgcccgccgtcagaagcaccggaagaaacactcaggttgacattaactaatcccgcgtttcccgtgttacacctgactggaattgcaagttctgccgttctggccccaagaggtttatgccctacaacacggaaattggcagcgaagacatcacctaaatcaacttcaattgtctctccggcattgacggaacatgagccaagtgaattgatcgtaccagacagcgtcaccctgaccggctcaatgttggcgattgatgctccggtgatcgccagcggcgcgaccacgccgaataaccgcgtcgcggatgaccagggctttttacgccagtggagcaaggtggcgaaagaacgcaaactgcaacggttttatatcggcgaaccgagcgccgaagccgttgccgcgcaaatgccggatctgattttaattagcgcaaccggcggggattcggcgctggcactgtatgatcagctttccaccatcgccccgacattaatcatcaattacgacgacaaaagctggcagtcgctgttaacgcaacttggcgaaattaccgggcatgagaaacaagcggcagagcggattgcgcagtttgataagcaactggcggcggcgaaagagcaaatcaaattaccgccgcagccgggcgtggttacccgcatttatacctccggcctgcgtggtccactggcggaagagatctcccgtggtctgctggcagaaccggtgcagatccactctcacggcggtcgtgtgcatctggtacagagcggcgaactgaatattgacgtggctttcatcggcgtcccgtcctgtgatgaattcggtaatgccaacggctacaccggtaaagcctgctgcggctccctcggctatgcaatagttgatgccgacaacgcaaaacaggtcgtgatgcttaccgaagaactgctgccttatccgcataatccggcaagcattgagcaagatcaggttgatttgatcgtcaaagttgaccgcgttggcgatgctgcaaaaatcggcgctggcgcgacccgtatgaccactaacccgcgcgaactgcttattgcccgtagcgctgcggatgtgattgtcaactctg

SEQ ID NO: 127870 - DNA, 620 bp, Homo sapiens
tgattgaagcggaaagcctggatctgcgttactactccgtcatctataacctgattgacgaagtgaaagcggcgatgagcggtatgctgtctccggaactgaaacagcagattatcggtctggcggaagttcgtgacgtgttcaaatcgccgaaatttggtgccatcgcaggctgtatggttaccgaaggtgtggttaaacgtcacaacccgatccgcgttctgcgtgacaacgtggttatctacgaaggcgagctggagtccctgcgccgcttcaaagatgacgttaacgaagtccgtaacggtatggaatgtggtatcggcgttaagaactacaacgacgtccgcactggcgatgtgatcgaagtattcgaaatcatcgagatccaacgtaccattgcttaaggtttttagggttccatgcgggataaggcgtttacgctgcatccggcatggattgcctgatgtgacgctggcgcgtcttatcaggtcaacgtgaacagcccttccacctgaaattaattttaaaaaggggctaacagccccttttttgtcaggagaatttattatggcgaaaaaatttgttagcccgcagcgcgtagcgcagttaacacaaaaaga

SEQ ID NO: 127871 - DNA, 1281 bp, Homo sapiens; identical to SEQ ID NO: 126617

SEQ ID NO: 127872 - DNA, 1536 bp, Homo sapiens
atgattatctcaatagatgcagaaaaggcctttgacaaaattcaccaacccttcatgctaaaagctctcaataaatcagagaataaaatacctaggaatccaacttacaacggatgtgaaggacctcttcaaggagaactacaaaccactgctcaaggaaataaaagaggatacaaacaaacgcaacaacacgacatgcacatgagcacaaaaaatcaatatcatgaaaatggccatactgcccaaggaatgaaaggaattacccagccttctgcttttatacctacagctgaaagtaattcctttcagcctcaggtgaagactttgccatctccaattgatgctaaacagcagttgcaacggaaaatccagaagaagcagcaagaacagaaactacaatcccctttgccaggagaatctgcagcaaaaaagtcagaaagtgctacaagcaatggagtgactaatcttcctaatggaaatccttcaatcctttctcctcaacctattggtatcgttgtggcagctgtccctagtcccattccggtccagcggactaggcaattggtaacttcaccgagtccaatgagttcttctgacggcaaagttcttcccctcaatgtacagtcccatcaaaactgctggtggacccgcttcaacatgagttctctaaatgtggtgaaaatgacaacaatatccctcacacccagcaacagtaacacccctcttaaacattctgcctcattcatcagtgctacaggaacaacagaagaatcaaggagtgttccacagatcaagaatggttctgtcgtgtcgcttcagtctcctgggtccaggagcagcagtgcggggggaacatctgctgtggaagtcaaagtggaacccgaaacatcatcagatgagcatcctgtacagtgccaagagaactctgatgaggctaaagctccccagacacctagtgcccttttggggcagaaaagtaatacagacggagcactgcagaaaccttcaaatgaaggtgtcattgaaataaaagcaactaaggaacgcagatcctcaccagcaacggaacaaagctggatggagaatgtctttgaggagcagagagaagaaggcttcagacgatcaaaccactcgcagatacgggaggacagtcaaacaaaaggcaaagaagagaaacgcctaaaggagctgatggagctgaaaaccaaggttcgagagctacgtgaagaatgcagaagcctcaggagccgatgcgatcaactggaagaaagagtatcagcgatggatgatgaaatgaatgaaatgaagcgagaagggaattttagagaaaaaagaataaaaagaaatgagcaaagcctccaagaaatatgggactatgtgaaaagaccaaatctacgtctgattggtgtacctgaaagtgatggggagaatggaaccaagttggaaaacactctgcaggatattatccaggagaacttccccaatctagcaaggcaggccaacattcagattcaggaaatacagagaacgccataa

SEQ ID NO: 127873 - DNA, 1323 bp, Homo sapiens
ctagcagtctatttcgttgatcctttcaaaaaaccagctcctggattcattaattttttgaagggttttttgtgtctctatttccttcagttctgctctgattttagttatttcttgccttctgctagcttttgaatgtggttgctcttgcttttctagttcttttaattgtgatgttagggtgttaattctggatctttcctgctttctcttgtgggcatttagtgctataaatttccctctacacactgctttgaatgcatcccagagattctggtatgttgtgtctttgttctcgttggtttcaaagaacatctttattgctgccttcatttcgttatgtacccagtagtcgttcaggagcaggttgttcagtttccatgtagttgagtggttttgagtgagattcttaatcctgagttctagtttgattgcactgtggtctgagagataatttgttataatttgtgttcttttacatttgctgaggagagctttacttccaagtatgtgatcaattttggaataggtgtggtgtggtgctgaaaaaaatgtatattctgttgatttggggtggagagttctgtagatgtctgttaggtccgcttggtgcagagctgagttcaattcctgggtatccttgttgactttctgtctcattgatctgtctaatgttgacagtggggtgttaaagtctcccattattaatgtgtgggagtctaagtctctttgtaggtcactgaggacttgctttatgaatcttggtgctcctgtattgggtgcatatatgtttaggatagttagctcttcttgttgaattgatccctttaccattatgtaatggccttctttgtctcttttgatctttgttggtttaaagtctttctctctggctgcccttaacattttttccttcatttcaactttggtgaatctgacaattatgtgtcttggagttgctcttctcgaggagtatctttgtggcattctctgtatttcctgaatctgaacgttggcctgccttgctagattggggaagttctcctggataatatcctgcagagtgttttccaacttggttccattctccccgtcactttcaggtacaccaatcagatgtagatttggtcttttcacatagtcccatatttcttggaggctttgctcgtttctttttattcttttttctctaaacttcccttctcgcttcatttcattcatttcatcttccattgctgataccctttcttccagttgatcacatcggctcctgaggcttctgcattcttcacgtagttcttgagccttggttttcagctccat

SEQ ID NO: 127874 - DNA, 496 bp, Homo sapiens
cgtctttcattgccatacggaactccggatgagcattcatcaggcgggcaagaatgtgaataaaggccggataaaacttgtgcttatttttctttacggtctttaaaaaggccgtaatatccagctgaacggtccctcctcgagagtatctttgtggcgttctctgtatttcctgaatctgaacactggcctgccttgctagattggggaagttctcctggataatatcctgcagagtgttttccaacttggttccattctccccatcactttcaggtacaccaatcagacgtagatttggtcttttcacatagtcccatatttcttggaggctttgctcatttctttttattcttttttctctaaacttcccttctcgcttcatttcattcatttcatcttccatcgctgataccctttcttccagttgatggcatcggctcctgagtcttctgcattcttcacgtacttctcgagccttggttttcagctccat

SEQ ID NO: 127875 - DNA, 3735 bp, Homo sapiens
atgaattctgttatagttaaagagttgacggccacgtcgtgtgtggcgtcacatcctggtagatcccatgcacttttggcgatggccaaaggatttactacagagcagcgcttgagaatcaggagagcaatatgcgttgaagactccagtgcagcgctacgacgcgtacgcgacgttggagctcggagcactcgggagcacatctgctatcgtcgcacgtgccttgaagccacatcacgaaagcacaggacgctgctcatccaatacataataagactacacaccttaaaccacgctctgagacgctactcgagtctcacttggctaaagcagcgtatcacaactactccaacgcacttggccaatagcaagagtcgacaggccagtgtggcagactatgaagaaactgtaaagaaagcaacagaagcatggaaaatctgggcagatattcctgctccaaaacgaggagaaatagtaagacagattgacgatgccttgtgggagaagatccaagtactaggaagcgtggtgtctttggagatggggaaaatcttagtggaaggtgtgggtgaagttcaggagtatgtggatatctgtgactatgctgttggtttatcaaggatgattggaggacctatcttgccttctgaaagacctggccatgcactgattgagcagtggaatcctgtaggcctggttggaatcatcacggcattcaatttccctgtggcagtgtatggttggaacaacgccattgtcatgatctgtggaaatgtctgcctctggaaaggagctccaaccacttccctcattagtgtggctgtcacaaagataatagccaaggttctggaggacaacaagctgcttggtgcaatttgttccttgacttgtggtggagcagataccggcacagcaatggccaaagatgaacgagtgaacctgctgtccttcaccgggagcactcaggtgggaaaacagatggccctgatggtgcaggagaggtttgggagaagtttgttggaacttggaggaaacagtaccattattgcctttgaagatgcagacctcagcttagttgttccatcagctctcttcactgctgtgggaatagctggccagaagtgtaccactgcgaggcgactgtttgtacatgaaagcatccatcatgaggttgtaaacagacttaaaaaggcctacgcacagatccgagttgggaacccatgggaccctaatgttctctatgggccactccacaccaagcaggcagtgagcatgtttcttggagcagcggaagaagcaaagaaagaagcagaactcgaacccgtcagagcaccatcgctgattgctttctttcacggccactctgcctgtatgtgcccgtttcgatggcggtacagcaggttttcgctcaagcaacagcgcattctggcgcatgatccgattaccaacggtacccgaagcgccacgatacatgaagccaccgcagccggcagactgacaacggaagagagcattgaattcggaacactgagcaaagagtaccaccagtcgacctttgccgggcattttctggaggtcggcgtgcatagcgcgacgggagaagttcgggtccggcgtatgctcgctgtgtgtcctgcaggacgcatcctgaatccgaaaactgcgcgcagccaggtcattggcgcaatgactatgggcatgggcgcggcactgatggaggagctggcggtggatgaccgtttgggctacttcgttaatcacgatatggcggggtatgaggtgccggttcatccggatatcccaatacaggaggtgattttcctggatgatacacgaccccatatcctccccgatgaaggccaaagctgccggatgtggtttaaggaggaacaatgtcatacccgctttcttgacaaagacgaacactggcataagccagagcaggcgtttctcaccgatgaccaccggaccattctgcgcttcgccgtagaggcgctaatgtccggtaaagagcgtgctgtgaaatgtgagatgtccgtggcttttcggtatcccggtagccgcgccattttccctataatcccatgttctgcaaagcccgtccgcatgtcaacttgctcatggcgggccactgtcattgccatgagtttgcgcctaacggaggtgttaggccagcaaaatcgctacgggtcaaacaacccatacgcacatggcccaaacgtccgtccgtctttttgtgtcgccacagtccgtgctgtcagttctattccaaccgctccaaaatcggcgctatacgatggcaggtcagttcacctaaaatctccattgacgggatgccgttgtagcgttccagtcgcgggtgaagtaaagcatacgtaccacggacagtattctatccgctcaccttatgtccggcccaaacccccaccggcctttctgattatttctgtaaaatcggcgctatacgatggctcacttctttatgtactattggttaatcgtactcctccgccttcactttttggcctatcactcctgccggtggttttacaaatgcgcacccatccagaactgcgcgatttcccaatcagcggtatcggcggcattgaaacctgggaggatgcggctgagtttttattgctcggcgcagcaacgttacaggtgaccaccggcatcatgcagtacgggtatcggatagtggaagatatggcaagcgggttgtcgcattatctcgccgatcagggatttgattcgctgcaggagatggtaggtctggcgaataacaatattgtcccggcggaagatttagaccgcagttatattgtctatccccgtatcaatcttgataaatgtgttggctgtggacgctgttatatttcctgttacgacggcggtcaccaggcgatggaatggagcgagaaaacccgcacaccgcattgtaataccgagaaatgtgtgggttgtctgctttgtggtcacgtctgcccggtgggttgtattgagctcggggaagtgaagtttaagaaaggcgagaaagaacacccgggactggttctggttaaaataagatgctcgggaacactctttcatagagagtggttgtcaacgaggttgtgcaagaaggagagtcatcctggaaaagataaagggaaacaacaggaaatggagaagaaatgtgtacaaagctcgagttcctgcctgatgcgacgcttgcgcgtcttatcaggcctacaaattcccgcaccatccgtaggccggataaggcgtttacgccgcatccggcaacggtgccgactgcctgatgcgacgcttgcgcgtcttatcaggcctacaaattcccgcaccctccgccggataaggcgtttacgccgcatccggcaatggtgccgactgcctgatgcgacgcttgcgcgtgcttatcgaggccgtacaaattctccgcaccctcccgcaggacagcgccgagaactgcccttccggaatgcaatttcccgataccgccatcgcccacgccaatgtgcgcattgccggaagcgacatcatgatgagcgatgccatgccgtcaggaaaagccagtactccggctttacgctgtgctcattcgcaacagtcgagacaggcgcccgttctctggcggtaaaccccaggaaaagggctaacgggttcgccaaccacgtcgaggtttccatcgccacagggtcccacaagcaccaattccgtcaaaccacatcatga

SEQ ID NO: 127876 - DNA, 1341 bp, Homo sapiens
ctatcctgtcgtcatggaagtgatatcgcggaaggaaaatacgatatgagtcgtctggcggcctttctttttctcaatgtatgagaggcgcattggagttctgctgttgatctcattaacacagacctgcaggaagcggcggcggaagtcaggcatacgctggtaactttgaggcagctggtaacgctctatgatccagtcgattttcagagagacgatgcctgagccatccggcttacgatactgacacagggattcgtataaacgcatggcatacggattggtgatttcttttgtttcactaagccgaaactgcgtaaaccggttctgtaacccgataaagaagggaatgagatatgggttgatatgtacactgtaaagccctctggatggactgtgcgcacgtttgataaaccaaggaaaagattcatagcctttttcatcgccggcatcctcttcagggcgataaaaaaccacttccttccccgcgaaactcttcaatgcctgccgtatatccttactgggttgttcatagcttttttcatcgccggcatcttcttcagggcgataaaaaaccacttctttccccgcgaaactcttcaatgcctgccgtatatccttactggcttccgcagaggtcaatccgaatatttcagcatatttagcaacatggatctcgcagataccgtcatgttcctgtagggtgccatcagattttctgatctggtcaacgaacagatacagcatacgtttttgatcccgggagagactatatgccgcctcagtgaggtcgtttgactggacgattcgcgggctatttttacgtttcttgtgattgataaccgctgtttccgccatgacagatccatgtgaagtgtgacaagtttttagattgtcacactttctctctgctgcccttaacattttttccttcatttcaactttggtgaatctgacaattatgtgtcttggagtttctcttcccgaggagtatctttgtggcgttctctgtatttcctgaatctgaacgttggcctgccttgctagattggggaagttctcctggataatatcctgcagagtgttttccaacttggttccattctccacatcactttcaggtacaccaatcagacgtagatttggtcttttcacatagtcccatatttcttggaggctttgctcatttctttttattcttttttctctaaacttcccttctcgcttcatttcattcatttcatcttccattgctgataccctttcttccagttgattgcatcggctcctgaggcttctgcattcttcacgtagttctcgagccttggttttcagctccat

SEQ ID NO: 127877 - DNA, 954 bp, Homo sapiens
atggtgctgaccgtcatgttcttcgtcttcagttgtgtactgagcctgactccggcagaccttggctgcggtaagtctatcgaaatcaacaagctgaaccgtatcactgcgctgttcatgctggtaacgacctggattgttgccaccctgaacccgagcatcctgggtatgattgaaaccctgggcggtccaatcatcgcgatgatcctgttcctgatgccgatgtacgcaattcagaaagtaccggcaatgccctatgggcgcaacgtcaagcgtaatgatcccgcaaccatctgggtgattgtcccggatatctgcgatcccttcttcagcgaaattattcgcggtatcgaagttacgccggcaaatcacggatatctggtgctgattggcgactgtgcgcatcaaaatcagcaggaaaaaccttttatcgatttgatcatcaccaagcaaattgatggcatgttgttgctgggttcaaggctgccgtttgatgccagcattgaggaacagcgtaatctgccgccgatggtgatggcgaacgaatttgcaccggagctggagctgcctacagttcatatcgacaatctgaccgccgcatttgatgcagtaaattatttatatgagcaagggcataaacggattggctgtatagccggtcccgaagagatgccgctgtgtcactaccgcctgcaaggctatgttcaggcgctgcgtcgctgcggcattatggttgatccgcaatacatcgcccgtggcgacttcaccttcgaagccggaagcaaagcgatgcagcagctgcttgatcttccacaaccgcctactgctgtcttctgccatagcgatgtgatggcgctcggcgcatttctcaggcgggatgatgtcgggcttgcaatatatgcccaaaattccccgccagcaggcgttgctgaaaatcttatatcacaaatgtga

SEQ ID NO: 127878 - DNA, 910 bp, Homo sapiens
ttcttatgccgtcactgcccgtgatggtgctgccgctgctggcctttgcgggcggcatggcggggttgatattgctgaagatgctggcaaagacccaccagccgatgaagtggcgctcaccggcgtggcgctttctgcatgctgggccagcctgacggattatctgatgctctcgcgcccgcaggatgtgaacaacgccctgcggcagcttatggggccgtgactggagctttgtgaagattgccatcccgctgatgattttatttctgccgctgagcctgagtttttgccgcgatctcgacctccttgcactcggcgatgcgtgcgccaccacgctcggtgtgtcggtgccccatacccgattctgggctttgttactagcggcgtggccctgcggcccgattagctttattggtctcgtggtgccgcatatgatgcgtacatcaccggtggacgtcaccggagactgctgcctgtttcggccggggacaggggcgtgcgtgggagtatgaccgagcgccggtaccggatcctgtggacccttaagtaccattggggattgccacagccccggcagtttaccggtcagcttgagcatgaaattagtcagaatgtgccgtttgctaacgaatgggctgaattgctgttcgggcagttgtgattgttgctgaatcgccatcgttacaccagtgattcgtgcccgccaacatccagcgaaacgttgctggataagctgattacccggctggcggctagcctgaaaagtccctttgcgctggataaattttgtgatgaggcatcgtgcagtgagcgcgttttgcgtcagcaatttcgccagcagactggaatgaccatcaatcaatatctgcgacaggtcagagtgtgtcatgcgcaatatcttctccagcat

SEQ ID NO: 127879 - DNA, 1395 bp, Homo sapiens
ttacattttggcatgattttgcagtggctggtaccggttgttcctttccatgtttagcacttccttcaggagctcttttagggcaggcctggtggtgacaaaatctctgagcatttgcttgtctgtaaagtattttatttctccttcacttatgaagtttagtttggctggatatgaaattctgggttgaaaattattttctttaagaatgttgaatattggcccccactctcttctagcttgtagggtttctgccgagagatcggctgttagtctgatgggcttccctttgagggtaacctgacctttctctctggctgcccttaacattttttccttcatttcaactttggtgaatctgacaattatgtgtcttggagttgctcttctcgaggagtatctttgtggcgttctctgtatttcctgaatctgaatgttggcctgccttgctagattggggaagttctcctggataatatcctgcagagtgttttccaacttggttccattctccccatcactttcaggtacaccagtcagacgtagatttggtcttttcacatagtcccatatttcttggaggctttgctcatttctttttattcttttttctctaaacttcccttctcgcttcatttcattcatttcatcttccattgctgatacgctttcttccagttgatcgcatcggctcctgaggcttctgcattcttcacgtagttctccaggcttggtttccagctccatcagctcctttaagcacttctctgtattggttattctgttcactctgatgatagtttcttttgctgtgcagaagctctttagtttaattagatcccatttgtcaattttggctcttgttgccattgcttttggtgttttagtcatgaagtctttgcccacgcctatgtcctcaatggtattgtctcggttttcttctagggtttttatggttttaggtcttacatttaagtctttaatccatcttgaattaatttttgtatacggtgtaaggagagggtccagtttcagttttcttctgaagcctacttctgtcaatttgtcaaactcattctccatccagttttcttcccttgctggcaaggagttgtgatcctttggaggagaataggcattctggtttttggaattttctgccttttgcactggtttctccccatcttcatggatttccttacctttggtgtttgatgttggtgacctgccagaggccagctggagctctcctgtatgaggtgtctgttggcccctactggaaggtgtctcccagtcaggagacatgggggtcagtgacccatttgaggaggcagtctgacctttagcagagcttgaacgctgtgctgggagatctgctgctctcttcagagccat

SEQ ID NO: 127880 - DNA, 895 bp, Homo sapiens
atggggaaaaaacagagcagaaaaactggaaactctaaaaagcagagtgcctctcctcctccaaaggaatgcagttcctcaccagcaacagaacaaagctggacggagaatgactttgacgagttgagagaagaaggcttcagacgatcaaactactccgagctacaggaggaaattcaaaccaaaggcaaagaagttaaaaactttgaaaaaaatttagatgaatgtataactacaataaccaatacagtgaagtgcttaaaggagccgatggagctgaaagccaaggctcgagaactacatgaagaatgcagaggcctcaggggccgatgtgatcaactggaagaaagggtatcagtgatggaagatgaaatgaatgaaatgaagcgagaagggaagtttagagaaaaaagaataaaaagaaacgaacaaagcctccaagaaatatgggactatgtgaaaagaccaaatctacgtctgattggtgtacctgaaagtgacggggagaatggaaccaagttggaaaacactctgcaggatattatccaggagaacttccccaatctagcaaggcaggccaacattcagattcaggaaatacagagaatgccacaaagatactcctcgagaagagcaactccaagacacataattgtcagattcaccaaagttgaaatgaaggaaaaaatgttaagggcagccagagagaaagaagatctaactagccacaatattcccttaaaccaaagcctaatccagagtaaggctttaactctcatcaattctgtaaagcctgaaagaggtgaggaagctgcagaaggaaagtttgaaactggcagagatcggttcatgacgtttaaggaaagaaggtgtctccataacataaaaccacaag

SEQ ID NO: 127881 - DNA, 1727 bp, Homo sapiens
atgggaaaaaaacagaccagaaaaactggaaactctaaaaagcagagtgcctctcctcctccgaaggaacgcagctcctcaccagcaacggaacaaagctggatggagaatgactttgacgagttgagagaagaaggcttcagacgatcaaactactctgagctacaggaggaaattcgaaccaatagcaaagaagttaaaagttttgaaaaaaaattagacgaatggataactagaataaccccaccgcagagaaaggcccttaaaggaccctgatgggagcctgaaaaccccaaggcacaagaacctccgtgacgaatgcataagccctcagtagccgattcaatcagctggaagaaagggtatcactgatggaagatcaaatgaatgaaatgaagcgagaagacaagtttagagaaaaaagaataaaaagaaacgaacaaagcctccaagaaatatgggactatgtgaaaagaccaaatctacgtctgattggtgtacctgaaagtgacggggagaatggatctaagttggaaaacactctgcaggatattatccaggagaacttccccagtctagcaaggcaggccaacattcagattcaggaaatacagagaacgccacaaagatactccttgagaagagcaactccaagacacataattgtcagattcaccaaagttgaaatgaaggaaaaaatgttaagggcagccagagagaaagacagatcaacgagacagaaagtcaacaaggatacccaggaattgaactcagctctgcaccaagcggacctaatagacatctacagaactctccaccccaaatcaacagaatatacatttttttcagcaccacaccacacctattccaaaactgaccacatagttggaagtaaagctctcctcagcaaatgtaaaagaacagaaattataacaaactatctctcagaccacagtgcaatcaaactagaactcaggattaagaatctcactaaaagccgctcaactacatggaaactgaacaacctgctcctgaatgactactgggtacataacgaaatgaaggcagaaataaagatgttctttgaaaccaacgagaacaaagacaccacataccagaatctctgggacgcattcaaagcagtgtgtagagggaaatttatagcactaaatgcctacaagagaaagcaggaaagatccaaaattgacaccctaacatcacaattaaaagaactagaaaagcaagagcaaacacattcaaaagctagcagaaggcaagaaataactaaaatcagagcagaactgaaggaaatagagacacaaaaaacccttcaaaaaatcaatgaatccaggagctggttttttgaaaggatcaacaaaattgatagaccgctagcaagactaatgaagaaaaaaagagagaagaatcaaatagacacaataaaaaatgataaaggggatatcaccaccaatcccacagaaatacaaactaccatcagagaatactacaaacacctctatgcaaataaactagcaaatctagaagaaatggatacattcctcgacacatacactctcccaagactaaaccaggaagaagttgaatctctgaatagaccaataacaggatctgaaattgtggcaataatcaatagtttaccaaccaaaaagagtccaggaccagatggattcacagccgaattctaccagaggtacaaggaggaactg

SEQ ID NO: 127882 - DNA, 1856 bp, Homo sapiens
tcagattttagttatttcttgccttctgctagcttttgaatgtgtttgctcttgcttttctagttcttttaattgtgatgttagggtgtcaattttggatctttcctgctttctcttgtgggcatttactgctataaatttccctctacacattgctttgaatgtgtcccagagattctggtatgttgtgtctttgttctcgttggtttcaaagaacatcttcatttctgccttcatttcattatgtacccagtagtcattcaggagcaggttgttcagtttccatgtagttgagcggtttttagtgagattcttaatcctgagttctagtttgattgcactgtggtctgagagatagtttgttataatttctgttcttttacatttgctgaggagagctttacttccaagtatgtggtcagttttggaatagatgtggtgtggtgctgaaaaaaatgtatattctgttgatttggggtggagagttctgtagatgtctattaggtccgcttggtgcagagctgagttcaattcctgggtatccttgttgactttctgtctcgttgatctgtctaatgttaacagtggggtgttaaagtctcccattattaatgtgtgggagtctaagtctctttgtaggtcactcaggacttgctttatgaatctaggtgctcctgtattgggtgcatatatatttagggtagttagctcttcttgttgaattgatccctttaccattatgtaatggccttctttgtctcttttgatctttgttggtttaaagtctgttttatcagagactaggtttgcaacccctgcctttttttgttttccatttgcttggtagatcttcctccatccttttattttgagcctatgtgtgactattttggcatgattttgcagcggctggtaccggttgttcctttccatgtttagcgcttccttcaggagctcttgtagggcaggcctggtggtgacaaaaatctctcagcatttgcttgtctgtaaaagattttatttctccttcacttatgaagcttagtttggctggatatgaaattctgggttgaaaattcttttctttaagaatgttgaatattggcccccactctcttctggcttgtagggtttctgccgagagatccgctgttagtctgatgggcttccctttgagggtaacccgacctttctctctggctgcccttaacacttttttccctcatttcaactttggtgaatctgacaattatgtgtcttggagttgctcttctcgaggagtatctttgtggcgttctctgtatttcctgaatctgaacgttggcctgccttgctagattggggaagttctcctggataatatcctgcagagtgttttccaacttggttccattctccacatcactttcaggtacaccaatcagacgtagatttggtcttttcacatagtcccatatttcttggaggctttgctcatttctttttattcttttttctctaaacttcccttctcgcttcatttcattcatttcatcttccattgctgataccctttgtagttctcgagccttggttttcagctccatcagctcctttaagcacttctctgtattggttattctagttatacattcctctaaatttttttcaaagttttcaacttctttgtctttggtttgaatgtcctccagtagctcagagtaatttgatcgtctgaagccttcttctctcagctcgtcaaaatcattctccatccagctttgttccgttgctggtgaggaactgcgttcctttggaggaggagaggcgctctgcgttttagagtttccagtttttctgttctgtttttcccccat

SEQ ID NO: 127883 - DNA, 2618 bp, Homo sapiens
atgaatgaaatgaagcgagaagacaggtttagagaaaaaagaatagaaagcaatgagcaaagcctccaacaaagaggggagtatgtgaaaagaccaaatctacgtctgattggtgttcctgaaagtgacgggcagaatggaaccaagttggaaaacactctgcaggatattatccaggagaacttccccaatctagcaaggatttatcaaacactgaccatgtcctatcatggccttatttactatcccggaaagcacctggccgctggtcaccatggtggtgattatggggccaatctcgtttacggcgatatggcagaacagaaatgctcgaagatcctggcattcgcacacatcatgatggtgctgaccgtaatgttcttcgtcttcagctgtgtactgagcctgactccggcagacctggctgcggctaaagagcagaacatctcgattctgtcttacctggctaaccactttaacgcaccggttatcgcgtggatggctccgattatcgcgattatcgctatcaccaaatccttcctcggtcactacctgggcgcacgtgaaggcttcaacggtatggtgattaaatctctgcgtggtaaaggtaagtctatcgaaatcaacaagctgaaccgtatcactgcgctgttcatgctggtaacgacctggattgttgccaccctgaacccgagcatcctgggtatgattgaaaccctgggcggtccaatcatcgcgatgatcctgttcctgatgccgatgtacgcaattcagaaagtaccggcaatgcgggaatctttagagtgtttaactgaggtcaccatcatgccgttaagtccctacctctcttttgccggtaactgttccgacgcgattgcctattatcaacgtacgttgggcgcggaactgctctataaaatcagcttcggcgaaatgccaaaatcagcgcaggacagcgccgagaactgcccttccggaatgcaatttcccgataccgccatcgcccacgccaatgtgcgcattgccggaagcgacatcatgatgagccaatgccatgcggtcaggaaaagccagctactccggctttacgctggtgctcgattcgcaacaggtcgaagaaggaaaacgctggtttgacaaatcttgccgctaacggaaaaatcgaaagggctgggcaggaaactttctgggcgcatggctttggcaaagtcaccgataaatttggccctactcaatgtaaagatcacaaggatgaagacctttatagtgatccacttccacaatgtaacaacgcctttctgggacttgccggcagcttatggggccgtgactggagctttgtaaagatggccatcccgctgaagattttatttctgccgctgagcttgagtttttgccgcgatctcgacctccttgcactcggcgatgcgcgcgccaccacgctcggtgtgtcggtgccccatacccgattctgggctttgttactagctgtcgccatgacatctaccggcgtggccgcctgcggcccgattagctttattggtctcgtggtgccgcatatgatgcgtagcatcaccggtggacgtcaccgcagactgctgcctgtttcggccctgacaggtgcgttgctgttggtggttgccgatctgctggcgagaattattcatcccccactggagctcccggttggcgtgctgaccgccattatcgacaatgcacgagttaatgtcgccatgaaccagacccggatcaatcatcttgccgttcgtcggttaaccgagctttccggcggtcagcgccagcgcgcatttctggcaatggtcctggcccagaatacgcccgttgtattacttgatgagccaaccacctatcttgatatcaatcaccaggtggacctgatgcggttgatgggcgaactccggactcaggggaaaacggtggtcgctgtgctgcacgaccttaatcaggctagccggtactgcgatcaactggtggtaatggcaaacggacatgttatggcgcaaggcacaccagaagaggtgatgaccccaggattgctgagaacagtattcagcgtggaagcggaaatacaccccgagccgcatcgggagatgctcgatcaggtgctgaaactcttttccattgtacctgactacgatctcaacataatgcagccaggacagggcctgacagagataacctgtcggattctggaagggctaaaacctattcttgccgagttcaaaccagacgtcgtgctggttcacggcgatacgacgacgacgctggcaaccagcctggcggcgttttatcagcgtattcctgttggtcacgttgaggctggtctgcgcacgggcgatctctattcgccgtggccggaagaggctaaccgtacattgaccgggcatctggcgatgtatcacttctctccaaccgaaacttcccggcaaaacttgctgcgtgaaaacgttgcggatagccgaatcttcattaccggtaatacagtcattgatgcaggatgttgccagtacccaaggccagcgatgtgccggttcatgtgccctttaggcagcgcctgtaatccacgtggcacgacttccgcaacatatgctgactga

SEQ ID NO: 127884 - DNA, 1797 bp, Homo sapiens
tcaagtagttttttccaattctgtgaagaaagtcattggtagcttgatggggatggcattgaatctgtaaattaccttgggcagtatggccattttcacgatattgattcttcctacccatgagcatggaatgttcttccatttgtttgtgtcctcttttatttccttgagcagtggtttgtagttctccttgaagaggtccttcacatcccttgtaagttggattcctaggtattttattctctttgaagcaattgtgaatgggagttcactcatgatttggctctctgtttgtctggtgttggtgtataagaatgcttgtgatttttgtacattgattttgtatcctgagactttgccgaagttgcttatcagcttaaggagattttgggctgagacgatggggttttctagataaacaatcatgtcgtctgcaaacagggacaatttgacttcctcttttgctaattgaataccctttatttccttctcctgcctgattgccctggccagaacttccaacactatgttgaataggagcggtgagagagggcatccctgtcttgtgccagttttcaaagggaatgcttccagtttttgcccattcagtatgatattggctgtgggtttgtcatagatagctcttattattttgaaatacgtcccatcaatacctaatttattgagagtttttagcatgaagagttgttgaattttgtcaaaggctttttctgcatctattgagataatcatgtgggttttgtctttggctctgtttatatggttggcctgccttgctagtattggtggaagttctcctggaataatatcctgcaggagtgttttccaacttggttccattctccccatcactttcaggtacaccaatcagacgtagatttggtcttttcacatagtcccatatttcttggaggctttgctcatttctttttattctttttttctctaaactttccttctcggcttcatttcattcatttcatccatttcatcttccattgctgataccctttcttccaagttgatcgcatcggcatcctgagggcttctgcatgtcttcacctagttctcgaggccttggctttcaagctccatcagctgctcctttaagcacttccctggtaatgggtaatcctagttatacattcttgctaaaatttttttccaaagttttcaacatcgttgccctttgggtatgaatgtccccccgtaggctcagagtaattttgatcggctgaagccttcttctctcagcgcgtcaaaaatcattctccatccagctttgttccgttgctggtgaggaactgcgttcctttggaggaggagaggcgctctgctgtttagagtttccagtttttctgttctgtttttttccccatctttgtggttttatgtacttttggtctttgatgatggtgatgtacagatgggtttttggtgtggatgtcctttctgtttgttagttttcctttgccgccttgcagtttgatctcagactgcagtgctagcaatgagcgagactccgtgggtgtaggaccctccgagccaggtgcgggatataatcttgtggtgcgccgttttttaagcccgtcggaaaagcgcagtattcgggtatgagtgacccgattttccaggtgccgtccgtcacccctttctttgactcggaaagggaactccctgaccccttgcgcttcccaagtgaggcaatgcctcgccctgtttcggctggcgcacggtgtgcgcacccactctcctgcacccactgtctggcactcc

SEQ ID NO: 127885 - DNA, 1877 bp, Homo sapiens
  misc_feature (1)...(1877): n = a,t,c or g
ttgcaggtcgattttagaggttgaaaaatggttcccttcgctttgcggttgttgccaccaatttaagtacgggacgtgaattatggtttactgaaggcaatctccatcttgctattcgcgcatcatgcagtattccaggactcatggcacctgttgcacataacggctactggctggttgatggagcagtcgttaacccaattcctatttccctcacgcgtgcattgggggctgatattgtgatagcggttgacctgcagcacgatgctcatttgatgcaacaagatttgctctcctttaatgtcagtgaagaaaatagcgagaatggtgattctctgccgtggcatgcgcgtctgaaagaaaggttaggcagcataacgacacgtcgggcggtgacagcgccaacggcaacagagattatgaccacttctatccaggtgctggagaaccgccttaaaaggaaccgcatggcaggtgatccgcccgatattctgattcaacctgtttgcccgcaaatatctacgcttgatttccatcgcgcgcacgctgccattgcggccggacagctggcagtggaaaggaaaatggacgaacttttgccgttgaaaggcgatcgcgccaatgcagtggcgaatctggaaaaagccctcgcactggacccgcacagcagcaacaacgacaaatggaacagtctgctgaaagtaaaccgctactggctggcgatccagcagggcgatgctgcgctgaaagccaataatcctgaccgggcagaacgcctgttccagcaggcgcgtaatgtcgataacaccgacagttatgcagtgctggggctgggcgatgtggcgatggcgcgaaaagattatcccgccgccgaacgttattatcagcagaccttgcgtatggacagcggcaacactaacgccgtgcgcgggctggcaaatatttaccgccagcaatcgccagaaaaagctgaagcgtttatcgcctcgctctctgccagtcagcggcgtagcattgatgatatcgaacgcagcctgcaaaacgaccgtctggagagcaagtttatccaggggctgttctttgctggtcagattaacggcactaccggttacgaagaagccgctgcgcaaggtttgctggccggtcttaacgctgcccgtctgtctgctgacaaagaaggttgggctccggcacgttctcaggcgtatcgggtacgagctaggggtcgtgtcagngtggtgttagggcatgttttctcacccagtgatgcacagcttgcgcagctcaatgacggcgtgcccgttagcggcagtagtgggttgttcgacctggttcagaatatgtcaccggaacagcaacaaattttgctgcaggcttcagcggcgtccactttttcaggattaatcggtaacgccattctcgccggaggcgtaatattaattatccagctggtgtctgcgggtcagagagtcagtgcgctgcgagctattggtgccagtgcgccgatattgccaaagttatttattctgatttttctgactacccttttagtacagattggcatcatgctggtggtcgttccgggaattatcatggccattttactggccctggcaccggtgatgttggtacaggacaaaatgggcgtttttgcctcgatgcgtagcagtatgcggctgacttgggcgaatatgcgtctggtggcacccgcagtactgagctggttgctggcaaaaacactgttgctgctttttgcctcttcttttgccgcattaaccccggaaattggtgccgtactggcgaacaccttgagcaacctgatttcagccatattgctcatctatctgttccgcctgtatatgttgattcgccaataa

SEQ ID NO: 127886 - DNA, 444 bp, Homo sapiens
atggtggatcaccaggctgcaactcttgctgatcataagaaaattcatacgggagaaaaaccccacaaatgtgacaaatgtggcaaagcttttaactgctcctcaaaccttactagacataaaaaaattcatactgatgagaaactctacaaacctaaaagatatgacaatgattttgacaacacctccaacttttctaaatatacaaaaaatcatcctggtgaaaaacctttaaaatgtgaagaattgcagatgctctggtatgagcttccagggtacctgagactgccctgtaagcagctgtggccagactgggtccctgggagaggccagcagaccaaggagtgctcagttggaccagcttcttctgatttgcaagaccatcctgcagaaattaggcccaacagttccgtagggctaaagtctcttatgggagacagttga

SEQ ID NO: 127887 - DNA, 810 bp, Homo sapiens
gtggaggctgtgtgctgttgcactaaaggtggtgttggcttggggcaggatactggccagtaaaggttttgatgccttctctgtgccccccaagaaagagtgattgttcagagtgtgggaggttaccctgttctctgcacagtgttagcacaaaggcaggggtggagttttctggctctctgcccaccaaagtttcatctacaatggcagttgctgggagtggcaggggcatactacatttccatttgctggtggggcaagcaaagccaaactcacctttgcagacatgtgccagcaaagtaatatggggagttgccatggtcttgggggaagctggagtatagggaagaaacatgtgagctggtgcagtcacaggggctgccttgccggagctcttcatgggtcaggcatggcccaccagtgcagatgctatggtatgggctcctagggtacctgagactgccctgtaagcagttgtggccagactggatccctgggagaggccagcagaccaaggagtgctcagttggatcagcttcttctgatttgcaagaccatcctgcagaaattaggtccaacagttcccctagggctaaagtctcttatgggagaaagttgaaacctatggaaatggccgttaatggccacacttctacttaagggggcttttgcacctaaaccctttgggttaccaccatgaaccggggttgcttgcccccacctttttgcctgtcttctggttgctgcatctcagagacgtgtaggccagcaatcactcagtgcaagccgaacaagaaggaggaactttga

SEQ ID NO: 127888 - DNA, 618 bp, Homo sapiens
tatgctggggccaagaggaaattttcttgaatgatccccccccgtagctttccacggctccactgggtctgcgatccaaaacttcagatcctaacagttgggcttttcaaacaacccagtttttaaaaatgaatgtggcttacccccaacattccagctgatcaaaagtacttgtttagaaaaataagtttaggaatgaagtggaaacaaggcctttgaaatgcagcttaacctaaatagcacattttagacttttcctccccactgcacattctttatggtgtaggggccagggagcctgcagtcttcacccctcctgagccctccttggcctcgggcttcctctcccctgctgctgaggccttcagtcaggggctggcatctgggagaaccttgaaactgtttcccatcccctttggcagcaagcaacaagcaccaaaacgctccagttaaccccagtgcaatcatcgttaacgtgaaacagctgcccgaggcctggcgtatccaccagaccgccccctcccctccatgctcagctgtgagtcaccagagaccccggctaaggcagggcccgggagggagcggggatgcgaaaaatgttgatggagcccagctgcg

SEQ ID NO: 127889 - DNA, 399 bp, Homo sapiens
atgtccctgcagacagccagcggcaccaaggcctgtccttggcaggtgtgcccagcaacagagggctcctcctggggaggcctgtccagctgccaggccccgccccgccacagcccccgctgtcctcctccctccctcagccgtgccagcagcggcacagaactggaattgccctggacggccacagctctgcatatcccccaggagtgtggacaagaaaaaataaacacaattagagttcacgacaatgggcccctgatggaagcaagcaacaagcaccaaaacgctccagttaacaccagtgcaatcatcgttaacgtgaaacagctgcccgaggcctggcgtatccaccagaccgccccctcccctccatgctcagctaggaagttgtccgcataa

SEQ ID NO: 127890 - DNA, 399 bp, Homo sapiens; identical to SEQ ID NO: 127889

SEQ ID NO: 127891 - DNA, 922 bp, Homo sapiens; identical to SEQ ID NO: 124894

SEQ ID NO: 127892 - DNA, 699 bp, Homo sapiens; identical to SEQ ID NO: 124895

SEQ ID NO: 127893 - DNA, 489 bp, Homo sapiens
ctatctcaagtaggcctgattccgcttcttcccactgtcagcatttggcagtttactccagggttcagctggtggaggaaggtgacagtcctggcaccccgccaagtacatcccggtggccacggccgccgcgctgctggtcggctccagcaccctcttcttcgtgttcacgtgagtcggcgccgcgtctgggggcacgcgggcagcgatgggcagggcccgcacagcccgggcacgggggcagcggtcgcgggggctggcggggccccgggcagtgggcgggcggggcgccggctgcaggcgatggcagtccctctccacccgctggggcccccttccaccaatctggggttgagacatagcccaggtggcacgaacgatggccacctgttccaaggtggggccacccctgagcatgtgagcctctgctgaactcctccgagactgctcagttcctgagaaggggttctgttgggtcggctggcccat

SEQ ID NO: 127894 - DNA, 450 bp, Homo sapiens
atggtgcggcgcgggcggccgcggggcgcgcggggaaggcgggagagcggcgcgggtgagtgggagcggcggctccggcatcagtttcggggatcgtgtaatccgatcccttctgactcacaagccctgagtgacagttctgatttggttcaaccgcgggagggaggggaaagagaaagaaagaaacccccagccgtacgcctctcctggcatccaatcgactttctggaaaaaggcttctctgattaccaccgccccccatccttggctccccatctccttgttttacattttcccaaagccatccccgaaactccctctcgcgggatgatgcctttggaagttcagggtttttctctccaccggactcgtctgccctcggggccaaatccgcgaagcgaggaggagctcccaccacacagcctgctgtccctatgggccactttataa

SEQ ID NO: 127895 - DNA, 274 bp, Homo sapiens
ggacatggatgaagctggaaaccatcattctcagcaaactgttgcagggacaaaaaaccaaacaccgcatgttctcactcgtaggtgggaattgaacaatgagaacacatggacacaggaaggggaacatcacacactggggcctgttgtgagatttctagaagctctcaatcactttgagaaagcaagaaccttgatttatcgtcttcctggagtgttaacttggcccacgagtaatgtgattattgaagagtctcagccacaaaaaataaag

SEQ ID NO: 127896 - DNA, 545 bp, Homo sapiens
atgggcaaggacttcatgactaaaacaccaagagcaatggcaacaaaagccaaaatagataaatggaatctaattaaactaaagagcttctgcacagcaaaagaaactaccgtcagcatgaacaggcaacctacagaatgggagaaaatttttgcaatctacccatctgacaaagggctaatatccagaatctacaaagaactcaaacaaatttacaagaaaaaaaacaaccccatcaaaaagtggacaaaggatatgaacagacacttctcaaaagaagacatctatgcagccaacatacacatgaaaaaatgctcatcatcactggtcatcagagaaatgcaaatcaaaaccacaatgatatgccatctcattgtggcagttagaatggcaatcattaagtcaggaaacaacagatgctggagaggatgcggagaaataggaacacttttacactgttgggacatggatgaagctggaaaccatcattctgagcaaactatcgcaaggacagaaaaccgaacactgcatgttcttactcatag

SEQ ID NO: 127897 - DNA, 404 bp, Homo sapiens
tctctctttgctctcagggacatggatgaagctggaaaccatcattctcagcaaactatcgcaaggacaaaaaaacagacaccgcatgttctcactcacaggtatgatggcatattcctgtggtaccagctacttaggagactgaggtgagagatacagcttgagccagggaggttgagcctgcagtgagccgtgaatatgccacttcactccagcctgggcaacagagccagatcccatctccaagggaaaaaaaaaaccactcctagatgattactctagaatagaatctatgtcctcaaggagccatgaaagggaactcaaaggatttcaggattggcaggtgtgcaggttttggcttaataaaacaaatctcagggcttgaccctgtacacattaaaaaa

SEQ ID NO: 127898 - DNA, 432 bp, Homo sapiens
atggatgaagctggaaaccataattctcagcaaactatcgcaaagacaaaaagccaaacactgcatgttctcactcataggtgggaattgaacaatgagaacacatggacacaggaaggggaacatcacacaccggagactgttgtgggggggaatggcaaaaaccaagtggagcagagtcctcagtccctgatcatcctggagggaaagaactgcactcttcaatgcaattatacagtgagccccttcagcaacttaaggtggtataagcaagatactgggagaggtcctgtttccctgacaatcatgactttcagtgagaacacaaagtcgaacggaagatatacagcaactctggatgcagacacaaagcaaagctctctgcacatcacagcctcccagctcagcgattcagcctcctacatctgtgtg

SEQ ID NO: 127899 - DNA, 370 bp, Homo sapiens; identical to SEQ ID NO: 126982

SEQ ID NO: 127900 - DNA, 214 bp, Homo sapiens; identical to SEQ ID NO: 126193

SEQ ID NO: 127901 - DNA, 420 bp, Homo sapiens; identical to SEQ ID NO: 126197
  misc_feature (1)...(420): n = a,t,c or g

SEQ ID NO: 127902 - DNA, 525 bp, Homo sapiens; identical to SEQ ID NO: 125829

SEQ ID NO: 127903 - DNA, 289 bp, Homo sapiens
atggaatactatgcagccgtaaaaaatgatgagttcatgtcctttgcagagacatggatgaagctggaaaccatcattctcagcaaactatcacaaggacagaaaaccaaacactgcatgttctcactcaaagatggaagacgttgccagcaggatcaaaaaaccctggattcatgtggcagatgcagggctggacccagtctaaatactacactgaaaccaaagagagtgaaaactgtatctgggaacaggataaaaagcaaccagaccaataaactgcagaagaaag

SEQ ID NO: 127904 - DNA, 997 bp, Homo sapiens
atggaatactatgcagccataaaaaaggatgagtttctctcctttctagggacatggatgaaactggaaaccatcattctcagcaaactatcgcaaggacaaaaaaccaaacactgcgactctagaggactccccgcgaccgagcgaaatcatctggtgaccgaagagggcgaatgctggtttgattcgccgatcatcgctgaatatattgaattaatgaatgtcgctccggcgatgttgccgcgcgatccgctggagtcgttgcgggtgcgcaaaattgaggcactggcggatggcattatggatgccgggctggtatcggtgcgtgaacagaagaggtttcagttaacaagtgctaaaaggacaaaatcaactttttatgggggcaaaaatccatggggcattcgtattgacgccaacgttatgcaaggcatctggcaaatgaccaaacagggcgatgcgataacggggtcgatggtctttttctgcgttattggtgccccgctcattctggtgacctccatagcttatttatggtttggtaaccgactgggaatgaatttacgtccggtactgctgatgcttgagcgacttaaagagtgggtaatgctcgatatctacctggtcggcattggcgttgcttctataaaggtacaggattatgcccatatccaggctggtgtcggcttgttctcttttgtggcgttggtgattttaacgacggtgacgttgtcacatcttaatgtcgaagaactgtgggagcgattttatccgcagcgccccgctacgcgtagggacgagaaacttcgtgtctgtcttgggtgccattttaccggctatccagatcagcgtggtcgctgcccgcgttgccatatcccgtacagactgcggacctgcacgcctgaaaggttggcggccagtggcagaaagacagagggcaaacctcagacagtatacagagaggaagagagagagacacagagagagagagagtcac

SEQ ID NO: 127905 - DNA, 192 bp, Homo sapiens
atggaatactatgcagccatcaaaaatgatgagttcatgtcctttgtagggacatggatgaaactggaaaacatcattctcagcaaactgttgcaaggacaaaaaaccgaacaccgcatgttctcactcataggcctttgtgaaatccggggcgacaaggtgggctcttctgtgcacgaaactttccctaag

SEQ ID NO: 127906 - DNA, 314 bp, Homo sapiens
atggatgaagctggaaaccatcattctcagcaaactatcgcaaggacagaaaaccaaacaccgcatgttcttactcatagttcagggtcacaggtggccagagcccctcgcagccgggacccctgtggacaggaggacatcccatcgcagagcacactcacacacacattcacactcgcttacactgggaccactcacacacacattcacactcgctcacactgggaccacacagatctgccagttcattccacttgcacagctctgagatgtgggaggaaacagcagtacccggcaaaagccaacacagacag

SEQ ID NO: 127907 - DNA, 210 bp, Homo sapiens
atggatgaagctggaaaccaccattctcagcaaactattgcaaggacagaaaaccaaacactgcatgttctcactcatagggattttgccgatttcggaaccaccatcaaacaggattttcgcctgctggggcaaaccagcgtggaccgcttgctgcaactctctcagggccaggcggtgaagggcaatcagctgttgcccgtctcactg

SEQ ID NO: 127908 - DNA, 269 bp, Homo sapiens
atggaatcctacgcagccataaaaaatgatgagttcatgtcctttgtagggacatggatgaagctggaaaccctcattctcagcaaactatcgcaaggacaaaaaaaccaaacactgcatgttctcactcacagacgtgatcgcacgtcgtcgttcgtggacctcgatatagctgatgagtgttggtacatcgatatggagacgccgtgcaagtgcctcatcgtatcgagatctgtcgggatagacatgcgctcgtgtagtcgatgtac

SEQ ID NO: 127909 - DNA, 663 bp, Homo sapiens
atgggtcttaaatattgtgctctatatagattccaggtcaaaaagaataaaacatctggaattgtactagttttattgtctggtgaattaaaaaaggaggaggaggagaggacaaataagaaaaatgaaagaggaggaggggaacagaaggacatggatgaagctggaaaccatcattctcagcaaactatagcaaagacaaaaaaccaaacaccgcatgttcttactcataggtgggaattgaacaatgagtacacttggacacaggaaggggaacatcacacactggggcctgtcatgagccaagatcatactgaatgggcaaaagttggaagcattccctttgaaaactggcacaagacaaggatgctctctctcaccaatcctattcgacagagtattagaagccctggccagagaaatcaggcaagaaaagagataaaggacattcaaatagtaaaagaggaaatcaaactatccctgtttgcagatgatatgattctgtctctagaaaatctcacagtctctgctaaaaagctccttctgcttataaacaacttcagcaaagattcaagatacaacaccaatgtacaaaaatcaacaggaagactgagagccaaatcaggaatgcagtcccattcacaattgccacaaaaagcataa

SEQ ID NO: 127910 - DNA, 537 bp, Homo sapiens
atgctgctgttggagagccaggttcgcaaaagtgagcacatgcatagctgtggcagagctagggtctggagaatgtgtatggatgtaactgccttggttctgggtcagtggtgggcacaggattgcgaggggttagtggctctaataccagggttctttcttactggagcgaaccacgggatgtctctcaatctggggattccaagggacacggatgaagctggaaaccatcgttctcagcaaactatcgcaaggacaaaaaaccaaacactgcatgttctcactcataggtgggaattgggcaatgagaacacttggacacaggaaagggatcatcacacaccagggccttttgtggggtggggggaggggggagagatagcattaggagaaatatctaatgcaagccctaaagcagagcttagtccacaagggttcttggctttgcacaggagagagtgtaacgccaagccagaggtaaaagaaaacagcttttctgaagcagcagtgttacagctccagtggtgttacagctct

SEQ ID NO: 127911 - DNA, 1215 bp, Homo sapiens
atccttgcaagctccctaacaagcacacactcagaaaaagaagggggaatacaatggagcagaagaatcagaggactaccaatttccttacgattgcctccaattgctggagaccttagggacatggatgaagctggaaaccatcattctgagaaaactatcgcaaggacagaaaaccaaacactgcacgttctcactcataggtgggaactgaacaatgagaacactcggacacagggtggggaacatcacacaccagggcctgtcatgggtgctgccaaacttaataagagtgacatcatggataaggcaagtaacaagattagcacgtcaaaacgtaggaataactatgcttctggaaagaatgacaaaaggaaaaaatctaaaattctaatgtcggatcacaataaaagtgcagagcaaaagacaagaatagaagaggtgaagagacaacccctagcgccaacgctcggtactatccgtcttatttctggatcaaatcaacggtgtgaccgctgcggtggaggaactgggcgcactttaagtgaccgcagtgtctgctctagggcgtgcagacagcccccaggggagtgtgcaacagcggccagggcaagcggcgagggagcccgcggcctattctcccgagaactgccgctatccagcccgctgtcccaaaagcaccgaagcttggtggcgtcgacgaaaattacccagaaacagcgcttttgcatggggacttgggctccggacgcgagagggctgcatctgtgtttccataaacctgtcgagatcgctcgaggtcacctgcgactgaaagcagacaataaagcgcgcagctgtggcggcggccactacggctgggaaaccccggggcctgaacactgcggctttgccgaattatttgagggctcttcagatccaggaattccaggtgaagctgacaagcaccttggtattccaggactgggaggatggggaaggcatctctttgccaatgcgaggctccttcttccccatcgcccccctagtcaactccccaccccctataaaatcaaagaagctcagggcagaaaatttcttattggaaaaagcaatatccaaatgctttcggcactcaaatgccctttcgaaaatattgtcgacgacggttattacccggacaatgctgtcaatttctgtagtctgcagaaaatctttcctcagatagaaaaatag

SEQ ID NO: 127912 - DNA, 641 bp, Homo sapiens
atgctaaatgaaaagtttaaattttattccaaatgtagtaggaaattactaagtgaaggtgaccatcagatttgcatttttgaacgatcactcttactgctgcaggaaaaaaggattgaagaaaggccagcaaggaaagttgttggggttatcacaggaaacaggcaagtgacagtggtggggcttggtctagagttggggcagtggaaatggaaatgtgtggaagatcaaagactacagtcaaaatttggtgatagattcgatatagcagatgagatggggaattgtcaaatgactccttccagactgttagcaactagggacatggatgaagctggaaaccatcattctcagcaaactatcgcaaggacaaaaaaccaaacaccacatgtcctcattcataggcgggaattgaacaatgaggacacttggacacaggaaggggaacatcacacactggggcctgttgtggggaaagaaaaggcagaaggagaaaacaggattcagacaccagctgatttacagatttgtgataagaagatgtcgggaatcttccctctggtggtttctgttttctcaaaaaagcatgaggcaagtcatcagcttaaagcctgtgcagttagtgcatgtgagaagaacag

SEQ ID NO: 127913 - DNA, 804 bp, Homo sapiens; identical to SEQ ID NO: 120427

SEQ ID NO: 127914 - DNA, 1401 bp, Homo sapiens
atgggcaaggacttcatgtctaaaacaccaaaagcaatggcaacaaaagccaaaattggcaaatgggatctaattaaactaaagagcttctgcacagcaaaagaaactaccatcagagtggacagggacatggatgaagctggaaaccatcattctcagcaaactgttgcagggacaaaaaaccaaacaccgcatgttctcactcataggtgggaattgaacaatgagagcacatggacacaggaaggggaacatcacacaccggggcctgttggtcattatcgttattgtgatgctctttctatgctgggggaatatgactgggccctgcaagcaaacataaaagctcaaaaactctgtaaaaatgaccctgagggaatcaaggatctaattcagcagcatgtaaagttacaaaaacaaatagaagacctacaaggtcgaacagcaaataaggatccaattaaagccttttatgaaaacagggcctacacacctaggagtttatcagcacctatatttactacttcacttaactttgtggagaaggaaagagatttcagaaaaattaatcacgaaatggccaacggtggtaatcagaatctaaaggtggcggatgaggcgttgaaggtagatgattgtgactgtcatcctgaattttcaccaccatcaagtcagcctccaaaacataaaggaaaacaaaaatctcgaaacaatgaatcagaaaagttcagttctagttcaccattgactttaccagcagatttgaagaacatcttggagaaacagttttctaaatcttccagagctgcacaccaggattttgctaatataatgaaaatgctgagaagcttaattcaagatggctatatggccttattggagcagcgttgccgcagcgctgcacaggcctttacagagttgctgaacggtttagatcctcaaaaaataaaggaattatctgaagccgaaaaccagtttaagaggattattgaacactaccccagtgagggccttgattgcttggcctactgtggaattggaaaagtatatttgaaaaaaaacagatttctagaagctctcaatcactttgagaaagcaagaaccttgatttatcgtcttcctggagtgttaacttggcccacgagtaatgtgattattgaagagtctcagccacaaaaaataaagatgctgttagagaaatttgttgaagaatgcaagttccctccagtgccagatgccatttgttgctatcagaagtgccatggatattctaagatccagatatacataactgatccagactttaaggattttctacaaggaatatgtcttacccctgactgtgaaggtgtcatttctaagattatcatcttcagcagtggtggtgaagttaaatgtgaa

SEQ ID NO: 127915 - DNA, 1827 bp, Homo sapiens
atgaggaaacgcattctaggggacaatagcatggaggtcaaagcgctcaagatgtgcacagacaatagcaggctgcatggccagattgtacacggtgtgcaggagaggaacaagatgaaagctggaacctgtttctgttccatcaatgtcttcaaaatcccacgaataaaggatgaatttttgttgtctttgagtcgcaaaggtggaagagaccttcaaacatatgtacatggttcactctctattcttccacctccccaacaagggcagcccagtctctccctggatgtcttccatgaagtatggtcatccaagtttcaggaagagtcagaaactggaacgctaagtgacaagactggagaggagagagccctcctggatgctccctctagtagtggtaaacatcatagtcagactcatcctaatgatatgggggcagaggaaagcaatcaaatattgaaccattgcttattccagaccagggctactgcagtttgctgggggggttcacttcaggccctgttcatctggtttgctcccgtgcctgaagatgtcactcaaggaggctcctgtatagggtgtctgacaatccctgttggagggtctcaaccagttgggtggcacagggaacaagacccatttaacgaagcactttgttccttggtggagggggggcctcaggcccagggagatctgggatctgtccctgagcctctggctggagtttttggagttcctgcagggaagccccacccagtgaggaaggatgagtcagggtcaggtacaatctcctattctattctggccactgtggttagtggagagaatgtgttaaaagcctccctaaagaaggaagaattagatcacactgatggatgtgttgctgtgattgaaggtcagtcctggaaagagcatggtaatatggaaaaatcaagcttcctcactctgagtggcaaatgtttagggagtggatcagagagctgtctgcagcagcagaatatggtgatcacacttattcctttttcactctgtcgtcgttcatctaccatgggcagggacatggatgaagctggaaaccatcattctcagcaaactatcacaaggacagaaaaccagacaccgcatgttctcactcataggtgggaattgaacaatgagaacacttggacacagggcagggaacattttctcagttttggaggcttggcatctaagatcaagatgccagcaagtgaatgcatatgtcatttctctgactctggggtttccaaactgcaagctacagaatccataaaagagtcttattcattcaacaagcatataatgagtacctgctatgtggcagacactgttctagtactcagtgataaaaacaaacaattcttaccttgccctagaatggaaaagagatctgcttttcagttaatattcactgactgcctgctggtgccaatcattgtactaggtgctggagatacatccatggatcagctctacgtggcctctggtctgctggtgtttgcaggactgatttctgctgtctgccttgtggccatagccagagctgctgattctgcgctggatacagccaaggccctggactgtgactcctattacagccctgcagctctttttggagtgggaaggggtcattttcctggggttagaactctctttagttttctcaacacaggattactgaactctgaagaggaagaggaagattcatcaggtcctcaagccaggaggctttctggtgagctgctctggctgtgcacggaccctaaatcagcaaacagattacctcttatccctttctcaatgtag

SEQ ID NO: 127916 - DNA, 1233 bp, Homo sapiens
atggtgttaagaggaaagtttatagcactaaatgcctacattaaaaagttggaaacatctcaaattaacaacctaacattacacctggaggaactagaagaacactggcaaactaaccctgaagctagcagaataaaaccaataaccaaaatcagagctgaattgcatgcaattgagaggacatacactcacgcctatgctgcctttttgaaaagtacaaggtccttaaagacattcacactgttggacctagtacagctacaagttggaaattatcataggaaaacaaccagagatatacagggatccttgctaccgccctgcagtttgatctcagactgctgtgctagcaatcagcgaggctccgtgggcgtaggaccttccgagtcaggtgtcggatacaatctcttggtgtaccgtttgttaagcccattggaaaagtgcagtattagggtgggagtgacccggttttccagggacatggatgaagctggaaaccgtcagtctcagcaaactatcgcaaggacaaaaaaccaaacaccacatgttctcactcataggtgggaactgaacaatgagaacacatggacacaggaaggggaacatcatactctaggaggagcgactcaagccttcgcgaaagaaaataaccaaaaagcatacaaagaaacgtacggcgtctctcatattacacgccatgatatgctgcagatccctaaacagcagcaaaacgaaaaataccaagtgcctcaattcgatcaatcaacgattaaaaatattgagtctgcaaaaggacttgatgtgtgggacagctggccgctgcaaaacgctgacggaacagtagctgaatacaacggctatcacgttgtgtttgctcttgcgggaagcccgaaagacgctgatgacacatcaatctacatgttttatcaaaaggtcggcgacaactcaatcgacagctggaaaaacgcgggccgtgtctttaaagacagcgataagttcgacgccaacgatccgatcctgaaagatcagacgcaagaatggtccggttctgcaacctttacatctgacggaaaaatccgtttattctacactgactattccggtaaacattacggcaaacaaagcctgacaacagcgcagtcttcaccacggggcgtcaaggaccgcgctggcgaaaaacggtacttcagcccgtgggaagatctgtttgttttgaagaaattaagaaaatag

SEQ ID NO: 127917 - DNA, 744 bp, Homo sapiens
cgtcgacaaattgaggagtcatcaaagtatggaggacattggaagagaaggagcaagatgacatgacttcaagagtgggtgcaggtgggctgcttcccatcatgggacatggatgaagctggaaaccatcattctcagcaaactatcacaaggacagaaaaccaaacaccgcatgttctcactcgcaggtgtagaaacaggcataaagagatgaagtacttgccagggtcacacagctggtctatcatggagcaggacacaggaagaactgccctgtttaaagcagaggagagggcaggggtctgcagtcctgccactgatccttcccacagcacagattctgagaataaaaaagagagaaagaacaagagagagagagagaggaggaggaggaggaggaagagaagagaagagaagagaagagaagagaagagaagagaagagaagaggagagaagaggagagagagaaagacagaagaaagagaaagaaagaaaagagagaaagaaaggagagacagaaaggagagagaaaagagaaagaaagagagagagagaaagagagagaaaaagaaaggaaggaaggaaagagagagagacagaaagaaagagaaaaagagagagagagaaagagaaagaaagagaaagaaagaaagaaagaaagaaagaaagaaagaaagaaagaaagaaagaaagaaacagaacagacagacccgggagccagaaacaaaagcagaaatcggtga

SEQ ID NO: 127918 - DNA, 627 bp, Homo sapiens
ttttgttgtaaaactgtaaaataagcaaggccaaatatttattgtttggcaacacatagagatatatagagttttacatgtaaaattacctataaatgtcaacagcacattgacatggtaaatacgaagttcaaaatgggatatccctggcatggaatagagagctgggatggcggagggccacacgggaagctgcaatagaatttttgatgtttgcttcattctctaggtgatgtgttcactggtgttcatcttatcatgtttttaaattgacaagcatgttacatatacaccacagaatactatgcagccataaaaaatgatgagttcatgtcctttgtagggacatggatgaagctggaaaccatcattctcagcaaactgtcacaaggacaaaaaaccaaacaccgcatgttctcactcataggtgggagttgaacaatgagaacacatggacacaggaaggggaacatcacacaccgggacctgttgtggggtgtgaggaaccttcaccaccccattttgtggtacaaccatcatttactgatcaaaacagaaaactgatcgtggtcattgtttcttctctctccctgaaacgctatttcccatacaacccaaaaagtctcg

SEQ ID NO: 127919 - DNA, 497 bp, Homo sapiens
gcgtcgacggcgggggtgtcttactatgttgctcaggctggtctcaagttactgggcctaagcctctcaaagtgccgggactacaggtgtgagccaccatgcccagagtagatgagtttatacaaagttatggcaatggcaaggaaagctatgagtctgtaacatctacttctttttggatgagttcatgtactttgcagggacatggatgaagctggaaaccatcattctcagcaaactatcacaaggacagaaaaccaaacaccgcatgttctcactcgtaggtggaaattgaacaatgagatcacttggacacagggttggggaacatcacacactgggcctgtcatgggatgggggaaggcattctgttgctcctgagataggaatctggcaggacttgttttaccagaaaccaatcgctaagaccccactggtgaaacaggatgaggtgaagaagccagtcaaaacctgccaaaacaaagatggccacaaaa

SEQ ID NO: 127920 - DNA, 1334 bp, Homo sapiens
tcaggaactggagcagcaaagagaagaacaaaagcgcagagagaaggaagcggaggagaggcagcgagcggaggaaagcaggctctgtgctccttgaagcaagcgctccagaggctccggaagccacggctggattggagacaagatgggatcctcagaggaccaggcctatcgcctccttaatgactacgccaacggcttcatggtgtcccaggttctcttcgccgcctgcgagctgggcgtgtttgaccttctcgccgaggccccagggcccctggacgtggcggcagtggctgcaggtgtgagggccagcgcccatgggacagagctcctgctggacatctgtgtgtccctgaagctgctgaaagtggagacgaggggaggaaaagctttctatcgaaacacagagctgtccagcgactacctgaccacggtcagcccgacgtcacaatgcagcatgctgaagtacatgggcaggaccagctaccggtgctggggccacctggcagacgccgtgagagaaggaaggaaccagtacctggagacgtttggcgttcccgctgaagagctttttacggccatctacaggtccgagggcgagcggctacagttcatgcaagctctgcaggaggtctggagcgtcaacgggagaagcgtgctgaccgcctttgacctgtcagtgttcccacttatgtgtgaccttggtgggacacggataaagctggaaaccatcattctcagcaaactatcgcaaggacagaaaaccaaacaccgcgtgttctcactcataggtggggctggagctctggctaaggaatgcatgtctctgtaccctggatgtaagatcaccgtttttgacatcccagaagtggtgtggacggcaaagcagcacttctcattccaggaggaagaacagattgacttccaggaaggggatttcttcaaagaccctcttccggaagctgatctgtacatcctggccagggtcctccatgactgggcagacggaaagtgctcacacctgctggagaggatctaccacacttgcaagccaggtggtggcattctggtaattgaaagcctcctggatgaagacaggcgaggtcctctgctcacgcagctctactctctgaacatgcttgtgcagacggaagggcaggagaggacccccacccactaccacatgctcctctcttctgctggcttcagagacttccagtttaagaaaacaggagccatttatgatgccattttagccaggaaataactgtttcttgtgacctggaactaacgtcaaagcacacaagacataataataaagacatgtacctcca

SEQ ID NO: 127921 - DNA, 720 bp, Homo sapiens
atggagcagctctcaccgatggccagctcctaccactctgaccacgctgctgtctccctggccatcttctttgactacaaaggaataaaactaggtatcaagctggcggctgttcccagtgccttgcccacccctgccgggccgtcggactcggcggggcccctgtggcatccctgtccagtccctgtcaccacccagtttttccctctggacccaggaattcaaagtaagcaaggaggtccgctgctccagttggctgcaaataattacaaccttaagcccaagcagcactttgggtcctggtttgggaccatgaagcggctcgggacatggatgaagctggaaaccatcattcttagcaaactatcacaaggacaaaaaaccaaacaccgcatgttctcactcataggcagtacagatcagcagcggctcgtagtgaagaacgttcaaggaagagtttgtcccggatcaacaggacatggggcttgggaagcctggactgccatgaggaaggtcgattcaccactacagacagggagcctgaggcctgggtggtgccgacaagtcggcagtcacgccaggtcaggaagcgccgaagccgcgggaaaccctggactccatcccgggatttgtccccgtgtcgaagatggtatccaggtcgccgaaaacttcccggaagtttagaccaagacctacttattatctacggtgtccgggaag

SEQ ID NO: 127922 - DNA, 262 bp, Homo sapiens
atggaatactatgcagccataaaaaaggatgagttcgtgttctttgcagggacatggatgaagctggaaaccatcattctcagcaaattatcacaaggacaaaagaccaaacaccgcatgttctcactcatagaggcgcccgacgtcccgacagctcctggagtgagaccaggactgagaacagggagaggcgacccgacccccagggcccggtgctcaggacaggtgaggggaaggaaagggtgctgacgggagtggggag

SEQ ID NO: 127923 - DNA, 618 bp, Homo sapiens; identical to SEQ ID NO: 126992

SEQ ID NO: 127924 - DNA, 2059 bp, Homo sapiens
atggatgaagctggaaactatcattctaagcaaactatcacaaggacagaaaaccaaacacagcatgttctcactcatagtgaggaaactgtggctcaggaagatgatgtgcctttgacaaggtcatggttgctgaaagcactcaagccccaagaggttcagagcagagccaagtcccctgatggccagtacaaagaggaggagaaagagaaggacagcagagggtgctctctgctggatttccccagcatgccagcttcccactgtgcagataaagcaaaatctgataggagcggggaggaagtgggctcaggctccaggagtacaagttggtatgcaagcaagtcattccaaacgccgcctccacacaaaccctctgagctgcaaattattaacctgcttaactctattgcagaaacaagcgctgctggggtgttggaagttctggccagggcaattaggcaggagaaggaaataaagggtattcaattaggaaaagaggaattcaaattgtccctgtttgcagatgacatgattgtatatctagaaaaccccattgtctcagcccaaaatctccttaagctgataagcaacttcagcaaagtctcaggatacaaaatcaatgtacaaaaatcacaagcattcttatacaccaataacagacaaacagagagccaaatcatgagtgaactcccattcacaattgcttcaaagagaataaaatacctaggaatccaacttacaagggatctgaaggacctcttcaaggagaactacaaaccactgctcaatgaaataaaagaggatacaaacaaatggaagaacattccatgctcatgggtaggaagaatcaatatcgtgaaaatggccatactgcccaagaaagaagttcttcagatgcgaggtttcaacaaaaccactgtggttacacagttcatcctggtgggtttctccagcctgggggagctccagctgctgctttttgtcatctttcttctcctatacttgacaatcctggtggccaatgtgaccatcatggccgttattcgcttcagctggactctccacactcccatgtatggctttctattcatcctttcattttctgagtcctgctacacttttgtcatcatccctcagctgctggtccacctgctctcagacaccaagaccatctccttcatggcctgtgccacccagctgttctttttccttggctttgcttgcaccaactgcctcctcattgctgtgatgggatatgatcgctatgtagcaatttgtcaccctctgagggacatggatgaagctggaaaccatcattctcaggaaactattgcaaggacagaaaaccaaacactgcatgttctcactcataggtgggaattgaacattgagaacacatggacacaggaaggggaacatcacacactggggcctgttgtgggttcatgcttccctttgccagctgtctgctgttctcagggttgcttggaacagcttcataactgctggtgcccatggcaagaagatgatattgattccaagatcttctcatttgtcaaccaatcctgggcacgaggggagggctcaggatggctggacgagttgcagactcatggctgggacagtgaatcaggcacaataattatcctgcataactggtccaagggcaacttcagcaatgaagagttgtcagacctagagttgttatttcgtttctacctctttggattaactcgggagattcaagaccatgcaagtcaagattactcgaaatatccctttgaagtacaggtgaaagcgggctgtgagctgcattctggaaagagcccagaaggcttctttcaggtagctttcaacggattagatttactgagtttccagaatacaacatgggtgccatctccaggctgtggaagtttggcccaaagtgtctgtcatctactcaatcatcagtatgaaggcgtcacagaaacagtgtataatctcataagaagcacttgcccccgatttctcttgggtctcctggatgcagggaagatgtatgtacacaggcaag

SEQ ID NO: 127925 - DNA, 381 bp, Homo sapiens
atggataaattcttcgacacatacaccctcccaaaactaaaccaggaagaagttgaatctctgaatagaccaataacaggctctgaagttgaggcaataattaatagcttaccaaccgaaaaaagtccaggaccagatggattcacagccgaattccaccggacatggatgaagctggaaaccatcattctcagcaaactatcacaaggagaaaaaaccaaacaccgcatgttctcactcatagcttcccactgctacggtgtggctacggtttgttcatccccaccaaatctcatgttgaaatttgatccccagtgtggtggtattgacaggttgggcctagtggaaggtttctgggtcatggaggtggacacctcatga

SEQ ID NO: 127926 - DNA, 2039 bp, Homo sapiens
atggccttcctagaaacttctgcacccctgtatgaacacatatggacacttcaggttgctttctccactgttggtctgggagagaccctgaaagttgccatgatcagcatgtccacatcatctgggtattttcttcagctattacaatactgctgctcctcaaccatcaccatcactggatacaagggcttcctaagagacctgaaggtggagacaagggccgatggtgtaatgaggacaatggctcccgaaaagctgctaaagagtatgccaatactacagggacaaattgatgcactgcttgaatttgatgtgcatccaaatgaactaacaaatggtgtcataaatgcagcatttatgcttcttttcaaagatcttatcaaactttttgcttgctacaatgatggtgttattaacttactcgggacatggatgaagctggaaaccatcattctcagcaaactattgcaacgacagaaaaccaaacactgcatgttctcactcataggtgggaatcgaacaatgagaacacttggacacaggaaggggaacatcacacaccagggcctgtcgtggggaggccagatgccacaccaaaggacatccaagcagcacaagaagttcatgtggacaggaacagagagctggttgcaggcaaaaggcctaaactatcaacagctgtagatccttcagccccaatcaaggcttcaggctgcttttccccactgtgcactccacatggcttcatgctgctgcagactccacccttcccagtggctccccaggcagcactcacaaactgctctcgccagctctcccgcggaggggcctactctgggggacaggaaatattgagagaccttggccttgatattccagaggttattcttttctgcttgacctcgagttacagagatgcagatgaagtcaaagaggataccagatgcagccagtctgctggggaggcacgtacgtctgagtgggcccagcacagctgttctccagggcaaggcttggccatggcagctgccccagcgcccgcattcagcccaacccaccaggtcaccccagtccagtccgtggtgctcagatccccaagcaatcacaggctttcggggaaagatgactctgagggaaaagagaggcagcaggatgaggagcccagcaaagagattggcagcattcgcccctgctctagagatctgtggaactctgaatttgagagagatgatttagggtatctggcagaagaaatttctaagtggcaaagtgttttgaacaaagcagagcataaacaaatcagagaaaactgctttgacaaagcaaagcataaaagtttggaaaatctgcagcctgacaatgagatagaaaagaaaaccccattttctggggagaaattcaagctggctgcagaaatttgcataagtcatgaggaattgaatgttcaccacctagacaatggggaaattgtctccaaggcatgtcagagacctttagggcagcctctgccatcacaggcctggaggcctaggagggaaaaatggtttcctgggctgaatccagtgcccctcagctatgtgcagcctcaggacttggtgccctgcatcccagctgctccagccgttaccaatgtacagctcagaccattgtttcagagggtacaagccccaagccttggcagcttccacgtggtgttgggcctccgtgtgcacagaagtcaagaattgaggtttgggaacctccatctagatttcagaggatgtatagaaacacttggaagtccaagcagaagttcacttcagggatggagccctcatggagaacctctgctaagagcccccactggggcactgcctactggagctatgagaagacggccacagtcctccagactccagaacggtagatccactgacagcttataccatgtgcctggaaaattctcagacactcaacaccagcccgtgaaaacagccacgaggggtgctataccctgcaaagccacagggacacagctgaccaagactatgggaacctag

SEQ ID NO: 127927 - DNA, 1974 bp, Homo sapiens
atggataaattcctcgacacatacaccttcccaagactaaaccaggaagaagctgaatctctgaatagaccaataacagactctgaaattgaggcaataattaataggttaccaaccaaaaaaagtccagggaacagacagattcacagccgaattctaccagaggtacaaggaggagctgatcttcagagggaaggcactgagagtggagagaggaaagacccagaagctggaggtatgagggggaaggctgggaatcctatacaggactatagcacacccagacttgttcctggccctcagtggctctgggggaacagggacatggatgaagctggaaaccgtcattctcagcaaactattgcaaggacaaaaaaccgaacactgcatgttctcactcataggtgggaactgaacaatgagaacacttggacacaggaaggggaacatcacacaatggggcctgtcataggacctatgggaactctgctagactccactggtctgaacactgacacttggaagccttataactgcatctgtccagcttcagacagagtgcctgatcagatattgcctgaggacacttgcagacaggaatataattttggcaatactgaaaatggtgtcatgatgcaaccaagagaggctactgaagctgaggacactgacgcccacagcactcaagtgactgttccaggtcaaatagctgagaataaaatacctaggaatccaacttacaagggatgtgaaggacctcttcaagaaaaactacaaaccactactcaaagaaataaaagaggacaaaaactaatggaagaacattccatgctcatggataggaagaatcaacatcatgaaaatggtcgtactgcccaagggacatggatgaagctggaaaccgtcattctcagcaaactatcacaaggacagaaaaccaaacaccgcatgttctcactcataggtgggaattgaacaatgagaacacttggacacaggaaggggaacatcacacaccagggcctgtcatgggaattagaaaaagctattttgaaattcatatggatccaaaaaagagcccaaatagccaatataatcctatgcaaaatgagcaaaactggaggaatcatgctacccaacttcaaactatgccacagggctacagtaaccaaaacagcatggtagtggtacaagaacagacacatagaccagtggaacagaacagagtacccaggattaagcccacacacatacaaccatctgatcatctaaaaacctgacaaaaacaagaaatggggaatggattccctatttaataaatggtgctgggaaaactggctagccatatgtagaaagctgaaactggatcccttccttacaccttatgcaaaaatcaattcaagatggattaaagacttacatgttagacctaaaaccataaaaaccctagaagaaaacctaggtaataccattcaggacataggcatgggcaaagacttcatgacgaaaacacctaaagcagtggcaacaaaagccaaaactgacaaatggcatctaattaaactaaagagcttctgcacagcaaaagaaactaccatcagagtgaactggcaacctacagaatgggagaaaatttttgcaatctacccatctgacaaagggctaataaccagaatctacaaagaactcaaacaaattcacaagaaaaaatcaaacaaccccatcaaaacggacatggatgaagctggaaaccataattctcagcaaactatcgcaaggacaaaaatccaaacaccgcatgttctcactcataagtggaaattgaacaatgagaacacatggacacaggaaggggaacatcacacactggggcctgttgtggggtgttggtatctatggctgacagacctgaagacaaatcacatcacaggactctttgtggacactcccaaggacctgcctggagcccagtag

SEQ ID NO: 127928 - DNA, 1383 bp, Homo sapiens
tgttggattgatccttttatcattatataatgttccttttgtctaataattttctttgctctggagtctactgtatttgatattaatagtgtcactctgttttgattaatgtttgtacagtttatctttttatatactttatcaacctacgttgttcattatgttatgagtttcctaagaaaacatttttaggatgggtggagcaagatggtggaatagagaacaccaccgatcatacccactccccccgcaggaagactaagattggcaactatccacacaaaagcagcagtttcacaggaactaaaagtcagggacatggatgaaactggaaaccatcattctcagcaaactatcgcaaagccaaaaaaccaaacactgcatgttctcactcataggcacctaagagagaaaatcttcatcctacccttgggtcaaccacttagtcacgaatctctcatagtggtgtggaatccccggtcaaactggacagctgtgcaagcttttggcttagtgaagtcccacttcttccctaaagatacagtgtcctactcaaggacctgcccccctgaattgtttcttgccgctgtccctgtgctcacaggcatggactatgagatctatgaggtcagggactggggctcccctggatggtctggcctcagagctgctcaacaggagtccatgggcttttccctgaacacctgtgatttaagtacaacaagacctgctaacggttcttcctgggtcaaggggaccgagagatggtatgaagttcccagaagagccagagagagaaagcagaaccgcctaattctgatcctgactgtgcactctccacctggaaaaacgataatcaggtggaaatgcagaggagccacctggagcttgcactgcccccgacagtacaacgaatgtgctgcagacagggcaggtggaaggcgaggagaaaggtttcaggatccagtggcctcatgggtgatgagatggggtcccactgtgttgcccagactgagtgatgttattgtgacacagcttcagactcagtccccaactgtgcactgtgggagccacagcagtggaaatgtacgtgcacgtgcagcagcccaagggtggaagctgcagaggctggagggaggtgatgttgccaagcaaatgcagcagaaccagcctgactgcctgaaactgtgcctcaaaatagggaaaaacagggagaaacctgtaagcaggagcactagatgctacagccctgctgctcaaagtgtggtccatgaactagcagcatcaccaccacctgcagaagctcaggtcccactccctgctgaatcagaatctacagctcatgaagaaccccaggtggtttacaagcatactgaagtttga

SEQ ID NO: 127929 - DNA, 1438 bp, Homo sapiens
tatttaataaatggtgctgggaaaactggctagccaaatgtagaaagctgaaactggatcccttccttacaccttatacaaaaattaattcaagatggattaaagacttaaatgttagacctaaaaccataaacaccctagaagaaaacctaggcaataccattcaggacataggcatgggcaaggacttcatggctgaaacaccaaaggcaatgggaacaaaagtcaaaattgacagatgggatctaattaaactaaagagcttctgcacagcaaaagaaactaccatcagagtgaacaggcagcctacaaaatgggagaaaatttttgcaatctacttatctaacaaagggctaatacccagaatctacaatgaactcaaacagatttacaagaaaaaatcaaacaaccccatcaaaaagtgggcgaaggatatgaacagacacatctcaaaagaagacatttatgcagccaacagacacatgaaaaaatgctcatcatcactggccatcagagaaatgcaaatcaaaaccacaatgagataccatctcacaccagttagaatggtgatcattaaaaagtcaggaaacaacaggtgctggagaggatgtggagaaaacaggaacacttttacactgttggtgggactgtaaactagttcaaccattgtggaagtcagtgtggtgattcctcagggatctagaactagaaataccatttgacccagccacccccattactgggtatatacccaaaggattataaatcatgctgctataaagacacatgcacacgtatgtttattgcggccacctattcacacaatagcaaagacttggaacccaaccccaaaatgtcccatccaatggatagactggaaatgaagaacatgtggccccttatacacccatggaatacctatgcagcccataaaaaaatgatgagttcgtgttcgtgtcctttgtagggaccatggatgaagctggaaacccatcattctcagcaaactatcgcaaggacaaaaaaaccaaacaccgcatgcttctcactcataggtgggaattgaacaatgagaacacttggacacaggaaaggggaacatcacacaccggggggcctgttggggggacatggatgaagccggaaaccatcattctcagcaaaatatcacaaggacagaaaaccaaacaccacatgttctcactcataagcgggagttgaacaatgagaacacatggacacagggaggggaacataacataccagggcctgttggcagctctgtgtgggccccagccaatttcacaccagtacccctctcatctcccacccaacactcccatgttgacatcactgcagactccactaatgcccacgctctggaatgcacaatccagaggagcaagggggtgaatcttagaccaagcacatcccggga

SEQ ID NO: 127930 - DNA, 468 bp, Homo sapiens
atgggctgcagggagaaatttggtccccgcaactctgctgtgaggtggacattggcccattttacaaaagaggagtcgatatgtgccccatttggggcagcggcagatggaaagggggcagggccctgctacacagatgtggtccgcgggccacagcgttgtgtcacctgggatcctgttagaactcccatgtttcattatcaagtgcattttccaccgaagtccagtagcaaacaggccctgggcttggaggtcacctgctgtgaaaggtgtgtctcctctatggagctctgccacctgtggctcctgcggcccctcaaagcatcttggctgaacatacccagcccagtcaataggcccatcagcgagcccgagaccgaggacgagaagaagcgctttgaggaaggcaaagggcggtacctgcagatgaaggcgaagcgacagggccacgcggagcctcagccctag

SEQ ID NO: 127931 - DNA, 1534 bp, Homo sapiens
tttttttttccagccaagcagcagctttattagtggtgctgggttcttcccataccctacagcgtgctcggaagcattccgcgccgggcctgccagacacctgcgcccttctgcagccgcccgccgcatccgccgccgcagcccccagcatgtcgggcccagacgtcgagacgccgtccgccatccagatctgccggatcatgcggccagatgatgccaacgtggccggcaatgtccacggggggaccatcctgaagatgatcgaggaggcaggcgccatcatcagcacccggcattgcaacagccagaacggggagcgctgtgtggcagccctggctcgtgtcgagcgcaccgacttcctgtctcccatgtgcatcggtgaggtggcgcatgtcagcgcggagatcacctacacctccaagcactctgtggaggtgcaggtcaacgtgatgtccgaaaacatcctcacaggtgccaaaaagctgaccaataaggccaccctgtggtatgtgcccctgtcgctgaagaatgtggacaaggtcctcgaggtgcctcctgttgtgtattcccggcaggagcaggaggaggagggccggaagcggtatgaagcccagaagctggagcgcatggagaccaagtggaggaacggggacatcgtccagccagtcctcaacccagagccgaacactgtcagctacagccagtccagcttgatccacctggtggggccttcagactgcaccctgcacggctttgtgcacggaggtgtgaccatgaagctcatggatgaggtcgccgggatcgtggctgcacgccactgcaagaccaacatcgtcacagcttccgtggacgccattaattttcatgacaagatcagaaaaggctgcgtcatcaccatctcgggacgcatgaccttcacggagcaattaattccatgagattcaaggtgttgttggacccagcccctgttgtggacagctttcagaagcgctaccggggccgccagtgcctttcttcaacctaggtgtcgctgagccaggaaaggcaggttcgctgcctgtgccccagctggtgccccgagaccgaggacgagaagaagcgcttttgaggaaggcaaagggcggtacctgcagatgaaaggcgaagcgaccagggccacgcggagcctcagccctagactcccctcctcctgccactggtgcctcgagtagccaatggcaacgggcccagtgtccagtcacttagaagttccccccttgggccaaaaacccaattcacattgagagctggtgttgtctgaagttttcgtatcacagtgttaacctgtactctttcctgcaaacctacacaccaaagctttatttattatcattccagtatcaatggttacacagtgtttgtcccgagcgccgggaggcgtttgggggcaggaaacccttcgggaatggttttccgagcacggtgttagggtatggggaagaacccagcaccactaataaagctgctgcttggctggaaaaaaaaaaaaaaaaaa

SEQ ID NO: 127932 - DNA, 421 bp, Homo sapiens
gtttaaccaggtagagataaacgaaagctttcagcagctgaactatcacacaaatcacaattaaggtggcatatgtgtttggaagacgtaaaatcaattcccgtgaagataatgttttagtctctatttgaacttgaaaacagaagtaaattttcagtagcaacagctggtcttgttccatccaggaggctctctattaactgtataagaagggcctttattacctcttctaatggttttcctctatggttttgtcttcatcaaaaaggcccagttgattgttgtgttgctgtttactgatgtggcacagaggacggcagctgggcgcccacccaccccggtgttgggccctccctcccctgagtgctgtttattgtttatggagggagaacaatggatcctgggaacaactggtcaggct

SEQ ID NO: 127933 - DNA, 465 bp, Homo sapiens
atggcgggcgcccctcccccagcctcgctgccgccttgcagtttgatctcagactgctgtgctagcaatcagcgagattccgtgggcgtaggaccctccgagccaggtgtgggatatagtctcatggtgcgccgttttttaagccggtctgaaaagcgcaatattcgggtgggagtgacccgattttccagcactgttcagaataaccaagatttggaagtgaaactggcctcgttgtctggggtgtcatcacccgaagttcttagtctcacagcccaagatatcaaggatgaggacactccaagggtgaggtctggaggcgggaagtccaagatcaaggctctggaaggtttggtgtctggtgaggggccagtctctgcttctaagatggcaccatttttgctgcgtcctccagagaagatgaatgttgtccacattgtggaagagatggaagggcaaaagtga

SEQ ID NO: 127934 - DNA, 926 bp, Homo sapiens
  misc_feature (1)...(926): n = a,t,c or g
tgccttgcagtttgagctcagactgctgtgctagcaatcagcgagattccgtgggcataggaccctccgagccacgtgtgggatataatatcctggtgatccgttttttaagcccgtcggaaaagcgcagcccccgccgtgggagtgacccgattttccagtgcttgggaaccctcacaactggcagggattttgccgatttcggaaccaccatcaaacaggattttcgcctgctggggcaaaccagcgtggaccgcttgctgcaactctctcagggccaggcggtgaagggcaatcagctgttgcccgtctcactggtgaaaagaaaaaccaccctggcgcccaatacgcaaaccgcctctccccgcgcgttggccgattcattaatgcagctggcacgacaggtttcccgactggaaagcgggcatgattatcgtgtcctggtgggcgagctggatgatgagcagatggctgcattatccagattgggtaccgattatcgcccaacaagtgcttatgaacgtggtcagcgttatgcaagccgattgcagaatgaatntgctggaaatatttctgcgctggctgatgcggaaaatatttcacgtaagattattacccgctgtatcaacaccgccaaattgcctaaatcagttgttgctcttttttctcaccccggtgaactatctgcccggtcaggtgatgcacttcaaaaagcctttacagataaagaggaattacttaagcagcaggcatctaaccttcatgagcagaaaaaagctggggtgatatttgaagctgaagaagttatcactcttttaacttctgtgcttaaaacgtcatctgcatcaagaactagtttaagctcacgacatcagtttgctcctggagcgacagtattgtataagggcgataaccatggtgcttaa

SEQ ID NO: 127935 - DNA, 1335 bp, Homo sapiens; identical to SEQ ID NO: 126236

SEQ ID NO: 127936 - DNA, 756 bp, Homo sapiens
atggtgggctcccctcccccagcctcgctgctgccttgcagtttgatctcagactgctgtgctagcaatcagggagactccgtgggcgtaggaccctctgagccaggccttttacgcgtgctgttccctctgcccactttaccaccctgccccacttttgtacccctttatccagttcatctgtccctcccatcttgccttcaaattacttcctcttgtgtccgcaattggtgggttcttggtctccctgacttcaagaatgaagccgcggaccctcaaggtggcaatgcagtggtggatggttgtggcaaggcccagaacagcacggagctcgctgcagaggagtacaccctcatgagcatagacaccatcatcaatgggaaggaaggtgtgtttcctggactgatcccaattctgaactcttaccttgaaaacatggaagtggatgtggacaccagatgtagtattctgaactacctaaagctaattaagaagagagcatctgtggtctctcttatggagaaaatttttacccgatcaacttattctcgtgaagcacaagggcctgatatgaacaccccttctgtaggcattttcaaagaacttagtgaggtgccagcagctagaagtccaaaatcaaggtgtcagcagggccatgctccctctgaaggctctatggaaaaattatttcttgcttcttctagtttctggtggttgctggcaatccttggcgttcctggatttgcagcagtgtaa

SEQ ID NO: 127937 - DNA, 519 bp, Homo sapiens
atggtgggcgcccctcccccagcctcgctgccgccttgcagtttgatctcagactgctgtgctagcaatcagccagactccgttggcgtaggaccctccgagccagggccagccgtgaagggcaatcagttgttgccggtctcactggtgaaagaaaaaccaccctggcgcccaatacgcaaacggcctctccccgcgcgtggccgattcattaatgcagctggcacgacaggtttcccgactggaaagcgggcagtgagcgcaacgcaattaatggattttgccgatttcggaaccaccatcaaacaggattttcgcctgctggggcaaaccagcgtggaccgcttgctgcaactctctcagggccaggcggtgaagggcaatcagctgttgcccgtctcactggtgaaaagaaaaaccaccctggcgcccaatacgcaaaccgcctctccccgcgcgttggccgattcattaatgcagctggcacgacaggtttcccgactggaaagcgggcagtga

SEQ ID NO: 127938 - DNA, 475 bp, Homo sapiens
cccacatgcaggcagtttctgcagcactggagggattgctctaagcttgtactttatgatttaagattaaatctactttaatactcaagagtcattctgtcctcctaggcctctgaagtctgtgatgggaggggctgccacaaaggtctctgaaatgccttcaaggccttttccccattttcttggccattagcacttggctcctttttacttatgcaaatttctgcagcctgcttgaattccttccctgaaaatgggctcttcttttctaccacatagctggctgcaaattctccaaacttttacgctctgcttcccctgtaaatataagttccaacttaacataatttctttgctcacaaatatgaccataggttgttgaaagcagccagggcgcatcttgaatgctttgctgcttagaaattttttctgccagataccctaaaatcatcactctcaagttcaaacttccaca

SEQ ID NO: 127939 - DNA, 1095 bp, Homo sapiens
atggaagatgaaatgaatgaaatgaagcgagaagggaagtttagagaaaaaagaataaaaagaaatgagcaaagcctccaagaaatatgggactatgtgaaaagaccaaatctacgtctgactggtgtacctgaaagtgatgcggagaatggaaccaagttggaaaacactctgcaggatattatccaggagaacttccccaatctagcaaggcaggccaacgttcagattcaggaaatacagagaacgccacaaagatactcctcgagaagagcaactccaagacacataattgtcagattcaccaaagttgaaatgaaggaaaaaatgttaagggcagccagagagaaagaggtctttgttccagagggaggaaccctgccacgaggaaacacaacaatgattccattaaactggaagttaagattgccacctggactctttgggctcctcctagctttaaggcaacaggctaagaatggagttacagtattggctggggtggttgacccggactatcaagatgaaatcagtctactactacacaacagagaaatcctcaatgttagtacattacagcaaagctatagttctggggaaaagcaggtatcttttttgatctcagactgctgtgctagcaatcagcgagattccgtgggcgtaggaccctccgagccaggtgtgggatatagtctcatggtgcaccgttttttaagtctgtctgaaaagcgcagtattcgggtgggagtgacccgattttccaggtgcgtccgtcacccctttcttcgactcagaaagggaactcctgaccccttgcgcttcccaaaaattcagaagctgctcaaactccagtgcagtcatggagcctccattacctgggaggcagcctccaagcagcatgcagccttgtcagaaactgcaccgccaagggtgagaatggcattagaagcaaagaggaaagattcaaacaggaacgagaatttggacaagcgaacactctgtgctgctcaagggaagagcacagtggaagtccaagggcgagtgtgtgcccagggcagggcaactgggctatgggctgattcccgggatgcatga

SEQ ID NO: 127940 - DNA, 744 bp, Homo sapiens
atggtgggcgccccttccccagcctcgctgctgccttgcagtttgagctcagactgctgtgctagcaatcagcgagattccgtgggcataggaccctccgagccacgtgtgggatataatatcctggtgatccgttttttaagcccgtcggaaaagcgcagtatttgggtgggagtgacccgattttccagcatacgttttgcttcttcactggtggatgcagcctttcttcagcctcttgaagcaaccatgggtaataagcgcaactgtaaatcaaaaccagttaatcttagaagccaaagaatgaccacaaacaaacttaagaactttactaggctcaagcagtattatcttgatgataaagacaacagttatcaactattatttaacaagtcattaaatgtgtgctactacctgtctcagtctgagatgaaaggagacgtctgtaccactgtgcaggaagagtggattctctgtggctctaatccctgtgtacttctggaactacctggtgcagcacaggctaactggggaaaagaatgtgcagccaggaatgtgttgtgggccagggagcttgagatgggtgtatggggacttggcttcaagagccatcttgggcaactcactctggctctgagtcctcatttgaaaatcattgggttgcactctgttatctgtggtctccaacctgggaaacctgggaaccacaggttaaaacaacaacaacaacgacaacaacaatga

SEQ ID NO: 127941 - DNA, 2883 bp, Homo sapiens
atggcatggcagctggctgctctcagaatgacttgtcgggagagagagggtaagacacagggtaagcgtggcctttatgacttggctggggagccacgagctattgtgtggctgtatgctatggtcatgcagaccagcactgatgcaacacggcccgagcaggctcctctccatcagctgaagtccttcatctctcccatccttcctgctacgtgttccagggatggctcagctacatacctgaggcctggcaagttcactgatggctcctgcagaagcacaaactgcatgtctcccggtgacttggactgcactgacaccagttggattttacccagcagaccagatgcaggtgggagattccccatccgcacccctccctgtgtgcttgtggttcataagccaagccgacactgcagggagtggactgccaatactgtgttacctaagggcgctttggcaaagtggcttcttgagcccaaagcagacctacagggctggcatctgccagcagatgggcagtatacaaaaccttcaattagttacaacatcaaactttacatcaactgttataaccggactgtgactacggcagctcagcaccaacaggttcagaggaagcatggagcctccatcttcttggcagaaaatgtcgctgtgagggagaaagacaaagaggaacgcaaggtgactagggctccaacagagcaggcctggactgcaggatcgtggatagaaacagcctatagagaaataaagggagtagggcaagaaagtgtttgcataaccgtaatgcaccttgaagagttagtgtatgaactagcctggatcattatgtctgctgtggtagaggcttttgatccagtagcaccatccagcaaatgccggcttaacccagacccagacccttactgctgcacaccttacacactacacactagcccacctcctccaccttcctgctgcacaccctacaccctgcacactggcccacctccacagacacctttctgctgcacaccctataccctggacaccagcccatctccacagacacattcctgctgcacaccctacaccctacacactgtccccaccttccaccttcctgctgcccaccctatacacttgcacaccatcccacctccacagacacaaggccagggctttgtaagtgaggatgagtacctggagatctctgacatcaagcgagaccagtccggggagtacgaatgcagcgcgttgaacgatgtcgctgcgcccgatgtgcggaaagtaaaaatcactgtaaactatcctccctatatctcaaaagccaagaacactggtgtttcagtcggtcagaagggcatcctgagctgtgaagcctctgcagtccccatggctgaattccagtggttcaaggaagaaaccaggttagccactggtctggatggaatgaggattgaaaacaaaggccgcatgtccactctgactttcttcaatgtttcagaaaaggattatgggaactatacttgtgtggccacgaacaagcttgggaacaccaatgccagcatcacattgtatgttgaccacatagttggaagtaaagctctcctcagcaaatgtaaaagaacagaaattataacaaactatctctcagaccacagtgcaatcaaactagaactcaggattaagaatctcactcaaaaccactcaactacatggaaactgaacaacccgctcctgaatgactactgggtacataacgaaatgaaggcagaaataaagatgttctttgaaaccaacaagaacaaagacacaacataccagaatctctgggacgcattcaaagcagtgtgtagagggaaatttatagcactaaatgcccacaagagaaagcaggaaagatccaaaattgacaccctaacatcacaattaaaagaactagaaaagcaagagcaaacacattcaaaagctaacagaaggcaagaaataactaaaatcagagcagaactgaaggaaatagagacacaaaaaacccttcaaaaaattaatgaatccaggagctggttttttgaaaggatcaacaaaattgatagactgctagcaagactaataaagaaaaaaagagagaagaatcaaatagacgcaataaaaaatgataaaggggatatcaccacctatcccacagaaatacaaactaccatcagagaatactacaaacacctctatgcaaataaactagaaaatctagaagaaatggataaattccttgacacatacactctcccaagactaaaccaggaagaagttgaatctcagaatagaccaataacaggatctgaaattgtggcaataatcaatagcttaccaaccaaaaagagtccaggaccagatggattcacagccgaattctaccagagatacaaggaggaactggtaatttacagattcaatgccgtccccatcaagctaccaatgcctttcttcacagaattggaaaaaactactttaaagttcatatggaaccaaaaaagagcccgcatcgccaagtcagtcctaagccaaaagaacaaagctggaggcatcacattacctgacttcaaactatactacaaggctacagtaaccaaaacagcatggatcaagtccctgctgacctgggccatcatctgctataatctccaacatacccatgggccaacccacttttcttcatttatctgttcccacagtcattcaacaagcatttattgggagcaaattgctgatgaggccctggactacagtaacgaaacaccagtggcacataggtcagaccatgctggtttgagcagaagcgacaagaacgagaaccctgttggaattttcgagggtggctccaggacagccagctggtga

SEQ ID NO: 127942 - DNA, 631 bp, Homo sapiens
gcaatggcgggctcccctcccccagcctcgctgctgccttgcatttttgatctcagactgctgtgctagcaatcagcgagactccgtgggcgtaggaccctccgagccaggtgtgggatatagtctcgtggtgcgccgttttttaagcccgtcggaaaagcgcagtattcgggtgggagtgacccgattttccaggtgccgtccgtcacccctttctttgactcagaaagggaactccctgacctcttgggcttcccaagtcctgactccagcacctgaaaagcaaccagacaacaaattgccactgcccagaagaggctccagggacccaacagaatactttcatgggcaggaggtacgggacaagtcagatgaacacgtggatcatgtgtctcagatccatagtttcagagatgaagttaaaagacttggagctgaagattccagcaatgcagaaacgccaacagaactccatgagttcaacactggaggtgtctatcggcccccaaactcaacatctgtaattcagcctctagatcagggtgtcataaggacctttaagccttgttacacaaagtactctttggaaaagattgtcagtgccgtggaagagaaccctgatagaacatga

SEQ ID NO: 127943 - DNA, 1455 bp, Homo sapiens
atggtgggcgccccttccccagcctcgctgctgccttgcagtttgagctcagactgctgtgctagcaatcagcgagattccgtgggcataggaccctccgagccacgtgtgggatataatatcctggtgatccgttttttaagcccgtcggaaaagcgcagtatttgggtgggagtgacccgattttccagcatacattttgcttcttcactggtggatgcagcctttcttcagcctcttgaagcaaccatgggtaataagcgcaactgtaaatcaaaaccagttaatcttagaagccaaagaatgaccacaaacaaacttaagaactttactaggctcaagcagtattatcttgatgataaagacaacagttatcaactattatttaacaagtcattaaatgtgtgctactacctgtctcagtctgagatgaaaggagacgtctgtaccactgtgcaggaagagtggattctctgtggctctaatccctgtgtacttctggaactacctggtgcagcacaggctaactggggaaaagaatgtgcagccaggaatgtgttgcccgagcaggctcctctccatcagctgaagtccttcatctctcccatccttcctgctacgtgttccagggatggctcagctacatacctgaggcctggcaagttcactgatggctcctgcagtgccaataatgatatgaataataaggtccaggctgaggtagtctcagatggagatgaggaacttgttgggaagtggagcaaaggtgactcttggtatgtttcagcaaagacactggtggcattttgtccttgtcctacagatttgtggaactttgaagttgagagagatgattttgggtatctggcagaagaaatttataagcagcaaagcattcaagagagtcattcttcaacctcggacatgtgggagctaagacccagcatagttgaagtttatgatttcaggtgctcttggaagaaagcaggaagaaaagagcctgcagagacagggaaggtcaaaattctggtgtcacacagagaactggatggcccatttgagcataagcgaaccaggtacaaatgcatagaggatgcctttatttcctaccttaagaaatttgaaactgctaaggaagagagtgagacaagaagtgaaaggcaccatgcaggcgaagaattctgccttgtgaagatgagttttgttgtagtgcacggggagtctgcaggtgaatcttctctctctgcagacccactcctgttcctgtacagcaacctcaggacaatagtgatacatgtgcagggagcagaggctgttcaaatagagactaaaacattatcttcacgggaattgattttacgtcttccaaacacatatgccaccttaattgtgatttgtgtgatagttcagctgctgaaagctttcgtttatctctacctggttaaacaactttaa

SEQ ID NO: 127944 - DNA, 914 bp, Homo sapiens
  misc_feature (1)...(914): n = a,t,c or g
atgcctctgctgtgtagaagggaagcatcagacaacaagcaagctaacaatcgacgagataaaatcagaagtacctttgaagccccaatatctctccatcctgataacatcctcatccctccactcaagaactgccactatgaatttggtgtgagagtgtctctagattgtatacccaagagtggaaatttacattctctaccccaagaggaggtatcaagcagcaaattccagtttctgggaaatagtggaccagatcgtctccatggagcagctggtcctaacatattggccggcaaggaataactgactcctctggcctcatgtctcttcgggccccctcagtgaggatctttgtgtacttgctattccgtttgcacacccagcgtggcctccttgcaggcaggaggcagtggggcccctgcccactcagcttctctcattttcttcacttatcagtcttggcctgttccactcagatctacactgaaggcagttggcctggatgggcttcactaggggccccgtctgtgcactgggcccgtttcccctgctggctgcaagccatgggttctttttctcctctctgcccctcatgctgaccttctagatgccactcccaaatccccttcactccatacccaccaggcttcatgcccacccaggcctctggcaccctcagtgcagcccatgattgggaactcaccatcagcagtcagtggctcggtttaagagagggccgcagagggaactgggtcctgatgtggacttggatgccctggggggatagntctgctgacactgtggcctgaaatanaaaaagtgctgagcaagcagtgtatgctggagcctcagtagaccatctgcacaatggggacgtggagaggatggttggattatgcctctgcatgtca

SEQ ID NO: 127945 - DNA, 921 bp, Homo sapiens
caagtgtaggggctcttcagaagcagcagggatggcaccaaaggagatgcatctcgttgcatttcccttcattcctttgcgttttctcgctggcgaagagtcgtcgtgcagaccacaatcaagatcccagagcgtcgcgaatggcattttcactgacttccagcccgctggcacgcagtgccgccagcgctgttgcggcattcggttgcgggacaagcggcaacggcagattttccagcgtgccgtgagcatatcgtcaagtttttcagcgtattgccatagcggtttacggtccgctaatgcgggatcggtaagcgcaccctgtaaagacgcctgacgccattgattgccgtattcgtcagcctgccattccccgtttacagtgagcgccttgataccttcttcacttaatgtggctagcgccagccgttgacctgccgccaggtagagcgtgttttcactgccctgcatttgataaccctgcaacagaacgatcggctgtttgccactggcatcaacgacggtgagatcggttccaggattcacggtagccagctcgcctatgtgagaagttttgaaaggataaatatgtgcgccattagtaactgaagtagcggcctgactttccagctcatgcgccgcgttgtcatccatttttatttctggcggaaaatgggcaatgcctttatgacaatcgatacaggtttcgctgtccttttgtgctttgttatgcattttctgcgcagattcactttgcgaggcaatatccatggcatcaaaagaatggcaactacggcacgttgcagagtcagtggcttttaattctttccatactgtttcggccatttcctggcgatgagcttcgaacttatcgtcactgtctattttgccgctaagacctgcaggcatgcgagtatgcat

SEQ ID NO: 127946 - DNA, 324 bp, Homo sapiens
cttctgcccgcccaaatagggactttgtgttttgtccccaattttggggaagtagacgtagcttctattgtgggacacaacgtttcccgcgttgccggtgccgatctctgggaagagctgatggcgcgcgcaggcaaagaagggacgccggtatttcttgtgggcggtaaacctgaagtgctggcgcaaactgaagctaaactgcgcaaccagtggaatgtgaatatcgttggcagtcaggatggttattttaaacccgagcagcgtcaggcgctgtttgaacgcattcatgccagcggtgcgcaaatcgtcaccgttgcgatg

SEQ ID NO: 127947 - DNA, 1828 bp, Homo sapiens
  misc_feature (1)...(1828): n = a,t,c or g
atggataaagaacgcatcattcaggaatttgtgcccggccngcaggtcncnctggcgcttctcttcgcgcatcccgagaaaaaggtcgcactgttacaacgtcggggcgttgagtggaactattccgtcaccgatcatgactgggcgtttagcgatgctcacggcacgctggaaaatctgccgttgccgcttgtcccgcaaccgaatgccgcaacagcgctggcggcactgcgtgccagcgggctggaagtcagtgaaaatgccattcgcgacgggattgccagcgcaattttgccgggacgtttccagattgtgagcgagtcgccacgcgttatttttgatgtcgcgcataatccacatgcggcggaatatctcaccgggcgtatgaaagcgctaccgaaaaacgggcgcgtgctggcggttatcggtatgctacatgataaagatattgccggaactctggcctggttgaaaagcgtggttgatgactggtattgtgcgccactggaagggccgcgcggtgccaccggcagaacaactgcttgagcatttgggtaacggcaaatcatttgatagcgttgcgcaggcatgggatgccgcaatggcggacgctaaagcggaagacaccgtgctgtggggcgtagaggccttccgtatcaacgccgccgtggcgaaagatgacacacaaatccacactcacatgtgttattgcgagttcaccgacatcatggattcgattgcggcgctggacgcagacgtcatcaccatcgaaacctcgcgttccgacatggagttgctggagtcgtttgaagagtttgattatccaaatgaaatcggtcctggcgtctatgacattcactcgccaaacgtaccgagcgtggaatggattgaagccttgctgaagaaagcggcaaaacgcattccggcagagcgcctgtgggtcaacccggactgtggcctgaaaacgcgcggctggccagaaacccgcgcggcactggcgaacatggtgcaggcggcgcagaacttgcgtcggggagcgcgcgccggttgcgctgctgatttcgccgcctctgcccgtctggcggtcggtgaagcgttaaccaacatcgccgcaacacaaattggcgatatcaaacgcatcaaactttccgccaactggatggcggcggcaggccaccctggtgaagatgcgggcctgtatgaagccgttaaagccgtgggcgaagagctttgtccggcgctgggcctgacgatcccggtgggtaaagactccatgtcgatgaaaacccgctggcaggaaggtaacgaagagcgcgaaatgacgtcgccgctgtcgctggtgatttctgcatttgcccgcgtggaagatgtacgtcacaccatcacgccgcagctttctaccgaagataacgcactgctgctgattgatttgggcaaaggcaataacgcgctgggcgcaacggcgctggcgcaggtttatcgtcagcttggcgacaaaccggcagatgtacgcgatgtcgcgcaactgaaaggcttctatgacgcgattcaggcgctggttgcacagcgtaagctgctggcgtatcacgaccgctctgatggcggcctgctggtaacgctggcggaaatggctgtgctgtcctccttaggacagggcggttattttggccatatgatcatcactccgggcagtatcccggtaaatccaaaaccggccaaagtacgccagacgtcgctgcacaggcccgtcagtcgtggataccgtaaaaagcgatcgcgaagccgctggctgaaatgggcgacatcgttaaaactaccgtgtttgtaa

SEQ ID NO: 127948 - DNA, 498 bp, Homo sapiens
tcagtacgtaaaaagtacccgcaggcgcaggtttcccgcgttgccggtgccgatctctgggaagagctgatggcgcgcgcaggcaaagaagggacgccggtatttcttgtgggcggtaaacctgaagtgctggcgcaaactgaagccgacccagtgggccagcaggccgtgcaggcgcagcccggtggcctggacccgcagttcggcggcattgatcggcgggggtgcattcatggcttctctcctgtatcccccggcgcgatccggtcgtagcggcgcgtcgcggcgcgccacgtcctcgctcaggtgcagcgccgtgggcggcggcaacccctgctcttcgacgatctcaccgctgaagttcagcgtaatcggggcagacgctattacaaagctgttgatgagcctggaatagcgctgttgcggcattcggttgcgggacaagcggcaacggcagattttccagcgtgccgtgagcatcgctaaacgcccagtcat

SEQ ID NO: 127949 - DNA, 3707 bp, Homo sapiens
gaatccaatggaaagaccaggacattgagaatctgtaccaaaacctggggattaagctaagcggcgtttatcaggataaaggcatccctgcgctggaagaatggctgacatcggcgctaaccacgccgtttgaactggaaacccgcttaatcctgcaggtcttggctcgccatcgccagacgatgcgccacttgtacagcgacctcaccgttacctgccatcagcatgtcggctttcgaatccaccagcacggaacggcgcacggtatcggaccaactagcctcaataccgccgaggatcaccggtacatctttccacgcctctttacaacgctgggtataaaccagtgtggcgcgatccgggcgcttacccgcgacgttatccggcgtgtaggcatcgtcatgaccagtaacaccgaaaaacagattcggtttacccagacgcataaagtcgtctttgctgctccagtccggctgggcgatgatcccgacgcgaaagccctgcgcttccagcatacgaccgcaaatcgccatcccgaagcttgggtgatcgacatacgcgtcgccagtaaccaaaatgatgtcgcagctatcccagccaagttgatccatctcttcacgagacatcggcaaaaacggtgccggtccaaaacaggcggcccagtactgcggccaggagaacagcgtctgactgttgaagtagaacgggaagtgcgcccaggaaggctgaccgaaataaacaagcagctccacttgtccgtcaacccaaacggtatctttccagcctctgtcttccgggaacggcatcgcgccattcacgttacggatctggaacattacgccttcaatatggaacgcttgcggctcgtccgcgcgtaccgtccagcgttcccacgttccttcgtgcgcggtgacatcaatacggttgacgtcccacagctgtccattaatacccgggtcatcacccagactcccttcatgcctgcaggtcatcaatttttaaaagaatcagatgttacggccgagtcggtattctttatgaagcgtcggcaggtgttaaaagcactgggcatcagtgcaactgcactttctttgcctcacgctgcgcatgccgatctgcttagctggtttaaagggaacgatcgcccgcccgcccccgccggaaaagcgctggagttcagcaagcctgccgcctggcaaaataacctgccactgacgccagcagataaagtttccggttataataacttctatgaattcgggctggataaagccgatcccgccgctaatgctggtagcctgaaaaccgatccatggacactgaaaatcagcggcgaagtggcaaaaccattgaccctcgatcatgatgacttaacccgtcgcttcccgctggaagagcgtatttatcgtatgcgctgcgtggaagcgtggtcgatggtggtgccgtggattggttttccgctgcacaaattgctggcgcttgcgaacctaacagcaatgcgaaatgccagggcagcaggaccgctttatcgggcgtgggctgaaatatccttatgtcgaaggattgcgtctcgacgaagcaatggatccgctcacactgatgaccgtagtgtttcctgcaggtctaaatatgtccatcgcgtgacattttcaaacggcaaattagagagcgtggaaaacctgaacgtaccggtaacgcaacccatggcagtgctgaaaggcgatctggcgtcgattaccgcacagctggaacagtggcgcgatgtatcgcaggagccacctgtctggctggatatcgaaatcactactgatgagtatctgcatgatattcagcgcaaaatccaggcattaaccgaatcattgcctgtcgaagtattgctggtacgtcggagtcgtgaacagcgcgagattgatttcacccgcgagccgttcgccagcaacgggctgtttgctattaccggcccaacaggtgcggggaaaaccaccctgctggacgccatttgtctggcgctgtatcacgaaactccgcgtctctctaacgtttcacaatcgcaaaatgatctcatgacccgcgataccgccgaatgtctggcggaggtggagtttgaagtgaaaggtgaagcgtaccgtgcattctggagccagaatcgggcgcgtaaccaacccgacggtaatttgcaggggcaatttgctgccttcctgaatgccaaacccaaagaacgcgcggaattgctcgaggagttaaccggcactgaaatctacgggcaaatctcggcgatggtttttgagcagcacaaatcggcccgcacagagctggagaagctgcaagcgcagccagcggcgtcacgctttcacgccggaacaagtgcaatcgctgacagcgagtttgcaggtgcaaactttgcttcgagcatgggcaatatcagtttcttctttccaaaagccaaacaagggagcgctcttgggattaatggcggattaggaaacttaggtgtaagtgtaatgcagctggttgcaccgctggtcatttttgtacctgtatttgcctttctcggcgtcaatggcgtaccgcaggccgacggttcggtgatgtcgctggcgaatgccgcatggatttgggtaccgctactggcgattgccacgatcgccgcatggtcagggatgaatgatatcgccagttcacgcgcctcaattgccgaccagctccctgtcttacaacgcctgcatctctggctgctgagcctgctttaccttgtcacttcgttcccggatgtgaatattctgcgcctggcgttctttggcccatttatcggtgccatcgcgcggtcggttggtggtgctatttccgataagttcggcggcgtgcgggtgacgttgatcaactttatttttatggcgattttcagtgccctgctgttccttaccttaccgggcacaggctccggtaatttcatcgccttttacgccgtatttatggggctgtttctgactgcgggtctgggaagtggttctactttccagatgatcgccgtcatctttcgccagataaccatttatcgggtaaagatgaaaggcgtttcccggtcatattcaatgacgcgatgcccggcaccctttgcagcaacccctgcacattatcggctgaaattacctgcgcttgctgatgctgtttctctatcaaacccgtcagggttcttacagcgttatcaccaagaaacagaccgctatgttcaacgatttgttttatctcgtcaccgggatattgcggccactcatcgaactctggtggagagactctgtggacgtaaagaagggaatgaacacagagaaactttcagccagattcctgattgtcacctgaacaagaaaagtcaaactggagtgaaaccatgcaaatgcagcgtgtgtgggaaagtcttcctccgtcattcattcctggacaggcacatgagagctcatgctggacacaaacgatctgagtgtggtggggaatggagagagacgccccgtaaacagaaacaacatgggaaagcctccatttcccccagtagtggtgcacggcgcacagtaacaccaactcgaaagagaccttatgaatgcaagtcgcccctatttccggcgcgggacccccaccccggtacctgcacacctcatgcgcccgcagtttcgagcctgcggctaagtggggagaaaaatggcatcaagtaa

SEQ ID NO: 127950 - DNA, 1467 bp, Homo sapiens
atgtctaagatttttgatttcgtaaaacctggcgtaatcactggtgatgacgtacagaaagttttccaggtagcaaaagaaaacaacttcgcactgccagcagtaaactgcgtcggtactgactccatcaacgccgtactggaaaccgctgctaaagttaaagcgccgcactatttttattacattcactcaaaacatattacgtcttgtttcatctttgttgatgatgttttatcatgcctgcaaagattaaataatcagcatttacccgccgtatcctggagttgttccgtgtcagatcagattatcgcccgcgtctcgcaatcccttgccaaagaacagtcactggaaagtctggtccgacagcttctggagatgctggaaatggtcactgatatggaatcaacctacctgaccaagtggatgtcgaagcgcgcctgcagcatattatgtttgcccgtaacagccagaaaatgtacatcccggagatttgccgtctcgtggtaccgagtacttcctgcgccagataattttgccgcgccacatcgatatcgcgttctgaaaacgggtttactttcgcctggctgccaccatgttgtcctggatgacgggagccgcagctggagcggcatcctgtgcgacccggtggaacgggccgccagctgccaccgcagcaagacaccacgcgcaccaccaaaagcacaacgagaccagcagcaccacacaacacatgacatccacaccaccagaacccacacagaccacgaccgcacccagcgaccaagccgagaccagatcgctcgacccacccacggcggcacccacccaccgccagctacgaaccccacaacaccacaccccacccacacagcggaagattatgacagtgctgtgaatcaactgaatgaaccctggccggatttaattctcctcgactggatgttacctggcggctccggtatccagttcatcaaacacctcaagcgcgagtcgatgacccgggatattccagtggtgatgttgaccgccagaggggaagaagaagatcgcgtgcgcggccttgaaaccggcgcggatgactatatcaccaagccgttttcgccgaaggagctggtggcgcgaatcaaagcggtaatgcgccgtatttcgccaatggcggtggaagaggtgattgagatgcagggattaagtctcgacccgacatctcaccgagtgatggcgggcgaagagccgctggagatggggccgacagaatttaaactgctgcacttttttatgacgcatcctgagcgcgtgtacagccgcgagcagctgttaaaccacgtctggggaactaacgtgtatgtggaagaccgcacggtcgatgtccacattcgtcgcctgcgtaaagcactggagcccggcgggcatgaccgcatggtgcagaccgtgcgcggtacaggatatcgtttttcaacccgcttttaa

SEQ ID NO: 127951 - DNA, 3125 bp, Homo sapiens
cttcaatcggggtgttcaaggttcttttacatccaagaccgcgaacgcagacgttcggaggaaccccattgcgaggtacggtacgataccgccgccgaagctgctgctgaacttccagccccagacggctcattaccattttgcacctcaagagcatcgtacacgcgcggtacggcatcctgagggaattcggacgtcaactacggcggccgattacctggacaatctttccaggtagccatctttaaatcctctacgaaataacctgtttaaaccgcggcggccccccgagacgatctcggtgagttcctgagtaatgctggcctgacgagctttgttgtataccaactgcagctctttaatcaggctgccgccattgtcggtcgcggctttcatcgccaccatacgggcggcctgctcgctggccaggttttcaaccacgccctgataaacctgagattcgacataacgacgcagcagggtatccagcaacgccttcggatcgggttcgtacaggtaatcccaggatttatgtttcagatcatcatcatctgatgccggtaacggcagcagctggctgatggtcggaacctgagacatgggggtaataaaattggtggttgcaaatgtaaagcttgtccagacggacttcgtcgtaggcctgcaacatcacttttacccgacccgatcagttcggacagggaagggttatcccccatgccggtgacctgggcaacaacattgccgcccacggagttgaagaacgacacgcctttcgagccgatcattgcgaggtcgcattgaacgcctttgtcggtccaggtcttcatttccgccagcagttttttgaacaggttaatgttcaaaccaccgcacaaaccacggtcggtcgacaccaccaggtagcccacgcgtttaacgtcgcggtcttccaggtaagggtgcttatattccagattaccgtgtgcaaggtgaccaatcactttgcgcatggtttctgcataagggtacgactcctggctcagacccttgtgtggtgaatctgaacgcaacaatcctcggccaggccatcgcgtttgtcctgttcgttctgttctgcatgaagtacgtatggccgccattaatggcagccatcgaaaaacgtcaaaaagaaattgctgacggccttgcttccgcagaacgagcacataaggaccttgaccttgcaaaggccagcgcgaccgaccagtaaaatcgtggcccaggcgcaggcggaaattgaagccgagcgtaaacgtgcccgtgaagagctgcgtaagcaagttgctatcctggctgttgctggcgccgagaagatcatcgaacgttccgtggatgaagctgctaacagcgacatcgtggataaacttgtcgctgaagccaaagcagcttttgactttgccgtcgaacaccaaagtgtagaacgctggcaggacatgctggcgtttgccgccgaggtaaccaaaaacgaacaaatggcagagcttctctctggcgcgcttgcgccagaaacgctcgccgagtcgtttatcgcagtttgtggtgagcaactggacgaaaacggtcagaacctgattcgggttatggctgaaaatggtcgtcttaacgcgctcccggatgttctgcagcagtttattcacctgcgtgccgtgagtgaggctaccgcttgagtagacgtcattttcgctgccgcactgagtgaacatgcagtgtcgacttgtatttttaaaaaggtttttttgggttgagggaaagcttcgagctcggtacccaagctctgtggaaagcaatttggcaagattcatcaaaattagtaacatacatgccagtgggtccagcaccgcggtattgcaccagtggtagacagctgtggactgctggccctcaggtgcggcgaccacaccaaattcaatcagcaggataagttcatcgttggccagctcacgggtccagtatgttttggggccgtccccttcaagaagagtttgcgtgcagcggatcttgttctcattctcccaagtggctaaactgatatcgaggacagaggccaggcactgaatgaaaacgaagctaaccccagtatgggttctaatggaaagcacagggtaaaagcgctcattaagaagcggaagaattcttgccagttcgtaccccagtgccttgagcagataggagaaattttcagctcgctgagcattattcaagtgccgacgaaattgggcatgggggcagaggctgttgcgtgagggaccgacagcgtaggtgcagcgggcacactctgagctcgcaaggcggagactggcgctatgcgcccagcgctgcgcgccttgaggcacctgcaaggaaggcgcgccacaggctgcaaagggagacacaggttcctccagcagcagtgggccatgggcaccgagcggggacacggggacgctgtagtggctctggggcctcaccctgcacttgcgtccgtccacggtctcctcctcaaagccttctccgaccttgaagttgatctcagtggtgcgcaccgtggtggatgtcttgatgtagaactgatccccgtcctggcggatctccacgtgcggcttggacgcagccgctacggccactttcctcagcatggcgttcacacctgccgccgccgccaccgccaccatgcccaacttcgccggcacctggaagatgcgcagcagcgagaatttcgacgagctgctcaaggcactgggtaagctggtgcagagggcgcgccccgacggggagatgcggcccggaggtgccactgttgatggcttggaagatgataccgatggcggtggcgggtcgtcaggagcagccactgccatcatgccagccactagttttttgagagtttttagcatgaagggctgttgaattttgtcaaaggccttttctgcatctattgagataatcatgtagtttttgtctttggttctgtttatatgctggattactttcattgatttgtgtatgttgaaccagccttgcatcccagggatgaagctaacttgattgtggtggataagctttttgatgtgctgctggattcggtttgccagtattttattgaggatttttgcatcgatgttcat

SEQ ID NO: 127952 - DNA, 1773 bp, Homo sapiens
atggcgagacgtattctggtcgtagaagatgaagctccaattcgcgaaatggtctgcttcgtgctcgaacaaaatggctttcagccggtcgaagcggaagattatgacagtgctgtgaatcaactgaatgaaccctggccggatttaattctcctcgactggatgttacctggcggctccggtatccagttcatcaaacacctcaagcgcgagtcgatgacccgggatattccagtggtgatgttgaccgccagaggggaagaagaagatcgcgtgcgcggccttgaaaccggcgcggatgactatatcaccaagccgttttcgccgaaggagctggtggcgcgaatcaaagcggtaatgcgccgtatttcgccaatggcggtggaagagttgccaaccaactaccgcttaaaacaagtgaaacagctggccttgaaatgccattctgtaacccagaaaatcaccgatctctccgggggtaatcagcagaaagtcttgatctccaaatggctgtgctgttgcccgcaagtaatcattttcgatgaacctacccgcggcatcaacgttggcgcaaaagccgaaatttacaaagtgatgcgccaactggcggacgacggaaaagtcatcctgatggtgtcatcggaactacctgaaattatcaccgtctgcgaccgcatcgccgtgttctgcgaaggacgactgacgcaaatcctgacgaatcgcgatgacatgagcgaagaggagattatggcatgggctttaccacaagaccatatggctaacgatagctggagcgggcaggataaagctcaacactttatcgcctcggcgatgctttccgccgccggaaatgaattgctgaagttgtggctcatcttctggcaaaatcgggcggaacaagcagcgttcaccgtttttcaattctacccattcttccagctgatgcggataagggcgcactgccagccgactctcgttatcgccttcaaacggcgagatatccaatcgtcctgcgacttacgaatgcaggagccacctgtctggctggatatcgaaatcactactgatgagtatctgcatgatattcagcgcaaaatccaggcattaaccgaatcattgcctgtcgaagtattgctggtacgtcggagtcgtgaacagcgcgagcgtgtgttagccagccaacagcgtgaaaccctcagcgaactcagcgtcgaagaggtgttcaatcgccgtctggcactggaagaactggatgaatcgcagcagcaacgtctgcagcatcttttcaccacgacgttgcataccctcgccggagaacacgaagcatgaaaattctcagcctgcgcctgaaaaacctgagctcattaaaaggcgaatggaagattgatttcacccgcgagccgttcgccagcaacgggctgtttgctattaccggcccaacaggtgcggggaaaaccaccctgctggacgccatttgtctggcgctgtatcacgaaactagggttctgatctaacgtttcacaatcgcaaaatgatctcatgacccgcgataccgccgaatgtctggcggaggtggagtttgaagtgaaagtaaatcagggcgtggttgaaaacctggccagcgagcaggccgcccgtatggtggcgatgaaagccgcgaccgacaatggcggcagcctgattaaagagctgcagttggtatacaacaaagctcgtcaggccagcattactcaggaactcaccgagatcgtctcgggggccgccgcggtttaa

SEQ ID NO: 127953 - DNA, 1155 bp, Homo sapiens
atgcctgatgcgctacgcttatcagttcatcactctgcccgcgtattccgcgaaaaaggggtaaccatcaacaaagcaccgggcgatgatgaaatcctgaaaaacaccgtcgattttgtctctttcagctattacgcctcgcgctgcgcctcggcggagatgaacgccaacaacagcagtgcggcgaacgtggtgaaatcgctgcgtaatccgtatctacaggtgagcgactggggctggggaattgatccactcggtctgcgtatcaccatgaatatgatgtacgatcgttatcagaagccgctgtttctggtggaaaacggcctgggcgcaaaagatgaatttgctgccaatggcgagattaacgacgactatcgcatcagctacttacgcgaacatatccgcgcaatgggcgaagcgattgcagacggcattccgctgatgggctacaccacatggggctgtattgatttagtttccgcctctacgggtgaaatgagcaaacgctacggctttgtctttgttgaccgtgacgacgcaggcaacggtacgctgacgcgcacgcgtaagaaatcattctggtggtataaaaaagtgattgccagtaatggggaagatttagagaactgcaaggagagccagtacagcccgccggaaagcagtaccgcagccggaagggtaaacacccaggccatcagaatgctggtcacggttttacgctgtaagccgccaccatctaccaccatcgtccccgcgacagaagaggagagtttctcgggctgggtcccctgtggagggtttggacccttccggaggtttagtgaggagtcgctgtcgccatggccgtcgaggctccagttgcccggtagattctcggggagacggtttcaaagcggtcagtggcgggagaagtttcaactctgtgagatgaatgcacacatcacaaagagattcctcagaatgcttctgtgtagtttttatgtgaagatatttcctgtaaaactattggcctcaaagcgctccaaatatccacttgtagattctagaaaaagattgtttcataactgctcaattgaaagaaaggttcaactctatgagacgaatgcacacatcaaaaagaagtttcacagaattcttctgtggagttttatgtga

SEQ ID NO: 127954 - DNA, 2626 bp, Homo sapiens
atgcgggaagaatttgctcatcgctggctggcccgcgcgggcgaaaaaacgccgccggatgcgctggaaaaacttaccgaccctctgatgttcgccgcagcaatggtcagcgccggtaaagcggatgtctgtatcgcgggcaacctctcttccacggcaaatgtgctgcgtgccggattacgcattatcggcttgcagccaggctgtaaaacgctctcttccattttcctgatgttgccacagtacagcggcccggcgttgggctttgccgattgcagcgtggtgccacagccgacggcggcgcagctggcggatatcgcgcttgccagtgccgaaacctggcgcgccatcaccggagaagagccgcgcgtggcgatgctgtcgttttccagcaatggtagcgcccgtcacccctgtgttgctaacgtccagcaggcgacagaaatcgtccgtgagcgcgcaccaaagctggtggtggatggcgagttacagtttgacgccgccttcgtgccggaagtggcggcgcaaaaagcgcctgccagcccgctacagggcaaggccaatgtgatggtttttccgtcgctggaagccggaaatattggttacaaaatcgcacaacgactcggcggatatcgtgccgtcgggccactgatacaaggacttgccgcgccgatgcacgatctctctccctgtatagccgcgaccgatgcaggttccgcagcggcacagcgtatcggcgatctggtatctgtacacgttatccctcgtccgcacgtcgacctggaacaagtcttccctatcggcctgaaagcgtatacagcaacctgtaatcaccctgtgtcactacgattcacgattaaaagcagttccgacaggatcaagttgagcaatcagacgttgcaaagcaagaacctattcatcatgcgcttttactgcttctcgctctgcctaagcctctccgcattttaccactgcaggggagttatcgtcaatattcaggcggtattctggctgcaaaaaggcaccgaagcggcagatattctgactacctgcgcgcagttgtggatcatgatgtatgcgctgctttcagtcttctcgttgctggatgttattttgaatctggcgcagaaattcccggcagcatctcagttaccgctgaaagggatatttcaggggattaaactgatcggcgcgattctggtcggcattttgatgatctcgctgctgattggtcagtcgccagcgattctgatcagcggtcttggtgcaatggctgccgtgctgatgttggtatttaaagatccgattcttggtctggtggcagtgcgtaactgggacaataccattaccactattcccacctggtctctggtttctgactcctttaaaaactggagcgggatgtcagcatctggcgggcgacgtattaagcgcagtatcagtattgatgtcaccagtattcgttttcttgatgaagacgaaatgcaacgtctgaataaagcgcatttgttaaagccttatttaaccagccgccatcaggaaattaatgagtggaatcgccagcaaggttctacggagtcggtattaaatctgcgccgaatgaccaatattggaacctttcgtgcctatctgaacgaatatctgcgtaaccatccgcggattcgtaaagatatgaccttaatggtacgccaactggctccaggtgataacggtttaccgctcgagatctacgcgtttactaacaccgtggtgtggctggaatatgaaagcattcaggctgatatattcgatcacatatttgcgattgtcgaagagtttggtctgcgacttcatcagtcgccaaccggcaatgatattcgctctctggcgggggtaaccatcaacaaagcaccgggcgatgatgaaatcctgaaaaacaccgtcgattttgtctctttcagctattacgcctcgcgctgcgcctcggcggagatgaacgccaacaacagcagtgcggcgaacgtggtgaaatcgctgcgtaatccgtatctacaggtgagcgactggggctggggaattgatccactcggtctgcgtatcaccatgaatatgatgtacgatcgttatcagaagccgctgtttctgctacttacgcgaacatatccgcgcaatgggcgaacgattgcagacggcattccgctgatgggctacaccacatggggctgtattgatttagtttccgcctctacgggtgaaatgagcaaacgctacggctttgtctttgttgaccgtgacgacgcaggcaacggtacgctgacgcgcacgcccttccagtcgttgataaacggtttctaccgcatctttaatcggctgggtcatcgggtagtaaaagccgacgatatccggctgaatgccgaggaaaatcacttcgccaatatcttctttcaactggtcgataaggtaattcaacggcatgttatgggtagtcatcataaacatctcggcgatatcatccgggtcgatgatgcggatctcgccggggtttagccccatatccgtggcgtcgacaatcagcagtcgtgtcgggcgcagttcacggatagcgacgatgtcgttacaaaacggcaaccaagctcatcattcataa

SEQ ID NO: 127955 - DNA, 2373 bp, Homo sapiens; identical to SEQ ID NO: 127272

SEQ ID NO: 127956 - DNA, 801 bp, Homo sapiens
ttactggcgcaactggacagcggcaaactcgattgcgtgatcctcgcgctggtgaaagagagcgaagcattcattgaagtgccgttgtttgatgagccaatgttgctggctatctatgaagatcacccgtgggcgaaccgcgaatgcgtaccgatggccgatctggcaggggaaaaactgctgatgctggaagatggtcactgtttgcgcgatcaggcaatgggtttctgtaatgcgaattcgatctcggtaccgattggtgctacgtgggagcacacactgtagtcggctgtggccgtagatgagtacagctgccctgtcagggagcagtctgagttcttgcaggggcgccgcatggctcctatgaactggtgagcgatacgcatcatggagacggggtcctcttggcggggtacttctgagtgtccggtcctcctggcagctctgctttctaatgagatctactctctgagactcttcgctggtcgtcctctggcatgcgtcttcgtttgctcgccgtccgtctccgctggctgatggttgctgctcgtcggcaacggctgtctgtcgggcgccgtggtcgtcagtcgtctctgtgtgcggtgttgtgctagttgtcgtctctgctaggcccctgatactgcatgtgacagcggccgtgtcgctgcgtcgtcgtgtgactgcgctctggccctgcgcggcgcgagcgcgataacgcggcgtcttggctcggtcgtctcttgtcgacgcgcttcgttctgtcgggcagcgagccagtgtcgcctcgcgttgtgtcgtcat

SEQ ID NO: 127957 - DNA, 717 bp, Homo sapiens
atggcaggcactggacctgctctgctactgggacaacatgatttacaatgtgaaaagggaaaacctaaatcaccaagtaatgaaaacattaaagttaatgcatcacaagtgtggcactatgcaaaattcaaacagcaagttcagaagcaacagctaagtggagtggacaggaagctggaggatcccctgagcttctcagcagaactagatggcaatgatgccacaggacagccatcgattcttaacaatgaagaatttgtattgatcttctacccggaaagacaacaatttgtatccagttttcaaaatctgaaaagcaaatacaactcttactatgccattaaacccgagagaagttctatagcatctactccagcaataaagcagcagagacctccagggaagctgatgcaattaggaaaacttgacttaagtacagtatataaatcaaagttcctccctcatattggctgtggttttgactctagaggatcccctgttccggtcacaccacatacgttccgccattcctatgcgatgcacatgctgtatgccggtataccgctgaaagttctgcaaagcctgatgggacataagtccatcagttcaacggaagtctacacgaaggtttttgcgctggatgtggctgcccggcaccgggtgcagtttgcgatgccggagtctgatgcggttgcgatgctgaaacaattatcctga

SEQ ID NO: 127958 - DNA, 711 bp, Homo sapiens
cagttattccggccttcgacttccgcgaaatggtcacgaccctcgacaacaagataatcaccacatcactcaaggtggcggattactttggcaagcgacacaaagacgttttgcgtgccatacgtaacctgaaatgctccgatgacttcacccagcgcaattttgcgcccattgatttcattgataaaaatggcgatgttcagcctatgtataacatcacccgcgacggatgcatgatgctagtgatgggattcactggcaaaacagctgccgcagtgaaggagtgttacatcaatgccttcaactggatggccgagcagctaaaccggcgcatggcgatgggtgaagaattgcagcatcgctacgccatcaaagaaacgcgctcaaagctgaaaggcacgatcggaagccgtttgatgaacgagcggaagaaagagaagcgcgtcctggagctcgaacatgagcacatcatgcaggtaacgcagccagaattgttgattggctgatcgcggcattacagcaggcattcactgagtgcctgtgataatgcaacagcccgtacaaaacgggcttggattttatctttttgtggggtcagggccccaggggaaacgaattggcttaattgggtatcccaccgccccttatgaataacctgcaactaattggcttaacggccgggtttaattgtgtggacaagaaagaattaaa

SEQ ID NO: 127959 - DNA, 813 bp, Homo sapiens
ctgcgaagattccgttgccgggcttaacaggcgggcaaacaagatcccgccagggatcgccattaatgatgccgccagcagatattccacaggcacgcccagtgcggcgtaaccaatcattgtcgaaccagcaatcgaggccatgccactacaaatcgctgtaaataattcattgcgattcagacgatcgataaagggtttgacgattgccggaatttcgttttgcccgaggaaaatggtggtgaccgcgacgaatgactcgatcttgctgatatttaatgctttctggaagataccgccgagaattcgaattaaaatccccatcacaccgatgtagtagagaatactcaccagcgcggtgacgaagataattgccggtaacaccctgaaaccaaagataaatcctgcaccatcaaataaggtatccattttcggtccgaccagagaaccgaagataaatgcgctacccgcgtcgctgtacgccatcactttatgcacgccaaaagcgactttttcagcgacccaacgccctggcggtaaccaaagcataatgccgccaatcacgacctggtacaccagtaccaggtaggtggccaggcataaacttgtgcggccataagcatcctgcatgttaatattggctcccatcttcaacagcagcttcactgtgtccgcttgacgtccagaaaccgcatgcatcaagggcgtgcatccaaggtttactatgttggcaggctggttctgaactcctgaactcatgatccacccgccttggcctcccagagtgctgggattataggcgtgagcgaccat

SEQ ID NO: 127960 - DNA, 794 bp, Homo sapiens
gccattaatgatcccgccagcagatattccacaggcacgcccagtgcggcgtaaccaatcattgtcgaaccagcaatcgaggccatgccactacaaatcgctgtaaataattcattgcgattcagacgatcgataaagggtttgacgattgccggaatttcgttttgcccgaggaaaatggtggtgaccgcgacgaatgactcgatcttgctgatatttaatgctttctggaagataccgccgagaattcgaattaaaatccccatcacaccgatgtagtagagaatactcaccagcgcggtgacgaagataattgccggtaacaccctgaaaccaaagataaatcctgcaccatcaaataaggtatccattttcggtccgaccagagaaccgaagataaatgcgctacccgcgtcgctgtacgccatcactttatgcacgccaaaagcgactttttcagcgacccaacgccctggcggtaaccaaagcataatgccgccaatcacgacctgtaacactaacgccgcgccaacggtacgcaggctgatcttcttcttgtttacggtagaaagccaacggtttaccgttacgccctgctcgttcttttcaataaagttagcgtcacggtcagctttcatcagcttcgcaatacgggagaatgcttcttcccagctaatgcgctgccatttgtcagaacctggcgcacgatattccgggtagcgcagacggttttcacggatgatccgggtcaccttcaatgtgataaatcgcttctctggcgttttttgcgccat

SEQ ID NO: 127961 - DNA, 1261 bp, Homo sapiens
cggcggcgttgtattcataccgcgtttcatggccctgcgtgtctttcacggcaattaactgtccacggctgtcgtatgcgcggtactgactcagcccttcctcgcggtgcaccgccgtcacctgaccaaaacggtcatggtcatagcgggttacataaccggaacagtcagtgaagctcagcaactgaccgtaacggctccacgtcatggttttccggctgccggtggcatcttccgttgcgcagggtaagtcactgtgtggattatcataacggtagcgggtgatatcgccgtcaggggcagtttcctgaatcagacggccccattcatcatattcccggcgtatttccagcccgtcaggcccggtggctgacgttaactggctgtggtggttattgtaaaacgccgatgccctgccatccggcgtggtgatgcgcgtgatgaggcccgtcaccacatccggactgtattctgttgtcctgctttcgactatgggcgtaactacggtggcgcatatgacgtagaagcatggaccgatatgctgccagaatttggtggctgatacctatgctggcgctgacaacttcatgaacgggtcgtgctataggcgttgcaacctacggtaacactggcttatttggcctaggaccagggcttaaactctgctttgcaatatcagggtaataatgaaagtggtggaccattcgggcaggaaggttccggtagtggtgatggccgtagcgtgctgattgttaacgataaaagtcaggttgaagcgcgccctgtcgttgccagtcaggcgattggcgataaatggttgattagtgaaggactgaaatctggcgatcaagtcattgtcagcggccggatcgctgtgttgcttgagggcttcgcgccacagttcaatcagtcgtttacgaatgagcgggtatttcaggcggttagcgctgtaaagataccaggagtaacttgcgccacgcgggcagccgcgaggttcatgattgggcaggtcagggcgagtgcgcgggtagtcggtctgttggatttcccaggtcaccagaccatttttaacgtagattttccagctacaggagcctgtacagttaacaccgtgggtggaacgcacgattttgtcgaactgccaacgctggcgatagctgtcctcccagtcgcggttgctatgcatcacctgtccgtgaccatcggcaaaggtttcgcccttttgtttgaagtagcgaaagcgttccaaaagtttactcat

SEQ ID NO: 127962 - DNA, 1658 bp, Homo sapiens
tcaggtctgctgggaaaatcggagcgtcatgtgcagaccctccgggatctctacctggtaagcggcattataggcctctgagtacttttggggtatcaggcaacaccaagaaactgtgaacgactcaaaggaccgtctgcgacgagctgggcgttcttggcaagcccgccaataccaaagtcggcatcactattgatacagactggttctggggattagtcgaagagtgcgtgcgcggctacatcaaaacccattaagtgttgatacaagccgggccggtatcgcaagatgcaggcctggctatttctgatgggagaaagccgtcgcccaatatgacatgaagagataatcactatggatgtctgagaagtgttcgccagggcgtgggtcgctgaaaaagtcgcttttggcgtgcataaagtgatggcgtacaggacgcgggtagcgcatttatcttcggttctctggtcggaccgaaaatggtaccagcactgcgatacatgcgccgtggttgacgtctgcccgaccggtgcgtctatttcgccgatacatgaccagagggattgatcgatattaatccggatctcagcatcgcttgtcaagtcaacagcatcagccgccatgtccgtaccgcagtgcgctcttatccatccggtccgaagacggcggacaaatgcagatttctgccgtaagaccaatttagcagccggtaaattgcccgcgtgcgtctgaagcttgccacgaccaaggcgctgcgtttggcaatctggacagatcccatacagtgagatttcagcaactgtcgcagccagaagcccacttacccgatacaagctggcgcttgggaaccaaacgaagccagcagttcgagataatccggttaagcaggtagcgcaaaatccgttggcgacgtttagtctgacgttgacactggcagttatgcgaatgtaaggcgtttcctcaatcaaggctgttacctccgccagacgcaaattctgcagcatatcggtccatgcttctacgtcatatacgacaccgtagttacgccatagtcgaaagtaccattctgaccaaagcctaaacctgcaaatgccaacgcgttgcggtattacccttgtcgctttcaggaccgtttgcgccaatgtaaattcccactgaccataaccagtgaattgatcagcgatctgagtttccctttgaaaccgatacgggcatatgacatgtcgccatcgtgttgactgcttgttctggtagcacatctgcgtgggtgccttaaaagtgggcactctctcagcagaaaattcccatgtgggacccagttcaagcccctcctcactttcatcactttcttctcgttttgcttcccttcctctgtagccttcacgtcctccaacacccttaatccgccatatttcgcctatgatagctctagggttaaatgctcctcgaatgtgtttgtgttttccgttactgctgaccaaccaagtcctatcaagacccagcacagtcttctcaggtatacactggccacaagattccgtgtgatattcacctgtatggattctggcccttccctcaatgagtagatcgggtgttctcctcgctctggcacaacactgctgctcggacctgccttggaggcgagtgtgtaccaccat

SEQ ID NO: 127963 - DNA, 1250 bp, Homo sapiens
tgcaccagcgcatagtcgaaatctggtgcaatagagattgcgcggttggcaggcagagtccacggcgtggtggtccagattaccagcgagattgggccgttaacgttgcttacggcaaattttgctttcagtgcatcctgatcgactgcctggaaagcaacgtcgatggacggagaagttttgtcgtaatactcaacttccgcttccgccagcgcagaacggcagtcaacgcaccagtgaactggcttcgcgcctttgtgcaggtgaccgttgccgatgattttgcccagcgcgcggatgatgttggcttcagttttgaagtccatggtcaggtacgggtgcgaccagtcgcccagcacgcccagacggataaagtctttgcgttgaccgtcaacctgggtcgccgcgtattcgcggcacttggcgcggaactcggcggcgctcgatcggcagttcggcccgttcccgaatgctatgccgtacgtgaaacactggcgttactgcaaaagattttccccattcgccagtgcgaaaatagtgtttatcgcaatcgctcgcgtccgtgtctgcaataccagatagggcgctgtctgggaccgtgcgttgaaggactggtgagtgaagaagaatacgctcagcaggtcgagtatgtgcgcctgtttttgtctggcaaagatgatcaggtgcttacgcaactcattagtcgtatggaaactgccagccagaatctggagtttgaagaagctgcacgtattcgcgaccaaattcaggcggtgcgacgcgtcaccgaaaaacaattcgtttccaataccggcgacgacctcgacgttattggtgtggcgttcgatgcgggcatggcttgtgtccacgtattgttcattcgtcagggcaaagtgctcggcagccgcagctatttcccgaaagtgcctggcggtacggaactgagcgaggtggtagaaaccttcgtaggccagttctatttacaaggcagccagatgcgcaccttaccgggtgagatcctgctcgattttaatcttagcgataaaacgctgctcgccgattccctttcagaactggcgggacgccagattaatgttcaaaccaaacctcgcggcgatagggcgcgttatctgaaactcgcgcgcacctatgcggcgacggccttaaccagcaactttcgcagcatctaccgttcaccagcgactgaccgcgcttgccagcgtgttgaaactgccggaaatgaacgatag

SEQ ID NO: 127964 - DNA, 831 bp, Homo sapiens
aatcacggcctgaccgtcgatctgacgcgtagtcgatctggcatagagattgccgtgcatcctgatcgactgcctggaaagcaacgtcgatggacggagaagttttgtcgtaatactcaacttccgcaggcggaagttgtgttggtgctcggttcgaaaaactcctccaactccaaccgtctggcggagctggcccagcgtatgggcaaacgcgcgtttttgattgacgatgcgaaagacatccaggaagagtgggtgaaagaggttaaatgcgtcggcgtgactgcgggcgcatcggctccggatattctggtgcagaatgtggtggcacgtttgcagcagctgggcggtggtgaagccattccgctggaaggccgtgaagaaaacattgttttcgaagtgccgaaagagctgcgtgtcgatattcgtgaagtcgattaagtcattagcagccccggcattgacgatgccgtcgccattgccgccgcgatttttgcacccgaactcgacctgcaactgatgaccaccgtcgcgggtaatgtctcggttgagaaaactacccgcaatgccctgcaactgctgcatttctggaatgcggagattccgctcgcccaaggggccgctgtgccactggtacgcgcaccgcgtgatgcgggatctgtgcacggcgaatcgggaatggcgaaggggctgtggacggccgagcaagtggccacgtactgcgaccatctgacccaggccagctgagttcatgttcgaggagggctcctttcggcgggggccgcgcggcttccgaaggaaatgccaggcgctcaagcccatgtacagcat

SEQ ID NO: 127965 - DNA, 1203 bp, Homo sapiens
atggctatccctgcatttggtttaggtactttccgtctgaaagacgacgttgttatttcatctgtgataacggcgcttgaacttggttatcgcgcaattgataccgcacaaatctatgataacgaagccgcagtaggtcaggcgattgcagaaagtggcgtgccacgtcatgaactctacatcaccactaaaatctggattgaaaatctcagcaaagacaaattgatcccaagtctgaaagagagcctgcaaaaattgcgtaccgattatgttgatctgacgctaatccactggccgtcaccaaacgatgaagtctctgttgaagagtttatgcaggcgctgctggaagccaaaaaacaagggctgacgcgtgagatcggtatttccaacttcacgatcccgttgatggaaaaagcgattgctgctgttggtgctgaaaacatcgctactaaccagattgaactctctccttatctgcaaaaccgtaaagtggttgcctgggctaaacagcacggcatccatattacttcctatatgacgctggcgtatggtaaggccctgaaagatgagggtattgctcgtatcgcagctaaacacaatgcgactccggcacaagtgattctggcgtgggctatggggggaggcccggttgaaatggcgaaggtagcagatatggcggggattttcgtcagcaagctgaagacattcaacgctggcgtaaaaggctccacgctgggcgcaagtggcccgcagtacgtgatggtgccaaagaagcatgcagatcaactgcgtgaatctctggcttcaggcgaaattgctgctgtacagtcgacgctggttgccgacaatacgccgcttaacagccgtgtttacaccgtacgctctggcgacacgctttcaagtatcgcttcacgtctcggcgtaagcaccaaagatttgcagcagtggaacaaactgcgcggatctaagctgaagccaggccaaagtttgacgattggtgcaggcagtagcgcacagcgactggcaaacaacagcgatagcattacgtatcgtgtgcgcaaaggcgattcgctttcaagcattgctaaacgccacggcgtgaacatcaaagatgtgatgcgctggaacagcgacactgcgaatctgcaaccaggcgataagctgacgttgtttgtgaaaaacaacaacatgccagattcctga

SEQ ID NO: 127966 - DNA, 303 bp, Homo sapiens
atgagcgtgaaggtggtcgcagtgcagaatgggaggggagctatagagcagacacagcaactgatacttcagggacagatacacaaacccattaccatcgtgttacagctgcctacagcattcagtacagtaacagccttcacaggcgagctgctggttcgtgaagcgggcggcatcgtcagcgacttcaccggtggtcataactacatgctgaccggtaacatcgttgctggtaacccgcgcgttgttaaagccatgctggcgaacatgcgtgacgagttaagcgacgctctgaagcgttaa

SEQ ID NO: 127967 - DNA, 572 bp, Homo sapiens
atgttctcactaactgatgaattgcttcttagcttaaattctactggagccaacaatggaaggcttctgagagcttttgtgctttaccccggcgatattctctacgtgccacgtaatgatgatctgaaagtatttgtgatgggtgaagtgaagaaacagagcaccctgaaaatggactttagcggcatgaccctgactgaagccctgggcaatgctgaaggcatcgacatgaccacctccaacgccagcggcatctttgtcattcgtccgctgaaaggcgagggcgggcaattccgcctgcaaccttatgacgtggtgtatgtcaccaccgccccggtttcccgctggaaccgtctgatcaatcagttgctgccaactattagcggtgtccgttacatgacggatacagccagcgacattcataactggtaatcgtcatgtttaacaacatcttaattgtctgtgtcggcaatatttgccgttccccgacggcggaacgcttactgcaacgttatcacccggagctgaaagtggagtccgctggactcggcgcgctggtcggtaagggcgct

SEQ ID NO: 127968 - DNA, 1674 bp, Homo sapiens
ctactgtgaggggatgaaggtgctccctgcatctggccttgctgtcttcctcatcatggctttgaagttttccactgcagccccctccctagttgcagcctcccccaggacctggaggaacaactaccgcctcgcacaggcgtatcttgacaaatattacacaaataaagaaggacaccagattggtgagatggttgcaagaggaagcaattccatgataaggaagattaaggagctacaagcgttctttggcctccaagtcaccgggaagttagaccagaccacaatgaacgtgatcaagaagcctcgctgtggagttcctgatgtggccaattatcgcctcttccctggtgaacccaaatggaaaaaaaatactttgacatacagaatatctaaatacacaccttccatgagttctgtcgaggtggacaaagcagtggagatggccttgcaggcctggagtagcgccgtccctctgagctttgtcagaataaactcaggagaagcggatattatgatatcttttgaaaatggagatcacggggattcctatccattcgatgggcctcgggggactctagcccatgcatttgctcctggagaaggcctgggaggagatacacatttcgacaatcctgagaagtggactatgggaacgaatggttttaatttgtttaccgttgctgctcatgaatttggccatgccctgggcctggcccattccacagacccatcagcactgatgtacccaacttataagtacaagaatccctatggattccacctccccaaagatgatgtgaaagggatccaggcattatacggacctcggaaagtattcctggggaagcccactctgccccatgccccccatcacaagccatccatccctgacctctgtgactccagctcatcctttgacgctgtgacaatgctggggaaggagctcctgctcttcaaggaccggattttctggagacggcaggttcacttgcggacaggaattcggcccagcactattaccagctccttcccccagctcatgtccaatgtggatgcagcttacgaagtggctgagaggggcactgcttacttcttcaaaggtccccactactggataacaagaggattccaaatgcaaggtcctcctcggactatttatgactttggatttccaaggcacgtgcagcaaatagatgctgctgtctacctcagggagccacagaagacccttttctttgtgggagatgaatactacagctacgacgaaaggaaaaggaaaatggaaaaagactatccaaagaatactgaagaagaattttcaggagtaaatggccaaatcgatgctgctgtagaattaaatggctacatttacttcttttcaggaccaaaaacatacaagtatgacacagagaaggaagatgtggttagtgtggtgaaatctagttcctggattggttgctaaatagaaaagcctagtcttctcaagcaatgaggatgactacaagcagcctctaactggatcttaaggactaaagcagaatgtaggagagggattcttccaaaggccttcaaatcaaattagaattcactgagaataataatacttccaatttttttcatagttgtataatcagaatttcaatccacattagaaaagtttttatatgggca

SEQ ID NO: 127969 - DNA, 516 bp, Homo sapiens
atgaaaccaattgacaaagatgaaaacttctggatgatcagaggatatgctgtcttgccagattatcccaaatccatccatacattaagttttccaggacgtgtgaagaaaatagatgcagccgtctgtgataagaccacaagaaaaacctacttctttgtgggcatttggtgctggagtcaggcaccgtgtatgaaatctcccaatgcgctcatcgtcatcctcggcaccgtcaccctggatgctgtaggcataggcttggttatgccggtactgccgggcctcttgcgggatatcgtccattccgacagcatcgccagtcactatggcgtgctgctagcgctatatgcgttgatgcaatttctatgcgcacccgttctcggagcactgtccgaccgctttggccgccgcccagtcctgctcgcttcgctacttggagccactatcgactacgcgatcatggcgaccacacccgtcctgtggatctacccactagtcaattcaccatcttgttga

SEQ ID NO: 127970 - DNA, 817 bp, Homo sapiens
ccagagataagattctggtttttaaagatgaaaacttctggatgatcagaggatatgctgtcttgccagattatcccaaatccatccatacattaggttttccaggacgtgtgaagaaaatagatgcagccgtctgtgataagaccacaagaaaaacctacttctttgtgggcatttggtgctggaggtttgatgaaatgacccaaaccatggacaaaggggttcccgcagagagtggtaaaacactttcctggaatcagtatccgtgttgatgctgctttccagtacaaaggattcttctttttcagccgtggatcaaagcaatttgaatacgacattaagacaaagaatattacccgaatcatgagaactaatacttggtttcaatgcaaagaaccaaagaactcctcatttggttttgatatcaacaaggaaaaagcacattcaggaggcataaagatattgtatcataagagtttaagcttgtttatttttggtattgttcatttgctgaaaaacacttctatttatcaataaattcatagacctaaaataaacctcaacaggtcttttaatataaattctgcttcaaaatagaataaaaccattctttaacaacaagttgctggtcctagttctaaatatccaaattcaatggccattttgagctgcctgattcttttaataggaagttattatgtagaaacaaaaatctctgactgtactttaagcctatttcatgctttgtggacttggagaagacatgtcttataactgaatactgaaacatttattaaaccaatctttagcattctaa

SEQ ID NO: 127971 - DNA, 1176 bp, Homo sapiens
  misc_feature (1)...(1176): n = a,t,c or g
atgttcccaaattatgtctccctggatcccagaaaatacccactttctcaggatgatatcaatggaatccagtccatctatggaggtctgcctaaggaacctgctaagccaaaggaacccactataccccatgcctgtgaccctgacttgacttttgacgctatcacaactttccgcagagaagtaatgttctttaaaggcaggcacctatggaggatctattatgatatcacggatgttgagtttgaattaattgcttcattctggccatctctgccagctgatctgcaagctgcatacgagaaccccagagataagattctggtttttaaagatgaaaacttctggatgatcagaggatatgctgtcttgccagattatcccaaatccatccatacattaggttttccaggacgtgtgaagaaaatagatgcagccgtctgtgataagaccacaagaaaaacctacttctttgtgggcatttggtgctggaggtttgatgaaatgacccaaaccatggacaaagggttcccgcagagagtggtaaaacactttcctggaatcagtatccgtgttgatgctgctttccagtacaaagacaatacacaagccccaaacatcacagccttatctaaagcgtatgttttaactgatgaaaaactgagatccagaagggctgctggcccaaaggtcactggtggtgaggggcagagacggcccagctcaggctctagctgccttgagggtatttcacaaggctgcagtcagccagggctgtggtcacctcaaggcctgtttgggggaaaatccacttccaagcttaccaatgaagttgttgtcaggattcagctcttcatgtgttgttggaatgatgacctnagctacgacgaaaggaaaaggaaaatggaaaaagactatccaaagaatactgaagaagaattttcaggagtaaatggccaaatcgatgctgctgtagaattaaatgggaaagccagagagcaatttctagcacaagctgcagatccaaagggcaggactgacatgaggctccagggtgcagagctggaatatggttggcaaaacagagaaggcagaagatgggcagaatggcatggaacaaatccggagcagccacagtgcagcaaaggcttggagggcttgtggggttttatttaa

SEQ ID NO: 127972 - DNA, 443 bp, Homo sapiens
cttgacacattcttgttgatgaccactccagcttggcacgagggtccccgtgggacaaaaggggacactgcagtgtgaagcctcagcagtcccctcagcagaattccagtggtacaaggatgacaaaagactgattgaaggaaagaaaggggggaaagtggaaaacagacctttcctctcaaaactcatcttcttcaatggctctgaacatgactatgggaactacacttgcgtggcctccaacaagctgggccacaccaatgccagcatcatgctatttgaagtgaaaactacagccctgaccccttggaaaggtccaggcgccgtcagcgaggtgagcaacggcacgtcgaggagggcaggctgcgtctggctgctgcctcttctggtcttgcacctgcttctcaaattttgatatatttaggtacaatggagttttcttt

SEQ ID NO: 127973 - DNA, 484 bp, Homo sapiens
ccaagaaagggggccgcatcaagtgatccagagaaaagagtgcctccgagagtattcgcctgtcgtttcataagccaagggtacaggtgtcgccgtgggacaaaaggggacactgcagtgtgaagcatcagcagtctcatcagcagaattccattggtacaaggatgacaaaaggctgattgaaggaaataaaggggtgaaagtggaaaacagacctttcctctcaaaactcatcttcttcaatgtctctgaacatgactatgggaactactcttgcgtggcctccaacaagctgggccacaccaatgccagcatcatgctatttggtccaggcgccgtcagcgaggtgagcaacggcacgtcgaggagggcaggctgcgtctggctgctgcctcttctggtcttgcgcctgcttctcaaattttgatgtgagtgccgcttctccacccgggaaaggctgccgcctccaccgcctgcggctgta

SEQ ID NO: 127974 - DNA, 1275 bp, Homo sapiens; identical to SEQ ID NO: 121816

SEQ ID NO: 127975 - DNA, 767 bp, Homo sapiens
agatggtgcagagtatctcctttgggaggatgtctcatttgagagaatgcccctgcctcggggctacccctgtttccttctccttctgtccaacttggtccaggtctggtgtcctggatgtgctgctgaagagacaggttccgggggtggtgagcgcatgtacctgtggggtgggctgcgcacactggatatggtcacatagtgccagccactcaccagcctgagatggagatgatgatgatggagagcttcagaggggctgctcaggcttttcccagatatactacaagcaagagaatggctggcaggcacttggtggcctttttctgtcttccataggaagaattttctaacacaacaaacaggtgaggacacgactcgtctttacaagctctctgtggtgcttcccagcatggagcagatccacaaaagaactctgaggggcgtagcaaggagaccaaacacaggcacccagggagagcgcctggcatagccacagggccattgagatctgccacagggggtgtttgcccgctctcagtcgtctcccgagctgcagagtccccagcctggaaacaaggtttcagcattcccttacatggtccaggcgccgtcagcgaggtgagcaacggcacgtcgaggagggcaggctgcgtctggctgctgcctcttctggtcttgcacctgcttctcaaattttgatgtgagtgccacttccccaccccggaaaggctgccgccaccaccaccaccaacacaacagcaatg

SEQ ID NO: 127976 - DNA, 693 bp, Homo sapiens
atgtttcctctaaagactgaaactcagcagactgaggctcacacagcacacttagcagaaggtgaaggtgacttggaaatgcaagtgccgtcattcctgagtgttttggctcggacccgtttctgtctctcagttcctcttatgtggctagagcctttcccgggtggggaagtggcactcacatcaaaatttgagaagcaggtgcaagaccagaagaggcagcagccagacgcagcctgccctcctcgacgtgccgttgctcacctcgctgacggcgcctggacctgtggagagaacacactcgccgtgagtggtctgggagaaaatggaaggaaagcccggtggttgcctggtctgctgtcatttggccttgcccctgaatctaactactatgtgtccacagaaaccatcaccagacgttccccctttgtagatgctcactctgtcatctacagagcacattctttggaatcaaaggagagaagcctccgccggatgccttcaagggctggtgagtggctggcactatgtgaccatatccagtctgcgcagcccaccccacaggtacatgcgctcaccacccccggaacctgtctcttcagcagcacatccaggacaccagacctggaccaagttggacagaaggagaaggaaacaggggtagccccgaggcaggggcattctctcaaatga

SEQ ID NO: 127977 - DNA, 432 bp, Homo sapiens
agattttcccgggtcgacgatttcgtcctgaccatggacgacgggcccccgccccgccgcgcccgcggcgacctcacccactctggtctgtggcgggtgtgctgcatcgaagggatctataaagggcactgcttccggatcaatcacttcccagaggacaatgactacgaccacgacagctcggagtacctcctccgcatcgtgcgagcctccagcgtcttccccatcctcagcaccatcctgctcctgctgggtggcctgtgcatcggtgctggcaggatctacagccgcaagaacaacatcgtcctcagtgccggcatcctcttcgtggctgcaggcctcagtaacatcgtcggtatcatcgtctacatttccagcaacacaggtgacccgagtgacaagcgggacgaagacaaatagaaccattacaac

SEQ ID NO: 127978 - DNA, 1417 bp, Homo sapiens
atgcatgtgtgctccctcatcctggcctggttgccagaaagcactggtgacctggcagacctggcagggcccatggaccttcaggaatcagggttgtcactgaacactccagctccttggaggcagcagctgaaggggcccaatggaggaaagagcttggggacggcagctgggatctataaagggcactgcttccggatcaatcacttcccagaggacaatgactacgaccacgacagctcggagtacctcctccggcttcctgcccaccttgccctgggcctggtgcccctctccaagtctgcatttccagttaggtggataacttctgtgccaggccgcagggggctggtgtcagggctgctgggagtccacagtgtgcccgggggggctgatgatgatgatgatgatcaaggcatcgtgcgagcctccagcgtcttccccatcctcagcaccatcctgctcctgctgggtggcctgtgcatcggtgctggcaggatctacagccgcaagaacaacatcgtcctcagtgccggcatcctcttcgtggctgcaggcctcagtaacatcatcggtatcatcgtctacatttccagcaacacaggtgacccgagtgacaagcgggacgaagacaaaaagaaccattacaactacggctggtctttttactttggagctctgtctttcattgtggctgagaccgtgggcgtcctggctgtaaacatttacattgagaaaaataaagagttgaggtttaagaccaaacgggaattccttaaggcgtcttcctcttctccttatgccaggatgccgagctacaggtaccggcgacggcgctcgaggtccagctcaaggtccaccgaggcctcgccctccagggacgtgtcgcccatgggcctgaagatcacaggggccatccccatgggggagctgtccatgtacacgctgtccagggagcccctcaaggtgaccaccgcagccagctacagccccgaccaggaggccagcttcctgcaggtgcatgactttttccagcaggacctgaaggaaggtttccacgtcagcatgctgaaccgacggacgacccctgtgtgagccgcctgccctttctctccgctccagcctctccccagaacggctctttttgtcacacaggatggcatgtgatcctcaagacgacgaacaatgaactaaagccaaatgcagccctccctggcctccagaggtggcgtggactggctttgcacgaaggttgtgcccaccttctctccctcctcccgacccgccccctcgcccccacccctgtgtgtttcgccagttaagcacctgtgactccagtacctactactggttttgggttggttgttctgtcttttttttaattaaataaaaacatttttaaaaaaaaaaaaaaaaa

SEQ ID NO: 127979 - DNA, 1206 bp, Homo sapiens
atgttcgtgtcttccctcattcaccagcaagcattaaatggcactcatctagattctgaggactcagcagcaaataaaacaagtgccattgtttcaccctgtctccatgtcgtgaactcttcccacactgacccacctgtgtcctctgtccccatccccccaatcatcagcctgtcttccattatcaagtcacttcctgccaaaactggtagactgcaaactccctgcagtgtagaaccgatgatcattgagattaaagagctggggaaatttcattccactcaggttcacaagtcccctgagagagaggcaacagcattaatgctgccacacgcacatcaaaatgggtaccaagggacagggcattattttccagccacagtgagacacccagtgacttcagagaccacagccatatatccacatgaccagacgaggagaattaaaatcggcattccggggatggcatcaccaacactgagtttcagggggttatttatttattatgtgataatggcccaaaggttaggaccacctctcaaaggcaagaacctgataatttttgcccagagtccacactggagcccacccaccttggaaaccaacagtggacgtgaactcagttggatgggaaatatgaaggaccagaagtatgaatctgtgcttgatgattatagagatgtgtgtaacatcgagtctgcaggaccagacccagccataacagaaaatggccctacatctctgaaagaagaggcagagagctgcctgagcaagggcctagaagccacggctgcttctcctctcatctccagcacagttcagctctggcccaattctgcatctctccctcaacgaagccctgtagctgccctaacctctccccataaaagtggatgtgtctctgaggacagcaggctccccacagtctttgcagcagcccaacacggggagctggggaatgagcacacttcctcccttcgtgtgttcagttgcacctgcccacctcctgttgagagatggacagccccacttgagtcccagcctgtaggggaatggaaacaaccctctccaccaccaggacccataagtgaaggcatttgggagctcacaccttcagaagctgccacaccaaactgccctgtcatccgcacagggactcccacccactgtgcatctgcttctggactccttcctggtttctcataa

SEQ ID NO: 127980 - DNA, 1356 bp, Homo sapiens
atgttcgtgtcttccctcattcaccagcaagcattaaatggcactcatctagattctgaggactcagcagcaaataaaacaagtgccattgtttcaccctgtctccatgtcgtgaactcttcccacactgacccacctgtgtcctctgtccccatccccccaatcatcagcctgtcttccattatcaagtcacttcctgccaaaactggtagactgcaaactccctgcagtgtagaaccgatgatcattgagattaaagagctggggaaatttcattccactcaggttcacaagtcccctgagagagaggcaacagcattaatgctgccacacgcacatcaaaatgggtaccaagggacagggcattattttccagccacagtgagacacccagtgacttcagagaccacagccatatatccacatgaccagacgaggagaattaaaatcggcattccggggatggcatcaccaacactgagtttcagggggttatttatttattatgtgataatggcccaaaggttaggaccacctctcaaaggcaagaacctgataatttttgcccagagtccacactggagcccacccaccttggaaaccaacagtggacgtgaactcagttggatgggaaatatgaaggaccagaagtatgaatctgtgcttgatgattatagagatgtgtgtaacatcgagtctgcaggaccagacccagccataacagaaaatggccctacacctctgaaagaagaggcagagagctgcctgagcaagggcctagaagccacggctgcttctcctctcatctccagcacagttcagctctggcccaattctgcatctctccctcaacgaagccctgtagctgccctaacctctccccataaaagatgtctcatcaaagtgcctctggcccccacactgaggttcccccgagacaaacatcctggtaaatatagctttgtgtgctttcattatttattcccagggatgcctaatgcccctgaattgcctggcatcttggctctgctgcctgtcagtggatgtgtctctgaggacagcaggctccccacagtctttgcagcagcccaacacggggagctggggaatgagcacacttcctcccttcgtgtgttcagttgcacctgcccacctcctgttgagagatggacagccccacttgagtcccagcctgtaggggaatggaaacaaccctctccaccaccaggacccataagtgaaggcatttgggagctcacaccttcagaagctgccacaccaaactgccctgtcatccgcacagggactcccacccactgtgcatctgcttctggactccttcctggtttctcataa

SEQ ID NO: 127981 - DNA, 445 bp, Homo sapiens
agagcggccgcggcgcacggacctcaccgtgctggtggcccacaacgatgaccccaccgaccagatgtttgtgttctttccagaggagcccaaggtgggcatcaagaccatcaaggtgtactgccagcgcatgcaggaggagaacatcacacgggctctcatcgtggtgcagcagggcatgacaccctccgccaagcagtccctggtcgacatggcccccaagtacatcctggagcagtttctgcagcaggagctgctcatcaacatcacggagcacgagctagtccctgagcacgtcgtcatgaccaaggaggaggtgacagagctgctggcccgatataagctccgagagaaccagctgcccaggatccaggcgggggaccctgtggcgcgctactttgggataaagcgtgggcaggtggtgaagatcatccggcctcgtgcc

SEQ ID NO: 127982 - DNA, 404 bp, Homo sapiens
ttcccgggtcgacgatttcgtgcggcggcggaggctgccatggacgacgaggaggagacgtaccggctctggaaaatccgcaagaccatcatgcagctgtgccacgaccgtggctatctggtgacccaggacgagcttgaccagaccctggaggagttcaaagcccaatttggggacaagccgagtgaggggcggccgcaatacattgggtggaagagctggcggtaggtgccagtgcgaacttcatcaatgactgtgggttccaagtctacaaacacagcccggggcacgtgcttgccagcgcccgtctcactgaagaaggtgttgaaggagtcatctcctcccccaatggtcttgtcacttggcatctggccatcgggctggatgccgtgttccaggcagta

SEQ ID NO: 127983 - DNA, 843 bp, Homo sapiens
atggacgacaaggaggagatgtaccagctctggaaaatccgcaagaccatcatgcagctgtgccatgaccgtggctacctagacgagcttaaccagacactgaaggagttcaaagtccagtttggggacaagccaagtgaggggcagcggcggcgcacggacctcaccgcgctggtggcccacaatgatgaccccaccgacaagatgtttgtgttctttccagaggagcccaagtgcctggtccacatggctcccaagtacatcctggagcagtttctgcagcagaaattgctcatcgacatcacagagtacgagctagtccctgagtacgttgtcatgaccaaggaggaggtgacagtgctgttggccctatataagctccgagagaaccagctgcccaggatccaggcgggggacgccgtggcgcgctactttgggataaagcatgggcaggtagtgaagatcatccggcccaccgagatggcaggcaggatggatgcccctgccctgccggagtctagccccccagctctctcccggctgctcctcctctgggctccccaaggcaggcagcctccactcaagagctcccatcctgggatgagtcttcccatggcccagcccgtcccattcacctgtgtatttatgcgagatccagcctcaggaggctcaccccatcttttggaaatatttgaggacttggctgaaggtgaagaccataaattcatcaaggatcgtttcagagccaaaagcaggtatgttatcataggagatgacagctccatgcatgttattgcccctgaagacctttcagtgggacaagacgtgaaggtggaagactga

SEQ ID NO: 127984 - DNA, 612 bp, Homo sapiens
  misc_feature (1)...(612): n = a,t,c or g
aacagacagtggcatattcaccccggtccaaactcggaacactgctgccagaatttcccaatgtcaaagatctaaatctgccagccagcctgcctgaggagaaggtttctacctttattatgatgtacagaacacactgtcagagaatactggacactgtaataagagccaactttgatgaggttcaaagtttccttctgcacttttggcaaggaatgccgccccacatgctgcctgtgctgggctcctccacggtggtgaacattgtcggcgtgtgtgactccatcctctacaaagctatctccggggtgctgatgcccactgtgctgcaggcattacctgacagcttaacttaagtgattcgaaagtttgccaagcaactggatgagtggctaaaagtggctcttcacgacctcccagaaaacttgcgaaacatcaaggtcgaaatgtccgagaagggtcttccaaatctgagacggcaaacatcacttaatcatctctggcaggcatcttcgaaaagtgattcacagtgcagacatcacgtttcaaatgctggaagantgggagaacgtggacctggacagcatcaccaagccaaccctttacacccat

SEQ ID NO: 127985 - DNA, 459 bp, Homo sapiens
caacccatgagctaacgagttgattggattggattataggcatctcgaacagtgatccacagtgcagacatcacgttccaaatgctggaagactggaggaacgtggacctgaacagcatcaccaagcaaaccctttacaccatggaagactctcgcgatgagcaccggaaactcatcacccaatgtaagctgtcccaccagggattgttgtcttctgtgaatatatgttcatgtcccggtgaacaagggcttccaacatgcagactgcaggtatactgctccaaatatcaaccccatgtaggcaggatgtttgatcttggtactcttgtgcggcccagttcctaacaggccacggtccggtactggccctggggttggggacccctgggttaaaggattcagtccaagatctgagcaagtcatttaacctcttgggcctcaattttctcacctggaggc

SEQ ID NO: 127986 - DNA, 495 bp, Homo sapiens
tccttgcactttctcaggaggttacagagctttgcagcaagattaagttccaggctgagctgctgtgcccatctgactgttgaacactatattacaccagacattttaaatgactcccacaaataactgggaaccctgatactttctcccaaagaatcatctaactcatttagcttggctagtcgcagcagtatctgcatattttccttagttgtcacaggaactaaaacctttttgtctctggagagaatgcggagtacttcccaggcaggacacttgacatgttgttgggatgtcctttataaggactttaaatatgccttcacagagtttctttcttttatcttcatctgttgattcaaatttgaaagtagccctatgcttgtcgctgtaatccctcaggacccgctcgatagcccctgcttcgccggcccggacgatgtagagggcgcgctcctcatccatggccgcaggtgcgggggagccgcggccgct

SEQ ID NO: 127987 - DNA, 2457 bp, Homo sapiens
acggaaggcacagaaggcagacttcgctcagcacaaaagaatttctgataaccatactgggcaaaatgaactgggctgccttcggaggggtctgaattcttcatcccagaaggcattcagatagattcgagatgcccactaagcagaaatatcacggaatggtaccattactatggcattgcagtgaaagaaagctcccaatattatgatgtgatgtattccaagaaaggagctgcctgggtgagtgagacgggcaagaaagaagtgagcaaacagacagtggcatattcaccccggtccaaactcggaacactgctgccagaatttcccaatgtcaaagatctaaatctgccagccagcctgcctgaggagaaggttcaaagtttccttctgcacttttggcaaggaatgccgccccacatgctgcctgtgctgggctcctccacggtggtgaacattgtcggcgtgtgtgactccatcctctacaaagctatctccggggtgctgatgcccactgtgctgcaggcattacctgacagggagaaaggtcttggtggaacttcatgctttttccacagcaacagctgttcccttcctccaaacatgtacctctcagaaaggcttcttctgtcctcctgtcctgtccccagtcttcctcatgaacacctggtaactgctgttatcaccgttgttgcagttgtaacagcatcactgctgatgggcattcagggagctacgagtgtggagttaagatgtaggagaagggctgaagctggagctgtagacttggcagccagccgcacaagagggaggaaaagtgtgtccctagaagtggaggacagaccctggcatcccagcctagggaaggaaagaggtggagggaaagcggaggaaggaggtcgagctgcaggtatacacccacagaggacagtatgtcaagaaggcatagatgctgcaggagatggagtcagttggggcttagggaggcatctcttagagcaggtgatcaggagcttaactcaggtgattcgaaagtttgccaagcaactggatgagtggctaaaagtggctctccacgacctcccagaaaacttgcgaaacatcaagttcgaattgtcgagaaggttctcccaaattctgagacggcaaacatcactaaatcatctctgccaggcatctcgaacagtgatccacagtgcagacatcacgttccaaatgctggaagactggaggaacgtggacctgaacagcatcaccaagcaaaccctttacaccatggaagactctcgcgatgagcaccggaaactcatcacccaatacgtagctcttgttaaatacaactgcagtgatgcgtgtggggttctcctttgtttgacagtatatcaggagtttgaccatctcttggaggagcagtctcccatcgagtcctacattgagtggctggataccatggttgaccgctgtgttgtgaaggtggctgccaagagacaagggtccttgaagaaagtggcccagcagttcctcttgatgtggtcctgtttcggcacaagggtgatccgggacatgaccttgcacagcgcccccagcttcgtaaatgaggtccagagacaagtaacttgccaaggccacaattgttcagaagaagagccaagatttgcatacaaacaatttaaattcagaacttctactcttaattaccacactgatttggttttagagtctatgaaactctgtgaaggcatatttaaagtccttataaaggacatcccaacaacatgtcaagtgtcctgcctggaagtactccgcattctctccagagacaaaaaggttttagttcctgtgacaactaaggaaaatatgcagatactgctgcgactagccaagctaaatgagttagatgattctttggagaaagtatcagagttcccagttattgtggagtcattaaaatgtctgtgtaatatagtgttcaacagtcagatggcacagcagctcagcctggaacttaatcttgctgcaaagctctgtaacctcctgagaaagtgcaaggaccggaaatttatcaatgacattaagtgctttgacttgcgcttgctcttccttctgtcactttttgcacacccgacatcaggtcacaattgcgctatgagctccagggactaccgctgctaacgcagatcttggaaagtgcctttagcatcaagtggaccgatgagtatgaatcggccatagaccataatggacctcctctctcacctcaggagacagactgtgccattgaggccctcaaagctctcttcaatgtgacggtagacagttgggaaggtgcataaagagagtgattctcatcagttccgtgttaatgggcagctgtccttcgtcattgtttactaatcgtaggtccaacttgaaggacaaaacaggaggagcttacacaggtgggctgctgagccctaa

SEQ ID NO: 127988 - DNA, 1908 bp, Homo sapiens
atggtgcgtcacccggatatgccaaaagcgacgtttgcggatatgtggttcaccctgaaaaaaggggagccctggagcggcatcgtgaaaaatcgccgcaaaaatggtgaccattattgggtgcgggccaatgcggtaccgatggtgcgcgagggaaaaatcagtggctatatgtcgattcgtacccggacaacggatgaagagatcgcggcggtggaacagctgtacaaagcgttgaacgccggacgtaccagtaagcgtattcataaaggcctggtggtgcgtaaaggctggctgggtaaactgccttcattacccgttcgctggcgggcgcgtggagtgatgaccctgatgtttatcttgctggcggccatgctttggtttgttgctgccccggtggtgacgtatatcctctgtgcattagtggtattgttggcaagcgcctgttttgaatggcagattgtgcgcccgatagaaaatgttgcccatcaggcaaagaaggtggcgaccggagaacgtaatagtgttgagcatatgaatcgcagcgatgagctggggctgacattacgtgcgcacgggaacagtacctcgtccgctgtagtgtggatcggcgtggagataaagctgatacagaaattcattttgatagagcgtgtctccggttgctcccggaaaactgtcatcaaaggtccaaccgttttccagcatcagcgggttcactacggaaacggaaataaacggttccagtcctttgagtttgcgcatgatcagcgtgcgcaaaaacgaggagcttcctcctcgttttttatcgttaagtatagcgcgtgcttaccactttttattcagcaggcggtcgatgctatacgcgcccggaccggtaattgccagcagcaggaatccgccagaaattgtcaggtttttcatgaacatcagcgagttgacgccttcagcaaaggaaaagaaccgcctaaatgcacagtagagaagcacagtcacattgaaccaaagaaccacgcgcttcaagaactccaaacctccttgcgcaagaaccaacacgagtcccagaccgccaggtgtaacacgagagcaaacgtcaatgcgaacatgaaattcaagcccaacacaagcgaagtgcccccaaccagtaaaacgcgtactgtccgagttcccaccaagaaactaaacaccacccgcaacggagaacagcccgaacaatctaaaccgccacgatttaggcccggagaaaaccggccattagcacaattaacccgcaccacctgcatgcagcatagtacgaatgcgcagaaagctgccgtcgacaaacgctgtaattaccagcgccgaaacagtgccaggcaagtcgcaggctgggatcaaacaagacggtgcaaagccttaaaactgctggtgctgtggcgtagtgatgaagatgcgcagcaacgtctggatatggtgaaagagttcaacgaactgtgccactcacacggtctggtaagcatcattgagccagtcgtccgcccaccgcgtcgtggcgataaattcgatcgcgaacaagcgatcatcgatgccgccaaagagctgggcgacagtggcgctgacctctacaaagttgaaatgccgctttatggcaaaggtccgcaacaagagcttctctgtgcttcacaacgtctgaatgaccatatcaatatgccatgggtgatcctctcttccggtgtcgacgaaaaactgttcccgcgtgccgtacgcgtggcaatgacggcgggcgcatcgggattcctggcaggccgtgcagtctgggcatcggtcgtcggtttaccagacaacgagctgatgctgcgtgacgtttgcgcaccgaaattacaacaacttggcgatatcgtcgacgaaatgatggctaaacgccgctaa

SEQ ID NO: 127989 - DNA, 800 bp, Homo sapiens
atgctggcggtcgatcagcgcgaagccatgcgcatgatgtttgccgcggctggggcacccgctccggtagccgatagcgttttaactgatttcaaagttaacgctgcaaaggccctctcgccttatgcctccggcgaattctggtagatcaacaattctgctaccgccaggtggttgagcaaaacgcgattgccaaaagttgcgccatgattgtcgccgccgatgagttcattcctggcaacggtattccggtcgatagcgtggttattgaccgcaaaatcaatccgctacagatcaaacaagacggtggcaaagccttaaaactgctggtgctgtggcgtagtgatgaagatgcgcagcaacgtctggatatggtgaaagagttcaacgaactgtgccactcacacggtctggtaagcatcattgagccagtcgtccgcccaccgcgtcgtggcgataaattcgatcgcgaacaagcgatcatcgatgccgccaaagagctgggcgacagtggcgctgacctctacaaagttgaaatgccgctttatggcaaaggtccgcaacaagagcttctctgtgcttcacaacgtctgaatgaccatatcaatatgccatgggtgatcctctcttccggtgtcgacgaaaaactgttcccgcgtgccgtacgcgtggcaatgacggcgggcgcatcgggattcctggcaggccgtgcagtctgggcatcggtcgtcggtttaccagacaacgagctgatgctgcgtgacgtttgcgcaccgaaatcgggagaaccaatcctatag

SEQ ID NO: 127990 - DNA, 2061 bp, Homo sapiens; identical to SEQ ID NO: 122953

SEQ ID NO: 127991 - DNA, 1779 bp, Homo sapiens
ttaaacgggaacataagttctgcgaatgcccacggggcggagtatcggtacgaacgcagacccgcttttgaaaatgcgcacacggttctgctgacggttctggttgtacaccacggttgccagcaggccagtccacagagaaagacgcattgctgacatttcaacagagatcgggcttggcagcagtaaggcttcaacgcctggatggatcatctgctgcactttcggatcaacgaagctgtaggtgatcacttcctgatagcctttgtcgttgagcagcgttttcacgcgcttgagcgacaggtcagcttcacggtgagtacccataatcaggcttgcctgtaccggctcatccgggatgttgttgtagccgtaaacacgcgcgacttcttcaaccagatcttcttcaatctccatatcgaaacgccagctcggcgcaactgcctgccattcgtctttgccttcggtcacttcgcagccgagacgacgcagaatgtcagttacctgctcatccgcaatatgatggccgatcaggcgatccagtttgctacgacgtagagtgatggttgcacgcttcggcagcgttgcttcgttggtgatatcaattaccgggccagcctcaccaccgcagatgtcgatcagcagacgggtcgcacgttccatcgctttgtgctgcagtgccggatcaacgccacgctcataacggtgagacgcatcggtatgcaggccatgacgacgagcacgaccggtgatagacagagatcctggcagattgcgatggatggtagccagaaattgccacagcggatgttggattctgttcgctggcatctggcgcatgacagcaagttcgatctgctggcgctgggcgtcgcgggttggatgcgttatgtcggtggtgttgatgaacagggaaatccgatagaaatcagtgacccactgctcaatcgcatggctgcgaatcgcttcgttcacatcacgcagttgcccgttatctaccgcgccttccggaatagctttacccaggtcgcccggttgcagctctgccataaacggtttcagcaacggcacacaagcgtaagagaacagatagttaccgtactcagcggtatcagagataaccacgttcatttcgtacagacgcttacgggcgatggtgttggcaatcagcggcagctcgtgcagtgattcataatatgcagactcttcaatgatgccggaatcgaccatggtttcgaacgccagttcaacgcccgctttcaccatcgcaatcatcagtacgcctttatcgaagtactcctgctcgccgattttgccttcatactgcggcgcggtttcaaacgcggttttgccggtctcttcacgccaggtcagcagtttcttatcatcgttggcccagtccgccatcataccggaagagaattcgccggagatgatgtcgtccatatgtttctggaacaggggtgccatgatctctttcagctgttcagaaagcgcataagcacgcagtttcgccgggttagaaggatcctctagatcactcgcgcactggcctctctttgtctctctccttgtcttgtgcgcgtttcgtttgtccccggtccgttgggttgcaggatcttcctttgggacccgtaaaattcggatctcatagttttgggcccattcgtatcgactggtaattcggctgccaccgaacaacctttgcggcaaaaccaggtaattggtgtcgatatcaaccaacagccgcttgataccatcaatcgtggcgaaatccat

SEQ ID NO: 127992 - DNA, 933 bp, Homo sapiens
ctactgcgcaaaagtgtcagcgttattattaaaggcacgattaaaaccataattggtttcatgttgttgcaggcagggtccggcatcctcaccagcaccttcaaaccggtggtggcgaaaatgtccgaagtctacggcattaacggcgcaatttccgatacctacgtgatgcaggacgggtgagccccagaattggggcttagcccaggcaggttcttgcgacatgacaccgattttgtcctgcagctcggcatagtcatggtcaggcttgcgggagatggcagtctcaatatcaatgcccaggcgaataattaattccgggcgatattgcgccatttgttggtataaacgccgttcgcgctgcgccagaaacatgctgattttcccggtcgcacgttcgacgccaatccccggtccatcataataaaagcccgaaatttcagcctgcgggaagcgatcgctgaccaccagaacgccactttgcgccagtcgctgaaccttgcgtagattcgccattcttcgcagcgagaagcagtacataatcaccgccgcccatagcgccggagatttggttttcatgctttgggttttcgaggatttggccgccagtcgccgttccagccagacgccaaccaacggcaatcgtttgattttgtcgccgtcttcgccggagagcagccccagatagcgccgctcggtttgccagtgttgttgcagcgatttcaccaggtcggtggtcagtgtggatttaccggtgccatcacacccgaccaccgcaatcagccccggaatgtagttgggtttagggttgactcctagaggatccccgctgcaactatgccggccgctcatctcgaacgggtacagcttcagcacgcgcgcggcgttttccagccccaccgcttctagtggcagcggtaagcgtagcgtcat

SEQ ID NO: 127993 - DNA, 4258 bp, Homo sapiens
ccgttccggatttcccgggtcgaccatttcgttgcaaggcccaagaagcccatcctgggtaggaaattgcattggggaaccctgtgcggattcttgcggctttggccctatcttttctatgtccaagctgtgcccatccaaatagtccaagatgacaccaaaaccctcatcaagacaattgtcaccaggatcaatgacatttcacacacgcagtcagtctcctccaaacagaaagtcaccggtttggacttcattcctgggctccaccccatcctgaccttatccaagatggaccatacactggcagtctaccaacagatcctcaccagtatgccttccagaaacgtgatccaaatattcaacgacctgggagaacctccgggatcttcttcacgtgctgggccttcttttaagagctgccacttgccctgggccagtggctggggagaccttgggacagctgggggggtattctgggaagtttcaggttattccacagaggtggtggccctgagcaggctgcaggggtctctgcaggacatgctgtggcagctggacctcagccctgggtgctgaggccttgaaggtcactcttcctgcaaggactacgttaagggaaggaactctggcttccaggtatctccaggattgaagagcattgcatggacaccccttatccaggactctgtcaatttccctgactcctctaagccactcttccaaaggcataagaccctaagcctccttttgcttgaaaccaaagatatatacacaggatcctattctcaccaggaagggggtccacccagcaaagagtgggctgcatctgggattcccaccaaggtcttcagccatcaacaagagttgtcttgtcccctcttgacccatctccccctcactgaatgcctcaatgtgaccaggggtgatttcagagagggcagaggggtaggcagagcctttggatgaccagaacaaggttccctctgagaattccaaggagttccatgaagaccacatccacacacgcaggaactcccagcaacacaagctggaagcacatgtttatttattctgcattttattctggatggatttgaagcaaagcaccagcttctccaggctctttggggtcagccagggccaggggtctccctggagtgcagtttccaatcccatagatgggtctggctgagctgaacccattttgagtgactcgagggttgggttcatctgagcaagagctggcaaaggtggctctccagttagttctctcgtaactggtttcatttctactgtgactgatgttacatcacagtgtttgcaatggtgttgccctgagtggatctccaaggaccaggttattttaaaaagatttgttttgtcaagtgtcatatgtaggtgtctgcacccaggggtggggaatgtttgggcagaagggagaaggatctagaatgtgttttctgaataacatttgtgtggtgggttctttggaaggagtgagatcattttcttatcttctgcaattgcttaggatgtttttcatgaaaatagctctttcaggggggttgtgaggcctggccaggcaccccctggagagaagtttctggccctggctgaccccaaagagcctggagaagctgatgctttgcttcaaatccatccagaataaaacgcaaagggctgaaagccatttgttggggcagtggtaagctctggctttctccgactgctagggagtggtctttcctatcatggagtgacggtcccacactggtgactgccatcttcagagcaggggtccttggtgtgaccctctgaatgggtccagggttgatcacactctgggtttattacatggcagtgttcctatttggggcttgcatgccaaattgtagttcttgtctgattggctcacccaagcaaggccaaaattaccaaaaatcttggggggtttttactccagtggtgaagaaaactcctttagcaggtggtcctgagacctgacaagcactgctaggcgagtgccaggactccccaggccaggccaccaggatggcccttcccactggaggtcacattcaggaagatgaaagaggaggtttggggtctgccaccatcctgctgctgtgtttttgctatcacacagtgggtggtggatctgtccaaggaaacttgaatcaaagcagttaactttaagactgagcacctgcttcatgctcagccctgactggtgctataggctggagaagctcacccaataaacattaagattgaggcctgccctcagggatcttgcgttcccagtggtcaaaccgcactcacccatgtgccaaggtggggtatttaccacagcagctgaacagccaaatgcatggtgcagttgacagcaggtgggaaatggtatgagctgaggggggccgtgcccaggggcccacagggaaccctgcttgcactttgtaacatgtttacttttcagggcatcttagcttctattatagccacatccctttgaaacaagataactgagaatttaaaaataagaaaatacataagaccataacagccaacaggtggcaggaccaggactatagcccaggtcctctgatacccagagcattacgtgagccaggtaatgagggactggaaccagggagaccgagcgctttctggaaaagaggagtttcgaggtagagtttgaaggaggtgagggatgtgaattgcctgcagagagaagcctgttttgttggaaggtttggtgtgtggagatgcagaggtaaaagtgtgagcagtgagttacagcgagaggcagagaaagaagagacaggagggcaagggccatgctgaagggaccttgaagggtaaagaagtttgatattaaaggagttaagagtagcaagttctagagaagaggctggtgctgtggccagggtgagagctgctctggaaaatgtgacccagatcctcacaaccacctaatcaggctgaggtgtcttaagccttttgctcacaaaacctggcacaatggctaattcccagagtgtgaaacttcctaagtataaatggttgtctgtttttgtaacttaaaaaaaaaaaaaaaagtttggccgggtgcggtggctcacgcctgtaatcccagcactttgggaggccaaggtggggggatcacaaggtcactagatggcgagcatcctggccaacatggtgaaaccccgtctctactaaaaacacaaaagttagctgagcgtggtggcgggcgcctgtagtcccagccactcgggaggctgagacaggagaatcgcttaaacctgggaggcggagagtacagtgagccaagatcgcgccactgcactccggcctgatgacagagcgagattccgtcttaaaaaaaaaaaaaaaaaaaaagtttgtttttaaaaaaatctaaataaaataactttgccccctgctctttgtttcctgtcgccgttcctggaggggcttcgggagagctgtttgtgtgtgacagggcaaggcctggctggcccccatccatcactggggtcacgctccgccccaggcttggccacagccagccgccagttattcaggcaaaaggattaccctgtaaagaaaacagagctgggtttggacgctgagaggactgggaaacaggttgcagggaggcacaggaagcacacaccaagagccagagagaggcctctgtgccatcccaaggaatgaggacaaagagaggggtcctcgggaagaagggatccactttggagaggccccttaacacgggacagagcaaggacagaaagaggcatccactgggatggaagaaggacaggatccacaggggaaagagggatgaggggaatgaagagagaagaaataaagagttcagcatcacctcatgatgcaactaatttggcacaatgcccagcacaatgtacccctccattctgatttggtggccagaagaattgagattcttgggccaggcacgatggctcatgcctataatcccagcactttggaaggtcaaggtgggtggatcacttgagaccaagagttcgagacaagcctggccaacatagcaaaaccccatctctactgaaaatacaaaaagtagccaggcatggtggcacgtgcgtgtaatcccagctacttggcaggctgaggcaggagaatcgcttgaactcgggaggcagaggtggcagtgaaccgagatcatgccactgcactccagcctgggtggcaggtgagactctgtctc

SEQ ID NO: 127994 - DNA, 2810 bp, Homo sapiens
tgcgggcgttgcctgtgaacctttccgccagtgggtaatagaagataactttgttgccggacgtccggaatgggaaaaagcgggagccgaactggttagcgatgtgctgccttatgaagagatgaagttgcgcatgctcaacggcagtcattcattcctggcgtatctggggtatcttgcaggatatcagcacattaatgactgtatggaagatgaacattatcgttatgcggcgtatggcttgatgttgcaggaacaagcgccgacgttgaaagtgcagggcgttgatttgcaagattacgctaaccgattaattgcacgctatagcaacccggcgttacgtcatcgaacctggcagattgcgatggatggtagccagaaattgccacagcggatgttggattctgttcgctggcatctggcgcatgacagcaagttcgatctgctggcgctgggcgtcgcgggttggatgcgttatgtcggtggtgttgatgaacagggaaatccgatagaaatcagtgacccactgttccctgttattcagaaggctgtacaaagtagtgccgaagggaaagcgcgcgtccagtcattgctggcgattaaggcgatctttggtgatgatttgccagacaatagtttgtttactgcaagagtgacggaaacttcatgccgagacgaatcacgtccagtggtgccactttctcttcacaaccttcaacaactacggtttttccgcggcggatttgctcagcggtcagaccttcagtatcaatcgacaggatcttgcagtgtgaccggtgccgctaaccataacacggctgcacatgttgatttccgtaacggtacgatccagtcagtctcctccaaacagaaagtcaccggtttggacttcattcctgggctccaccccatcctgaccttatccaagatggaccagacactggcagtctaccaacaggtcctcaccagtatgccttccagaaacgtgatccaaatatccaacgacctggagaacctccgggatcttcttcactcatacggcggctgccagttcagggtatacatcgcatctccttattcatccgctttcagcataaacgttattcagacgctgcgcttaactttcatattccggttgtcgcgacggcaacatttcgctaaagtcacgccccttcttcaccggcatggggattatttcgtgtttattggttttgattacggtacagcaaactgttcagtggcggtcatgcgtgacggtaaaccgcatttgctaaaaatggaaaacgacagcacgctgctgccttcaatgctttgcgcgccaacgcgtgaagcggtaagcgaatggctgtaccgccatcatgatgttccggcagacgacgatgaaacgcaggcgctgttacgtcgggcgattcgttataaccgcgaagaagatatcgatgttacggcgaaaagcgtgcagttcggtctttcctcactggcacagtacattgatgatccagaagaagtgtggtttgtgaaatcaccaaaatcgttcctcggtgccagcggcttaaaaccgcagcaggtagcgctgtttgaggatctggtctgcgcaatgatgttgcacattcgccagcaggcgcaggcacagctgccagaagcgattacatcagcgcccaactacattccggggctgattgcggtggtcgggtgtgatggcaccggtaaatccacactgaccaccgacctggtgaaatcgctgcaacaacactggcaaaccgagcggcgctatctggggctgctctccggcgaagacggcgacaaaatcaaacgattgccgttggttggcgtctggctggaacggctcatgcctgtaatatcatctctatccgaggctatggcagtgatgaagatgcgcaaacgtctggatatggtgaaagagttcaacgaactgtgccactcacacggtcttgtaagcatcattgagccagtcgtccgcccaccgcgtcgtggcgataaattcgatcgcgaacaagcgatcatcgatgccgccaaagagctgggcgacagtggcgctgacctctacaaagttgaaatgccgctttatggcaaaggtccgcaacaagagcttctctgtgcttcacaacgtctgaatgaccatatcaatatgccatgggtgatcctctcttccggtgtcgacgaaaaactgttcccgcgtgccgtacgcgtggcaatgacggcgggcgcatcgggattcctggcaggccgtgcagtctgggcatcggtcgtcggtttaccagacaacgagctgatgctgcgtgacgtttgcgcaccgaaattacaacaacttggcgatatcgtcgacgaaatgatggctaaacgccgctaagatgaggataaaaggaatgaaatggtttaacaccctaagccacaaccgttggctggaacaggaaaccgaccgcatctttgattttggtaaaaattccgtagtgccgactggttttggctggttaggcaataaagggcaaatcaaagaagagatgggcacccatctgtggatcaccgctccagctgactacggcggcccgcgcggctcactccccgcagttcgtcccgtgcgcgaccggagcctggagtttgcaaaacagagcgatgagcacattctggacttagtgcacgacttggcgagcaatgatgaatgcaagacaatctgcgcgcgacatatgactgcgtgtcgcccctggaagcgtgttaagtataaaatggataacaattacgaccacgatcaacataacatggtggatgatgaagagctggctgaaaacatctga

SEQ ID NO: 127995 - DNA, 921 bp, Homo sapiens
gagctgcctgccagtcccgcgccgtgcgcccgtactcctcaacccttgggtggtcgatgggaggcagcccgcaggaaggagcgcgtcctctgcctgtttgacgtggacgggaccctcacgccggctcgccaggtaggaccctgaagattggaagctcccaccgggagtgtcacgcggacacccccgaggctgagtgtggggtctgcagcagcgtgaccgaagtgagggctaagtggaggtcccagacatgttgaaagccagaatgctatgcttcccctctccccccatagaaaattgaccctgaggtggccgccttcctgcagaagctacgaagtagttacttgcccgtggggtcacagacgtggtctcacactctttcttcctcctgtcctctatgtgaccctgaagtcattgggagagacactgtgcctgtctcagggtcaggcagcccaggccacgctcagagccctgtgttccttggccagaccatccagaaccacctggggccaggtggggctagatttgaattcagggccgttctggttctctctggctccccgccctccctcaccaccagtggaaccttcatcgagttccggaatggcaactgtgtgcccagccagggcctggcacacagcaggtcctctgagctgccatccgctccctcccctctgcagaaagaacaagcagcccttctgttagccttgtctgcccctcccagcagggaataacagtccccacccctgcccacaggaggcatgatcagctttgacgtcttccccgagggctgggacaagcaggtccgtagcagccaatgtggagagggactccacctaaatatccctcctctgcccatcctctgtgtgcagggtgggaacgactttgagatctttgccgacccccggactgttggccacagcg

SEQ ID NO: 127996 - DNA, 567 bp, Homo sapiens
tcagtgattccttctggcttgtatcagtttcctggctacgacataacacctcatctgatacattttggatatttgtccctgccaaatcttatgttgaaatgtaacactcagtgttggaagtggggccctggtgggaggtgtttgggtcgtgggggcagattcttcacagcttggtgtcctcacaccatgtgagacactggcttctcccttcaccttctgccatgactgagagctccctgacgtttcagcagaagccaagcagatgccagcaccatgcttcctgtaaagcctatcactctcatcagctgctgctggtacccaccgctggaagactagaggacaggtcacatcactagatcccttgcaaacattctccagcaccagcatggagtctggcagctccagtgggtaactagatccagaaaagcagcaggattcacagtagtctggccctgagggactgccattcctcacacattcagctgtctgcgataatatcacattgtcagagatatctttagtcctaaccctttctgaagtagcatctcctccttcattatcatacat

SEQ ID NO: 127997 - DNA, 576 bp, Homo sapiens
atgcctcaggactggtgtggtgaagacgctgtgcttcagccgctggacgttaggaatggcagtccctcagggccagactactgtgaatcctgctgcttttctggatctagttacccactggagctgccagactccatgctggtgctggagaatgtttgcaagggatctagtgatgtgacctgtcctctagtcttccagcggtgggtaccagcagcagctgatgagagtgataggcaccagggatacagctgtgaacaaagccagcaacgtcccttcttttggagcttaaattctagtggaaggggacagcaagccaaactcattgccttaactcgagccctcactcttgcaaaggaattgcatgtcaatatttatgctgactgtaaatatgccttccatatcctgcaccagcatgatgttatatgggctgaaagaggtttcctcactgtgcaagggtcctcctccatcattaatgcctctttaataaaaactcttctcaaggccactttacttccaaaggaagctggagtcatacactacaagggccatcaaaaggcatcagctcccatcgcttag

SEQ ID NO: 127998 - DNA, 1098 bp, Homo sapiens
gctgaggctctccctgtccagttctacttccatctttcagacattcgaggtatgctgcttcatgagccagacctccagaaaggcattaaagcagtttcccaagaggatccccaatggagctatcaggcagattccccaggtatagctaggcgagattatatggtttcccgcctagttgaagggcttaaaaaggcagcttacaaagctgttaattatgacaagcttaaaaaaactacccaagttaccattgttcctggcccggacttcaatctggcctcccacattattcctgataccacacctgacccccatgactgttatctctctgatacacctggcattcactccatttcccatatttccttctttgctattcctcaccctgatcacacctggtttattgatggcagttccaccacgcctaatcgccacacaccagcaaaggcaggctatgctatagtaccttccacatctatcattgaggctgctgctctgccgccctccgctacctctcggcaagccaaactcattgccttaactcgaaccctcactcttgcaaaggaattatgtgtcaatatttatactgactctaaatatgccttccatatcctgcaccaccatgctgttatatgggctgaaagaggtttcctcactaagcaagggtggtccaacattaatgcctctttaataaaaactcttctcaaggccactttacttccaaaggaagctggagtcatacactgcaagggccaccaaaaggcatcagatcccatcgctcagggcaacacttatgctgataagatagctaaagaagcagctagcggtccaacttctgtccctcatggccagtttttctccttctcatcggtcactcccacctactcccccactgaaacttccacctatcaatctctttccaaacaaggcaaatggttcttggaccaaggaaaatatctccttccagcctcacaggcccattctattctgtcatcatttcataacgtcttccatgtaggttacaagccactagccaacctcttagaacctctcatttcctttccattgtagaaatatatcctcaaggaagtcacttctcag

SEQ ID NO: 127999 - DNA, 537 bp, Homo sapiens
ctactccagggacccctgtttaggttcttctggattgcgggaagggaactggacttccagaagtcgcccaatgggagctaaaggaaccaccttgagcaggtgtgcaagatgtagccacaaggagacataagtgcctactgtcttcctggatttcccagtcactggagaaagtcgccagctgctgcccttgcgaacagtttgaaaactggaaaaggctagaaaacatccttctgttctcttgagtgtctgggaagatggcatcttggaaattgactccgtgagcaagaggttataattttcatccatcctcggccgagtagaagaggccccctggccggcgtggtactgccagtgcaggtggttgtagaggccgagcgcctcggggtgcagcggcagcaccctggcgtacacgatggtctcggccagctcgcgcggcagccctcgctcaggggcctccactcggagtgcagctggcaggcgcgccgggcgctggggacccgccaggcagagcgcggcgagcagcacgtggcgcagcat

SEQ ID NO: 128000 - DNA, 1318 bp, Homo sapiens
ggagcacctcactttgagttcagagacattagaaacaattactcagcaaacaagaagttagactaatagcaatggctgagagattgctcagtttctctcaaatttaggaaagcaatcctgatgaacccatggcaaggccgaatcaaagcagttgcccccctgtgttaaacgcgaacccataggtatcatccttcaactctttgtagctggtgttggaaatcaggtataatttatcttgtttaattacctgctgccctgctcctaattccctcccctgtgatgaagcttaatgaaaatcttcaacctgccctcaagctgggaaaggaaaaatgctggctggaatagggaggccctgcacgtgctgaattttcaaggcatcttggatgcaaaggccaccatccccttcccaaagatgtggccagtgaggtgccagcaggttccagcaccagcgtcagctcactcatcaggactaatggttgtcctggactggggagctgggaaccaccctgatttttttctgaaaataaaaggctaagcacgttgatgtcttttacactaagagattctaaaatgttctctccccagtcagggctctttctgggctgctctgcaggcgagcattcagcactcagggatcccactgcctctggactgccaggcactgcgtctggggtcaggccaggaaggggcagcgcgtggggtctgacattgaggccagcacccaaggggaaagcaagccttgcattttatccatttagactctaccaaatgcgtgattaaaaacaaaaactcttacaccccttgaaatagctgcatgtacgaaccctcactcattctcaattaccgccaggattggccctgcacacctggcagcccccaggcccgttacccccgcaggtagggggggcgcacgggcccccgggcgttgatgtgcggcagcgcgcccgccgccagcttctcaatgagtttctggttcgccagctccaggtggcggcccttcttacgcgcctgccgcaaggacctcttgaccttcttcactcgctcccggagcaaaacggttgcgcttctccagggtggccactttctgttgcagtttcttggcgtggtcctcctcctcgaacaaggccttctgcacctaggagcacatgagcctactgtcttcctggatttcccagtcactggagaaagtcgccagctgctgcccttgcgaacagtttgatagctggaaaaggctagaaaacatccttctgttctcgtgagtgtctgggaagatggcatcttggaaattccctccgtgaggcaagaggttataattttc

SEQ ID NO: 128001 - DNA, 480 bp, Homo sapiens
atgacctgcctgcatgagcgggcgcgcatcgagaaggcgtatgcgcagcagctcactgagtgggcccggcgctggaggcagcttgtggagaaagggccccagtacgggaccgtggagaaggcctggatggccttcatgtccgaggcagagagggtgagcgagctgcacctcagggtgaaggcctcactgatgaacgatgacttgaggaagatcaagaactggcagaaggaagcctttcacaagcagatgatgggcggcttcaaggagaccaaggaagctgaggacggctttcggaaggcacagaagccctgggccaagaagctgaaagaggtagaagcagcaaagaaagcccaccatgcagcgtgcaaagaggagaagctggctatctcacgagaagccaacagcaaggcagacccatccctcaaccctgaacagctcaagaaattgcaagacaaaatagtaaaagtgcatgaatttaaa

SEQ ID NO: 128002 - DNA, 1263 bp, Homo sapiens
acttctagtgaggatcctgaactcccagtgacatggcattcaggaactcattctccctgtaggtagaagcagcaaagaaagcccaccatgcagcgtgcaaagaggagaagctggctatctcacgagaagccaacagcaaggcagacccatccctcagacctcaagcccatacatatgccctttctccactgttcctcactgctatgccgtcggtgtagcaaggggaacacgtcatctacacgagagttcgtcactcagaccaagtgtcagaatcctctgggaaacccctctcactcccattgctggagccaggaatctgggcttttgaagcagcccaggtgcctccacggtgggatcaggtgaggagcctggaaccaactactgagtgggaggcacctgggctcaagaagcgcagggtgagccaagggctaaatggaaatgaacctctgtcttgtgcctggattttcctttagaccaaagagaagtatgagaagtccctgaaggaactcgaccagggcacaccccagtacatggagaacatggagcaggtgtttgagcagtgccagcagttcgaggagaaacgccttggctgggacaaagggtagctggcccctgccttctaaaagagccacgtttctctctgatttagctacaaagccatttaccatgacctggagcagagcatcagagcagctgatgcagtggaggcagacgtggcttccagcaagtagtgaacctttggtttctctccctcggcacctgttgcctaggagtggtccgcagacctgaatcgaaccctcagccggagagagaagaagaaggccactgactgccaggaccctcacgggcccctgcagagctgggatcccctgaaagctctctctctccatagcacccttaatgtcccgagcaaccccgcccagtctgcgcagtcacagtccagctacaacccccgggggcctcacaccctctgccgccctgtgctgagggccctgtggcctcccctttcttgcagtgtgagcagctacgagaagacccagagctatcccaccgactggtcagacgatgagtctaacaaccccttctcctccacggatgccaatggggactcgaatccattcgacgacgacgccacctcggggacggaagtgctctgtagcccaccgtcggtgtcatacctctcatggagacggctccctctttgtcttgcaggggatgagctgaccaagatggaggacgaggatgagcagggctggtgcaagg

SEQ ID NO: 128003 - DNA, 485 bp, Homo sapiens
agcggccgccttcggaaccaggctgagccgccgcggcaggggctgcggggtgacagggtcaggcggcggtcggcgccgagtcccggccccgaggaggccccggtcccccctccagccccctcaccagctcctcggaggccgtcacgtcgaacaccgggttgcggaagccgaggggcgctccagccggggccgccgcctcgtgcctcctccacctgagcctccccgcgcggcgcagcagcgggcgcgccaccagcaggaccagcagcgccagcagcacggcagccgccacgccgcccgccagcccagccgcggagctgccccagacgtgtgcgcccgactcccgcatggtcgcctccaggacgccgagggcctcgccgttctcggcgacgtcgtcgtcgtggcggcagggcacgcgctcggcgtccacgaagaagaggccaggtgcctcgtccccagagcgccacaggtgcgggtcatgccaggag

SEQ ID NO: 128004 - DNA, 207 bp, Homo sapiens
ccgcgccacagtccaggtgcgagcccacgtctgagacgccgaatccggctcctgaagccaggacgagttccccatccagcggcaggagcttgtccgccgggaactcaacggcgccgccggcgcacggggtccggttctggctccagttggctgcgacgtcgaagtccgtgttggggacccagagtttggagaccgcctgggtcagtg

SEQ ID NO: 128005 - DNA, 5754 bp, Homo sapiens
atgtcggccaaggtgcggctcaagaagctggagcagctgctcctggacgggccctggcgcaacgagagcgccctgagcgtggaaacgctgctcgacgtgctcgtctgcctgtacaccgagtgcagccactcggccctgcgccgcgacaagtacgtggccgagttcctcgagtgggctaaaccatttacacagctggtgaaagaaatgcagcttcatcgagaagactttgaaataattaaagtaattggaagaggtgcttttggtgaggttgctgttgtcaaaatgaagaatactgaacgaatttatgcaatgaaaatcctcaacaagtgggagatgctgaaaagagcagagaccgcgtgcttccgagaggagcgcgatgtgctggtgaacggcgactgccagtggatcaccgcgctgcactacgcctttcaggacgagaaccacctgtacttagtcatggattactatgtgggtggtgatttactgaccctgctcagcaaatttgaagacaagcttccggaagatatggcgaggttctacattggtgaaatggtgctggccattgactccatccatcagcttcattacgtgcacagagacattaaacctgacaatgtccttttggacgtgaatggtcatatccgcctggctgactttggatcatgtttgaagatgaatgatgatggcactgtgcagtcctccgtggccgtgggcacacctgactacatctcgccggagatcctgcaggcgatggaggacggcatgggcaaatacgggcctgagtgtgactggtggtctctgggtgtctgcatgtatgagatgctctatggagaaacgccgttttatgcggagtcactcgtggagacctatgggaagatcatgaaccatgaagagcgattccagttcccatcccatgtcacggatgtatctgaagaagcgaaggacctcatccagagactgatctgcagtagagaacgccggctggggcagaatggaatagaggatttcaaaaagcatgcgttttttgaaggtctaaattgggaaaatatacgaaacctagaagcaccttatattcctgatgtgagcagtccctctgacacatccaacttcgacgtggatgacgacgtgctgagaaacacggaaatattacctcctggttctcacacaggcttttctggattacatttgccattcattggttttacattcacaacggaaagctgtttttctgatcgaggctctctgaagagcataatgcagtccaacacattaaccaaagatgaggatgtgcagcgggacctggagcacagcctgcagatggaagcttacgagaggaggattcggaggctggaacaggagaagctggagctgagcaggaagctgcaagagtccacccagaccgtgcagtccctccacggctcatctcgggccctcagcaattcaaaccgagataaagaaatcaaaaagctaaatgaagaaatcgaacgcttgaagaataaaatagcagattcaaacaggctggagcgacagcttgaggacacagtggcgcttcgccaagagcgtgaggactccacgcagcggctgcgggggctggagaagcagcaccgcgtggtccggcaggagaaggaggagctgcacaagcaactggttgaagcctcagagcggttgaaatcccaggccaaggaactcaaagatgcccatcagcagcgaaagctggccctgcaggagttctcggagctgaacgagcgcatggcagagctccgtgcccagaagcagaaggtgtcccggcagctgcgagacaaggaggaggagatggaggtggccacgcagaaggtggacgccatgcggcaggaaatgcggagagctgagaagctcaggaaagagctggaagctcagcttgatgatgctgttgctgaggcctccaaggagcgcaagcttcgtgagcacagcgagaacttctgcaagcaaatggaaagcgagctggaggccctcaaggtgaagcaaggaggccggggagcgggtgccaccttagagcaccagcaagagatttccaaaatcaaatccgagctggagaagaaagtcttattttatgaagaggaattggtcagacgtgaggcctcccatgtgctagaagtgaaaaatgtgaagaaggaggtgcatgattcagaaagccaccagctggccctgcagaaagaaatcttgatgttaaaagataagttagaaaagtcaaagcgagaacggcataacgagatggaggaggcagtaggtacaataaaagataaatacgaacgagaaagagcgatgctgtttgatgaaaacaagaagctaactgctgaaaatgaaaagctctgttcctttgtggataaactcacagctcaaaatagacagctggaggatgagctgcaggatctggcagccaagaaggagtcagtggcccactgggaagctcagattgcggaaatcattcagtgggtcagtgacgagaaagatgcccggggttaccttcaagctcttgcttccaagatgaccgaagagctcgaggctttgaggagttctagtctggggtcaagaacactggacccgctgtggaaggtgcgccgcagccagaagctggacatgtccgcgcggctggagctgcagtcggccctggaggcggagatccgggccaagcagcttgtccaggaggagctcaggaaggtcaaggacgccaacctcaccttggaaagcaaactaaaggattccgaagccaaaaacagagaattattagaagaaatggaaattttgaagaaaaagatggaagaaaaattcagagcagatactgggctcaaacttccagattttcaggattccatttttgagtatttcaacactgctcctcttgcacatgacctgacatttagaaccagctcagctagtgagcaagaaacacaagctccgaagccagaagcgtccccgtcgatgtctgtggctgcatcagagcagcaggaggacatggctcggcccccgcagaggccatccgctgtgccgttgcccaccacgcaggccctggttctggctggaccgaagccaaaagctcaccagttcagcatcaagtccttctccagccctactcagtgcagccactgcacctccctgatggttgggctgatccggcagggctacgcctgcgaggtgtgttcctttgcttgccacgtgtcctgcaaagacggtgccccccaggtgtgcccaatacctcccgagcagtccaagaggcctctgggcgtggacgtgcagcgaggcatcggaacagcctacaaaggccatgtcaaggtcccaaagcccacgggggtgaagaagggatggcagcgcgcatatgcagtcgtctgtgagtgcaagctcttcctgtatgatctgcctgaaggaaaatccacccagcctggtgtcattgcgagccaagtcttggatctcagagatgacgagttttccgtgagctcagtcctggcctcagatgtcattcatgctacacgccgagatattccatgtatattcagggtgacggcctctctcttaggtgcaccttctaagaccagctcgctgctcattctgacagaaaatgagaatgaaaagaggaagtgggttgggattctagaaggactccagtccatccttcataaaaaccggctgaggaatcaggtcgtgcatgttcccttggaagcctacgacagctcgctgcctctcatcaaggccatcctgacagctgccatcgtggatgcagacaggattgcagtcggcctagaagaagggctctatgtcatagaggtcacccgagatgtgatcgtccgtgccgctgactgtaagaaggtacaccagatcgagcttgctcccagggagaagatcgtaatcctcctctgtggccggaaccaccatgtgcacctctatccgtggtcgtcccttgatggagcggaaggcagctttgacatcaagcttccggaaaccaaaggctgccagctcatggccacggccacactcaagaggaactctggcacctgcctgtttgtggccgtgaaacggctgatcctttgctatgagatccagagaacgaagccattccacagaaagttcaatgagattgtggctcccggcagcgtgcagtgcctggcggtgctcagggacaggctctgtgtgggctacccttctgggttctgcctgctgagcatccagggggacgggcagcctctaaacctggtaaatcccaatgacccctcgcttgcgttcctctcacaacagtcttttgatgccctttgtgctgtggagctcgaaagcgaggagtacctgctttgcttcagccacatgggactgtacgtggacccgcaaggccggagggcacgcgcgcaggagctcatgtggcctgcggctcctgtcgcctgtagttgcagccccacccacgtcacggtgtacagcgagtatggcgtggacgtctttgatgtgcgcaccatggagtgggtgcagaccatcggcctgcggaggataaggcccctgaactctgaaggcaccctcaacctcctcaactgcgagcctccacgcttgatctacttcaagagcaagttctcgggagcggttctcaacgtgccggacacctccgacaacagcaagaagcagatgctgcgcaccaggagcaaaaggcggttcgtcttcaaggtcccagaggaagagagactgcagcagaggcgagagatgcttagagacccagaattgagatccaaaatgatatccaacccaaccaacttcaaccacgtggcccacatgggcccaggcgacggcatgcaggtgctcatggacctgcctctgagtgctgtgcccccctcccaggaggaaaggccgggccccgctcccaccaacctggctcgccagcctccatccaggaacaagccctacatctcgtggccctcatcaggtggatcggagcctagcgtgcactgtgcctctgagaagtatgtctgatccagaccaggactttgacaaagagcctgattcggactccaccaaacactcaactccatcgaatagctccaaccccagcggcccaccgagccccaactccccccacaggagccagctccccctcgaaggcctggagcagccggcctgtgacacctgaagccgccagctcgccacaggggccagggagctggagatggcctccagcgttcagtgccaagactgagcgggccctccaatgttgtccaaggaaatgtagaatcactttgtagatatgggagatgaagaagacaaatctttattataatattgatcagttttatggccgcattgtttcgtgggcagtaggaccacatcttgtttcgtcttggcacagctgttgagggcgatgctgttccatcagctcctcggaggccgtcacgtcgaacaccgggttgcggaagccgaggggcgctccagccggggccgccgcctcgtgcctcctccacctgagcctccccgcgcggcgcagcagcggcggcgccaccagcaggaccagcagcgccagcagcacggcagccgccacgccgcccgccagcccagccgcggagctgccccagacgtgtgcgcccgactcccgcatggtcgcctccaggacgccgagggcctcgctgcggacacgcacggggctagcgccagggccgagccccacgcggaaggaggcactaggcggaaagaagacgtcgtcgtggcggcagggcacgcgctcggcgtccacgaagaagaggccaggtgcct

SEQ ID NO: 128006 - DNA, 1452 bp, Homo sapiens
caggagcttaacgttcatctcttaggaacccagggcaggaaaattgctttttgttacggagataaaagttccattctagaaacctttcattaaaaccatttattttctacttaaaaaacaaaaaaaaaaaagcatttggccggcttggaaacccagctgagccgccgcggcaggggcagtttcttggaggccgtcacgtcgaacaccgggttgcggaagtcgaggggcgctccagccggggccgccgcctcgtgcctcctccacctgagcctccccgcgcggcgcagcagcggcggcgccaccagcaggaccagcagcgccagcagcacggcagccgccacgccgcccgccagcccagccgcggagctgccccagacgtgtgcgcccgactcccgcatggtcgcctccaggacgccgagggccctccccgttctcggcgacgtccgccaggagggcccgggccagccgccccgctccgcctgtctcgggcccattctccaccagcaccacctggatctccgtatcggcctcacggagccgggacgagcgtggcaccttggacacggccacctgcagcccgtggtactgaggcagacccaggaaggtgtccagtatccgcgcccggtaccgctccaggtcaaatgcggggccgtgggtcagcaacacaacggctccacagaggtcacagcactgcccctggggccggagggcgctgtggcaggcggcctgggggcagcggccgcccagggggctggagtcttggccgcgcagatccatcggctgcgcctccgcgttgcccggagacgcgagcccgacgggtccgcgcagtcctcggggcccacgctcagcgcgcccggcccgtggaagcgtaggcgggcccgcgcgggacgccaggaaaacagccaggtcctcgtcgcgcgtgaacgtccggcccagagccgagatgctgcggacacgcacggggctagcgccagggccgagccccacgcggaaaggaggcactaggcggaaagaagaccgttcttcgtggcggcagggcacgcgctcggcgtccaccaaaaaagagggccaggtgcctcgtccccagagcgccacaggtgccgggtcatgccacagagaagcggtcagagtcgcggaagacgggcaggttcgcccgcgccacagtccaggtgcgaggccaacgtttgagacgccgaatccggctccctgaagccaggacgagtttccccatccagcggcaggagcatgtctgagacggcgtgaccttcttgcaccaggactgacaccatcttgtccgccgggaactcaacggcgccgccggcgccggggtcccggttctgggctccagttggctgcgacgtcgaagtccgtgttggggacccagagtttggagaccgcctgggtcagtgcgcagagctgcagccacagcaggacccggcccaggacgcccat

SEQ ID NO: 128007 - DNA, 369 bp, Homo sapiens; identical to SEQ ID NO: 122077

SEQ ID NO: 128008 - DNA, 2593 bp, Homo sapiens
ggtatcaaaggcctttattgatttaattttcctttcaacttatcaatgctatcacaaattctaaggaaacaggacttgggcaaaattttttattatgaagatacagatctaagaacagaaggataatcatgtgctagcttatatatagttccttgtaaaaataatgatacatgaaaattagtagaaaatgaaaatctgcagttatctgatatctgaaaatgttaagcaatttcccctgcatcttagttctaatcacttttgcagaataatcaagcatatttgggtgaagagagtatttaatgattccatttttattaatagtgtagtgtgcccttcagagcttggcgtagtctttaagaatcatctgaagtttctggctcagcatgatgttccctctggccttcagcctgccactaaagaatgccttctgagggtcaagcttgcccaggaccacctccatgaaatcttcatctgaaagtatgattgttgtatcagcagcaccttttgcagggccttggtacacttttccagaaccacttttcaggtcaatagtccacttagccccaatatttccgcctttggttatatgccactcaaatacagcatttactttcttcaccacctcaggcccaatatcctttaggcggcgtcctatttcctcaaatacaaaggtactctgaagcttcccgccctcagagggtgtcttagctgaagtaccagatgttggtgcaagatccacatatgcatttgaaatgacaatgtctccagtttcttggaccttggtttgaaaatgaattctgtttccttccttccacatctcagtttgtagagtttgtcctggatatactggttttgcaaaacgagccttaattgccttgaatcttgacacatcattatctgcaaactgctgtaacacacgcctggcagaaaatccaaatgtacataatccatgtaatatgggcttgtcaaaacctgctagactagcaaagttaggatcaatgtgtaagggattccagtctccactgaggcggtacaaagcagcctgattaagagaggtggtatctgtaagtacagcatcaggaggtctattaggtatggctacagctaccttgactttgtctgatgtccgttttccaccaaagcctccagagccaacaagaaagagagagaactgattgtggcatataagttccttctcagaataagaatagacatccataataatcactacaccggatcctttatctaggacatcagcaacaactgcttcacattttaattttcctgctctgggaagtggtttatataactctaagtactgctctccatgaagaacctttgcaaagttgattgaaagtccaggaatttctgctaatcctccacccatcatagatttctgacctatgataactccgaaggtgggcaaacaggagaaatcagaacttccttcataaataaatttcaaatcttttggatccttgattgacgctcccactccaagggcatacataatagcttccagttccgtataagcataagaaaatggagggagtttctggccaatagctccagcaaatcctgatgttgctgtagacgttgcacgactagtatgatttgctgaaactcctccttctgaatctattttactcagaacttcaattatactgccagttgattcttggatactctgaggcttgctggcattctcaaagtcacagatcttcttccagttagccttgactgcctcaggagtcattgggtgattcttttgtcttacaatagctccaagagtccgctcccagcgtaattttccaatccatcctgctccaacctcaaacaagccaccattctcctcacaactctcgtgacaaagccaaaggacaagaggtgccacatactctggcttcagggcttccacaagatcttcaggcataactgtctgagtcatccgtgatcccgcattaggagcaatggtgttacaatgaatgttgcttttcctgccttcaattgcaagagaatttgcaaggcccagaagacccaactttgcagcactataattggcctggccaaagttgccatatattcctgaagctgatgaagtcataataatccttccatacttctgtttcttcatgtgttcccatgctgcccgtgtcacttggaatgaaccccgcaaatgaactctgtggattatatcccagtcttcatcacttatcctagcaaaggaacgatccctcagaattccagcattgttgaccacaacatctattcttccaaaagcatccagggctgtcttcacaaccttctctccttcttccactgaatcatagttggccactgcttttccacctctccttcttatttcttcaacaaccttatcagcagctaaggagcctttaccaactcctttgaagtcccctcccaaatcattcacaacaactaacgctcctctttctgcaaaagccagggcataggctcggcccaatcctgcccccgcgccggtgaccagtaccacccgcccgtcgaacctcagcggtgagcccatgaataaggcctgcaacgacacacacacgaacaagcagacgcgctggcc

SEQ ID NO: 128009 - DNA, 3006 bp, Homo sapiens
atggcgatggatgcgctggcatacacacagatgtttttgttgttgatgaatggcggggactgggttattgcgctggcaaatctcaacacgctgattaaccactcattacagctggtaagtcaggatgcaaacagccgggagatccagttacgctttaccgccaacgacacattaccggaaattcaggccgacccggacaggctgactcagtggggagtagtggagggacagataatcaagaaatacatatgtaaaaatataataggtgtaggtgctgtggagaaaaaaatgagtgaatggaacagaaaatgctttaaggagagactgcaggaagtgaaggagtgcgccttgaggagatctgctgtcgcggcatccctggcagaagaagcagctgaagccaggttactgaggctgcagcaggcatgtacctccctgagtcaatttccaaacagcattgcaggggtacgctgggagcggactcttggagctattgtaagacaaaagaatcacccaatgactcctgaggcagtcaaggctaactggaagaagatctgtgactttgagaatgccagcaagcctcagagtatccaagtctattcttattctgagaaggaacttatatgccacaatcagttctctctctttcttgttggctctggaggctttggtggaaaacggacatcagacaaagtcaaggatcacaggtcctcaccagcaatagaacaaagctggacagagaatggcttgtccagagttgacgagttgacagaagtaggcttcagaaagttggtaataacaaacatctctgagctaaaggaggatgttcaaacccattgcaaagaagctaaaaaccttgaaaaaaaggttagacaaatggatagttagaataaacagtgtagagaagaccttaaatgacctgatggagctgaaaaccatggcacgagaacttcgtgatgcatgcacaaggttcaatagctgaatcaatcaagtggaagaaagggtatcagtgactgaagatcaaatttatgaaataattgtgagaagacaagtttagagaaaaaaagagtaaaaataaatgaacaaagcctccaagaaatataggactatgtgaaaagaccaaaatctacgtctgattggtatacctgaaagtgacgaggagaatggaaccaagttggaaaacactctgcaggatattatccaggagaacttccccaacatagcaaggcaggccaaccgttcagattcaggaaatacagagaacgccacaaagatactcctcgagaagagcaactccaagacacataattagtgtgggttcaccaaagttgaatatgaaggaaaaaaatgttaagggcagccagagagaaaggtcgggttaccctcaaagggaagcccatcagactaacaagcagatctctcggcagaaactctacaagtcagaagagagggggaggccaatattcaacattcttaaagaaaagaattttcaacccagaaatttcatatccagccaaacctaagcttcataagtgaaggagaaataaaatactttacagacaagccaaatgcttgagagatttttgtcaccaccagacctgcctgccctaaaagagcaccaggcctgccctaaaagagctcctgaaggaagaagcacttaaacatggggaaagggaacaacccgggtaccagccactgcaaaaagtcatgccaaaattttaaagaccattgaggctagggaagaaactgcatcaacttaacgagcaaaataaccagctaacatcataatgacaggatccaaattcacacataacaatattaactttaaatgtaaatggggctaaatgctcccatttaaagacacagaccagcaattgcaattgcttaagagtcaagacccatctgtcgttatgtattcaggaaacccatctcacgtgcagagacacacataggctcgaaataaaaggatggaggaatatctaccaagcaaatggaaaacaaaaaaaggcaggggttgcaatcctagtctctgataaaacagattttaaaccaacaaagatcaaaagagacaaagaaggccattacataatggcaaagggatctattcaagaagaagaactaactatactaaatatatatgcacccaatacaggagcacccagattcataaaacaagtcctgagtgacctacaaagagacttagatgcccacacaataataatgggagactttaacaccccactgtcaacattagacagatcaacgagacagaaagttaacaaggatatccaggaattggactcagctctgcaccaagcagacctaatagacatctacagaactctccaccccaaatcaacagaatatacattcttttcagcaccacaccacacctattccaaaactgaccacatagttggaagtaaagctctcctcagcaaatgtaaaagaacagaaactataacaaactgtctctcagaccacagtgcaatcaaactagaactcaggattaagaaactcactcaaaaccactcagctacatggaaactgaacagcctgctcctgaatgactactgggtacataacaaaatgaaggcagaaataaagatgttctttgaaaccaatgagaacaaagacacagcataccagaatctgtgggacacatttaaagcagtgtgtagagggaaatttatagcactaaatgcccacaagagaaagcaggaaagatctaaaatcgacatcctaacatcacaattaaaagaactaaagaagcaagagcaaacaaattcaaaagctaccagaaggcaagaaataactaagatcagagcagaactgaaagagatagagacacaaaaaactcttcaaaaaaaacaaccaaacaaagacccggcaatggaaaaaaacaacaaaactgatagagtgctagcaagactaataaagaagaaaagagagaagaatgaattctcagcccacatactgtacaaattctctaaacaaaatggatcttga

SEQ ID NO: 128010 - DNA, 392 bp, Homo sapiens
ccaagcatgctgtgaagccaagatgcataggttgatgaaggcacagcccatggagatgtggaagtagaaggggaagagtttgctctgcactagtccgaaggtgaagatcccgaaagccccgaggaaaccctaaatctcatcctgaggacaccgatcccaccaaagccccgaggaaacgccaaatctcatcccgaggacaccgatcccaccgttaggaaccgggacctcaatccgcagcacccggattccgagaacagaggcgtcggggccaaatgggctgaatctggtacctcactcccacgcccccgggtggacagcgaccctcctcggccgcgtcccctcgtgggtttcccccaaccaataattcgtcccgcctcccagctgagcccgaa

SEQ ID NO: 128011 - DNA, 403 bp, Homo sapiens
cccccagcccatgaatatgtgaaagtagaaggggaagagtttgctctgcactagtccgaaggtatgtcggggaaggcttcggaaaagcaggaagcatttgcatgccccaggcacctgacaagagcagtagatggaccatcttaatcaggcctcctaggttcccgccttcctccatcttgcagtcctgggaaggaggcaccgggtggctcagaactttacctttgcctcatgcgtggccttcagaccctgtgagcccgctcggggacagggttacggccaatccagcagagattcgttaggaaccgggacctcaatccgcagcacccggattccgagaacagaggcgtcggggccaaatgggctgaatctggtacctcactcccacgcccccgggtggacagcg

SEQ ID NO: 128012 - DNA, 528 bp, Homo sapiens
ttcgtgtggcactcaaacccacgtacctggctggcctcccagaatgtgagctgagcccaagcatgctgtgaagccaagatgcagaggttgatgaaggcacagcccatggagatgtggaagtagaaggggaagagtttgctctgcactagtccgaagggatccagttctgacagccaagaccactcctctcataaaataataccggatattaggtgaagatcccgaaagccccgaggaaaccctaaatctcatcctgaggacaccgatcccaccaaagccccgaggaaacgccaaatctcatcccgaggacaccaatcccaccgttaggaaccgggacctcaatccgcagcacccggattccgagaacagaggcgtcggggccaaatgggctgaatctgaaccccttgcagaccagctcttccaaagtcaaagccaagaccattgtgatgagtcccgactcccagaagctcctgcgatgtgaacttgaggcactcaagagccagatacaggctcagacccaagctttcg

SEQ ID NO: 128013 - DNA, 916 bp, Homo sapiens
cttggtctgggcctgtaactggctcttgagtgactcaagttcacatcgcaggagcttctgggagtcgggaatcatcacaatggtcttggcagattcagcccatttggccccgacgcctctgttctcggaatccgggtgctgcggattgaggtcccggttcctaacggtgggatcggtgtcctcgggatgagatttggcgtttcctcggggctttggtgggatcggtgtcctcaggatgagatttagggtttcctcggggctttcgggatcttcacctaatatccgaatctctgctggattggccgtaaccctgtccccgagcgagctcacagggtctgaaggccacgcatgaggcaaaggtaaagttctgagccacccggtgcctccttcccaggactgcaagatggaggaaggcgggaacctaggaggcctgattaagatggtccatctactggtcttgtcaggtgcctggggcatgccaatgtgggggacccttgtcttaaggtttttgtgtttttcaagaacctttccccgacataccttcgggctagtgcagagcaaactcttccccttctacttccacatctccatgggctgtgccttcatcaacctctgcatcttggcttcacagctgcttgggctcagcttacattctgggaggccagccagtaactgtgtgtctgtccacctcacctgcctgccagagggtgaccggaaggctttttttgagagctctcagtggaacatcaagaagaaccaggagaccatcagtcagctccgcaaggagactaaggcactggaactaaagctgctggacctgctcaagggagatgagaaagtggtccaggcagtgattcgcgaatggaagtgggagaagccatacctgaagaacaggacaggacagcttcccgagtag

SEQ ID NO: 128014 - DNA, 1131 bp, Homo sapiens
  misc_feature (1)...(1131): n = a,t,c or g
cgtagaatggacctgtgctctgaactccaacaagctgtcttncagtttnaggccaatgcacttgtcggnttcaacaacggcttacattgccactnagctnggaccacagtaaactgctgcnttccaaattttnactgagccaagcatctnttaagccaaatgcagagttatgagcacagccatggaatgtgaagtagaagggaaagagtttntcttcactagtccgaagtatgtcgggaaagcttcggaaaagcaggaagcctgcagggtatggggaccacaggggtgttagggcacttcccggttcccctcttatttccatccccaccccaggtacccatgacatccaagctgagggtccctacctgagacgaaggtcacccacatttgcatgccccaggcacctgacaagaccagtagatggaccatcttaatcaggcctcctaggttcccgccttcctccatcttgcagtcctgggaaggaggcaccgggtggctcagaactttacctttgcctcatgcgtggccttcagaccctgtgagcccgctcggggacagggttacggccaatccagcagagattctggcaaagcatcccgggaatgagagtgagaaaggcccaaagcagtcaaggcccaaagacaaccctcgaccccatctctccaaatgtcagccctcaagatctcaggctctctggacctcaatctccatgccacttcagaggccccaaattttcagccacagcagctccagatcatagccctaggtcttcagagatcactccactaattcccaaatatcaaccccagggatccagttctgacagccaagaccactcctctcataaaataataccggatattaggtgaagatccccaaagccccaaggaaaccctaaatctcatcctgaggacaccgatcccaccaaagccccgaggaaaccccaaatttcatctcgaggacaccagtcccaccgttaggaaccgggacctcaacccacagcacccggattccgagaacagaggcttcggggccaaatgggctgaatccagtacctcactcccacgcccccgggtggacagcaaccctcctccaccgcgtcccctcgtgggttttaggtcctatatttga

SEQ ID NO: 128015 - DNA, 915 bp, Homo sapiens
ttttctgaagaagcatttattagcatgcagggcgccatgctagaggctccttatttccaggggcaaggccaagcgaaacaagagcccattgcgtcaggacagcacgcccaaattgcaaagaagaggacacgcccatggtacgcggaaaaaattctggcggagagcactgtacttggggtccttctctcgcagctggcgggtaagggatcggggaccctggtggcttgcctggtacctccccacccaggcctgcagctccttctccacgggtttgcagggccccacatggcaagcttgtgttgcggggtttccagcccagcgggcgttagacagtggccagcgtaaggctcaggaaaccaccaggttaaaagctggcttggcctccccaagaatgtgagctgagccccaagcatgctgtgaaacccaaagatgcagaggttgatgaaagcacagccccatggaagatgtgaagttagaaggggaagagtttgctctgcactaggtccgaaggtatgtcgggcaaggcttcggaaaagcaggaagcctgagacgaaggtcacccacatttgcatgccccaggcacctgacaagaccaagtagatggaccatcttaatcaggcctcctaggttcccgccttcctccatcttgcagtcctgggaaggaggcaccgggtggctcagaactttacctttgcctcatgcgtggccttcagaccctgtgagcccgctcggggacagggttacgggccaatccagcagagattcgttaggaaccgggacctcaatccgcagcacccggattccgagaacagaggcgtcggggccaaatgggctgaatctggtacctcactcccacgcccccgggtggacagcgaccctcctcggccgcgtcccctcgtgggtttcccctcgtgc

SEQ ID NO: 128016 - DNA, 1075 bp, Homo sapiens
tcagttgtctacttcttcctcttcgttctgttcttcttccagcctttcttcatcttcatcattgttctcatctctgctcttgtcttgctcttccgagtctgtttttttgtctttgtccttcttcttttgctctgaggcccccttcttgcctttctgctcctgccatcctggatcttctatgtcagtgatagcagcccaggcctcagagaaacagatgttgcttaagaatactagctcatcatgcgtgggtagggcattccgtggttcattcttttgttcatcaattcgttctttgccctctccagcccgcgagttggctgtttctccctccgtccgtcgggctgcaggcttccgcctcagtcctgccagcgtggggcatgtggtgtcggtaaatagaggccacaacaccacaccttttgctgtgatggccgcgtcatgatggcccggcaaaagggcattttctacctgacccttttcctcatcctggggacatgtacactcttcttcgcctttgagtgagtttcggttgagtagagttacctgattatggttactttgggtccaggggaagaacctgctttctggggagtttggggctggtccttggatgactttaacgtcctcttgagcgatgtctgtagagatgccagctgaattcattgcttcgtggtcatcacagagtatgtacttcctaaaaagaccaatacctttgataccaattttgtagtactgatttggggctgtccttgatagattgagtaccagctgtctgtgtgaaagactaaatatttttgaagatagggccattctactcatgaatctcttctgagtgttttcatgtgaattgaagtctgtgtcattatcatcatccctccagtgaactagcatgtagagacgactggctgccaatagcctcatctctggaggagaacaatacaataggcctgttgtgtacttgttgacatacagagtggattgttttagcaggtgcagaagatgctctgtgtggagattacagagacctttatccttgatggcatagcgtaattcaaatctaagttgtcctttgtctggc

SEQ ID NO: 128017 - DNA, 1300 bp, Homo sapiens
tcccccttcctggtctcccttctcccgctgggccggtttatcgggaggagattgtcttccagggctagcaattggactttttgattatgtttgacccagcggcaggaatagcagggcaacgtgatttcaaagctgggctcagcctctgtttcttctctcgtgtaatcgcaaaacccattttggaacaagaattcccattcatgtctgtgatggtggtgagaaagaaggtgacacggaaatgggagaaactcccaggcaggaacaccttttgctgtgatggccggggcatgatggcccggcaaaagggcattttctaacctgacccttttcctcatcctggggacatgtacactcttcttcgcctttgagttggccgctacctggctgttcagctgtctcctgccatccctgtatttgctgccatgctcttccttttctccatgggctacactggttgaggaccagcttcagtgaccctggagtgattcctcgggcgctaccagatgaagcagctttcatagaaatggagatagaagctaccaatggtgcggtgccccagggccagcgaccaccgcctcgtatcaagaatttccagataaacaaccagattgtgaaactgaaatactggtacacatgcaagatctttcgggcttcccgggcctcccattgcagcatctgtgacaactgtgtggagcgcttcgaccatcactgcccctgggtggggaattgtgttggaaagaggaactaccgctacttctacctcttcatcctttctctctccctcctcacaatctatgtcttcgccttcaacatcgtctatgtggccctcaaatctttgaaaattggcttcttggagacattgaaagaaactcctggaactgttctagaagtcctcatttgcttctttacactctggtccgtcgtgggactgactggatttcatactttcctcgtggctctcaaccagacaaccaatgaagacatcaaaggatcatggacagggaagaatcgcgtccagaatccctacagccatggcaatattgtgaagaactgctgtgaagtgctgtgtggccccttgccccccagtgtgctggatcgaaggggtattttgccactggaggaaagtggaagtcgacctcccagtactcaagagaccagtagcagcctcttgccacagagcccagcccccacagaacacctgaactcaaatgagatgccggaggacagcagcactcccgaagagatgccacctccagagcccccagagccaccacaggaggcagctgaagctgagaagtag

SEQ ID NO: 128018 - DNA, 670 bp, Homo sapiens
ctagtcagtttttattctgatcttttcaggcacttttgcctgagactactctgcccagcatggaaaagcttcacagaaacacgtagcacgtctcatttcaagtggtaccttccaaggtgccacagtctcccgcccttttcagttgtctacttcttcctcttcattctgttcttcttcttccagcctttcttcgtcttcatcattgtcctcatccctgctcttgtcttgctcttccgagtctgtttttttgtctttgtccttcttcttttgctctgaggcctccttcttgcctttctgctcccgcctatatgcttccagagcttctttcaatggggtaacgaaccgctggaactccatctcttccatggctgagagcacatcactggcattcagcgtcttccgctttcctttcattgcaaagttgttagcacaggatgtggcgtacagcacgaagacgctggcggcgcgggagattggcgctccgggcctccttggagatgttgacaccgtccgggagctgcgaggagaccgggggtgagcaaagctgccgttccagcacctgcttccctcctgcccgttcgtccgccccccccgagctgctcaccgcctccttgatgatcctggtgatcacggcattgggcaggtttaggtcctcgggcctctccgccat

SEQ ID NO: 128019 - DNA, 1075 bp, Homo sapiens
gccagacaaaggacaacttagatttgaattacgctatgccatcaaggataaaggtctctgtaatctccacacagagcatcttctgcacctgctaaaacaatccactctgtatgtcaacaagtacacaacaggcctattgtattgttctcctccagagatgaggctattggcagccagtcgtctctacatgctagttcactggagggatgatgataatgacacagacttcaattcacatgaaaacactcagaagagattcatgagtagaatggccctatcttcaaaaatatttagtctttcacacagacagctggtactcaatctatcaaggacagccccaaatcagtactacaaaattggtatcaaaggtattggtctttttaggaagtacatactctgtgatgaccacgaagcaatgaattcagctggcatctctacagacatcgctcaagaggacgttaaagtcatccaaggaccagccccaaactccccagaaagcaggttcttcccctggacccaaagtaaccataatcaggtaactctactcaaccgaaactcactcaaaggcgaagaagagtgtacatgtccccaggatgaggaaaagggtcaggtagaaaatgcccttttgccgggccatcatgacgcggccatcacagcaaaaggtgtggtgttgtggcctctatttaccgacaccacatgccccacgctggcaggactgaggcggaagcctgcagcccgacggacggagggagaaacagccaactcgcgggctggagagggcaaagaacgaattgatgaacaaaagaatgaaccacggaatgccctacccacgcatgatgagctagtattcttaagcaacatctgtttctctgaggcctgggctgctatcactgacatagaagatccaggatggcaggagcagaaaggcaagaagggggcctcagagcaaaagaagaaggacaaagacaaaaaaacagactcggaagagcaagacaagagcagagatgagaacaatgatgaagatgaagaaaggctggaagaagaacagaacgaagaggaagaagtagacaactga

SEQ ID NO: 128020 - DNA, 1297 bp, Homo sapiens
tcccccttcctggtctcccttctcccgctgggccggtttatcgggaggagattgtcttccagggctagcaattggactttttgattatgtttgacccagcggcaggaatagcagggcaacgtgatttcaaagctgggctcagcctctgtttcttctctcgtgtaatcgcaaaacccattttggaacaagaattcccattcatgtctgtgatggtggtgagaaagaaggtgacacggaaatgggagaaactcccaggcaggaacaccttttgctgtgatggccggggcatgatggcccggcaaaagggcattttctaacctgacccttttcctcatcctggggacatgtacactcttcttcgcctttgagttggccgctacctggctgttcagctgtctcctgccatccctgtatttgctgccatgctcttccttttctccatgggctacactggttgaggaccagcttcagtgaccctggagtgattcctcgggcgctaccagatgaagcagctttcatagaaatggagatagaagctaccaatggtgcggtgccccagggccagcgaccaccgcctcgtatcaagaatttccagataaacaaccagattgtgaaactgaaatactggtacacatgcaagatctttcgggcttcccgggcctcccattgcagcatctgtgacaactgtgtggagcgcttcgaccatcactgcccctgggtggggaattgtgttggaaagaggaactaccgctacttctacctcttcatcctttctctctccctcctcacaatctatgtcttcgccttcaacatcgtctatgtggccctcaaatctttgaaaattggcttcttggagacattgaaagaaactcctggaactgttctagaagtcctcatttgcttctttacactctggtccgtcgtgggactgactggatttcatactttcctcgtggctctcaaccagacaaccaatgaagacatcaaaggatcatggacagggaagaatcgcgtccagaatccctacagccatggcaatattgtgaagaactgctgtgaagtgctgtgtggccccttgccccccagtgtgctggatcgaaggggtattttgccactggaggaaagtggaagtcgacctcccagtactcaagagaccagtagcagcctcttgccacagagcccagcccccacagaacacctgaactcaaatgagatgccggaggacagcagcactcccgaagagatgccacctccagagcccccagagccaccacaggaggcagctgaagctgagaag

SEQ ID NO: 128021 - DNA, 871 bp, Homo sapiens
aatacaattgggggactagggaagactgcagatcaaaaaccatctaaccatacatttaagtaaacaaaagcgagcatactgactaatttagtcgttcagaatccctcttgtcaaaaggccataaccttcagattgatgaagcaaaacaggattctgctactcagatgctctgagtttggtaagtgctggttttgacggtatttctagtcagtttttattctgatcttttcaggcacttttgcctgagactactctgcccagcatggaaaagcttcacagaaacacgtagcacgtctcatttcaagtggtaccttccaaggtgccacagtctcccgcccttttcagttgtctacttcttcctcttcattctgttcttcttcttccagcctttcttcgtcttcatcattgtcctcatccctgctcttgtcttgctcttccgagtctgtttttttgtctttgtccttcttcttttgctctgaggcctccttcttgcctttctgctcccgcctatatgcttccagagcttctttcaatggggtaacgaaccgctggaactccatctcttccatggctgagagcacatcactggcattcagcgtcttccgctttcctttcattgcaaagttgttagcacaggatgtggcgtacagcacgaagacgctggcggcgcgggagattggcgctccgggcctccttggagatgttgacaccgtccgggagctgcgaggagaccgggggtgagcaaagctgccgttccagcacctgcttccctcctgcccgttcgtccgccccccccgagctgctcaccgcctccttgatgatcctggtgatcacggcattgggcaggtttaggtcctcgggcctctccgcc

SEQ ID NO: 128022 - DNA, 399 bp, Homo sapiens; identical to SEQ ID NO: 114110

SEQ ID NO: 128023 - DNA, 252 bp, Homo sapiens
ctaggttttgcttttcagttttaactcttcctcctcctgagaggtgacagcgtgctggcagtcctcacagccctcgctcgctctcggcgcctcctctgcctgagctcccactttggcggcacttgaggagcccttcagcccaccgctgcactgtgggagcccctttctgggatggccaaggccagagccggctccctcagcggccttagctgccttcccacggagcagggctcgggacctgcagctcgccat

SEQ ID NO: 128024 - DNA, 447 bp, Homo sapiens; identical to SEQ ID NO: 114113

SEQ ID NO: 128025 - DNA, 816 bp, Homo sapiens; identical to SEQ ID NO: 114116

SEQ ID NO: 128026 - DNA, 648 bp, Homo sapiens; identical to SEQ ID NO: 114120

SEQ ID NO: 128027 - DNA, 511 bp, Homo sapiens
cgcgggaaggcagctaaggctcggtgagaaatcgagcgcagcgctggtgggctggcactgctgggggacccagtacaccctccgcagctgctggcccgggtgctaagtccctcattgccaggggccagcagggctggccggctgctccgagtgcggggcccgccaagcccacgcccacccggaactccagctggccggcaagcgcggcacacagccccggttcccgctcgcgcctctccctccacacctccccgcaagctgaaggagagggctccggccttggccagcccagaaaggggctcccacagtgcagcggagggctgaagggctcctcaagtgccgccaaagtaggagcccaggcagaggaggcggggagagcaagcgagggctgtgaggactgccagcacgctgtcacctctcggttttactttattttaggataaaatatctattgtgaattttaaaaacatgtaaaataaaattttaattaaaaagcctaaaaaaaaaaaaa

SEQ ID NO: 128028 - DNA, 5403 bp, Homo sapiens
gccattctgtgacagttgcctttagtattcagtacagtaacatacagtacaggtttgtagcctaggagtcctaagccataccgtgtaccctaggtatggtggctacaccacctaggtttgtgtaagtatacgctatgatattagcacaatggtgaaataacctagtgacccatttctcaagctcctcacgtggcaagcaatgcatgactgcatatgaaagctcttaaatagggattgtttctaaattaatctcaaaacagtcattatttactatttatggaattttttttaaaaaaaggagcaaaagtatcatttcagtgggaacttaacttggggctacagtgttttatttaacttttaccccaaagttgcaaagtgttttgaaatttttccctgtaaaataattattttaattcaatttaaataaaacccaccaaggagacttcaagctttaagaagtctagcttcctgtgaaatgtgagaggaagtcagcactcatttcagaaatctgattataataatagctccatccctaaatgaggtgaatcttggaatctcttccattttattttattttatttttttgagatggagtttctctcttgttgcccaggctgaagtgcagtgttgtgatctcggctcactgcaacctctgcctcccgggttcaagcgattctcctgctttggcctcctgagtagctggggttgcaggtgtgcaccaccgcgcctggctaattttgtatttttagtagaggcggagtttcgccatgttggtcaggctggtctcgaacttctgacctcagtgatccccccgcctcggcctcccaaagttctgggattatgggtgtgagccaccacacccggccccccttcaattttaaagccatcactatgcaccctatgtctatgccaggcactaaaataagatgaagcaccttcttggagtttacatgctggtaattatgccagacagtaataaaataggtaagaacggctgtgggggaagtcagctgggttctagttacagtcgcatttcaggaaatgatttaacatgctgactttaacaacctaagcctcttctccatgtgtgcacacagggtagatctctgaacacaggtgaccctagaagtgctgtaacttctaggggaatggctgtgttgagtcaaggcaggatgacagttcagcctcctcccaggctagtgcaaagggctcttcactcggattaaaaccttctctcccagaccgaattgccaactcccaacacccctcctacagaaaatttggagtcctcgcttattccctggcagcccctacctaatagggtggtgaattaattatcaaacatgcgacagtttagcgaaaatggcaacactttggaataaatgactgtaatgtacatcctggcgcccattttgcaggtcagttgctctccctggaaggaagagtgttctcggatttcaccttaaaggaggaaggctgccagaactgaactagcacttctgaatatcctgaggcgaggtccggtgacttccttgggaagctctgccgcgcccccatcccaccctaccccaccctaccccaccacagcaggcgctggagtcctgggaccaccaggatctgaggcccaaatccttcctcactaaggggaggagaggggtgctccggcagggcaggatgggaaggcgtgcttgggcgggattgtgacatgagtgccctggtgacatggagcagttctgtggcataaataaaggtgtcataaagacagggcgggactcatgcttacaaggggcacgagcgtctcggagctgccagaatgacttccgctcagtgcccggcactagcgtgtgtcatgtccccgctgcgtttctggggcccatggcccctccttatgtggcaactattgtggctactagtcaaggaggctcagcctctggagtgggtcaaggacccgctccagctgacctctaaccccctggggccgcctgagccctggtcttcccactcctcccatttcccacgggaatctccccatgcgcctactctcccagcagacccgtgggactttgatcacctggggccctctgcttcctcagagatgccagccccaccccaggaatcgactgaaaatttggttccattcctggacacctgggattcagctggagagctgcccctggagccagagcagttcttggcttcacagcaggatttaaaggacaagctgagtccacaggaaaggctccctgtttcgcccaagaagctgaagaaagatccagctcagcgttggagccttgctgagattattggaattatacgccaattatccacacctcagagtcagaaacagactttgcagaatgaatattccagtacagatacaccgtatcccggtagcctgcctccagaactccgggtgaagtcagatgagcctccagggccctctgagcaagttggaccttctcaattccatctagagcccgaaactcaaaatccagagacccttgaagacatccagtcctcttcactccagcaagaagccccagcacagcttccacagctccttgaggaagaaccttcttcaatgcagcaggaggccccagctctgcctccagagtcctctatggagagtctaactctaccgaatcatgaggtgtcagttcaacctccaggtgaggatcaagcttattatcacttgcccaacattacagttaaacctgcagatgtggaggttaccataacttcagaggctaccaatgagacagaatcttcccaagctcagcaggagaccccaattcagtttccagaggaggtggaaccttctgcaacccaacaggaggccccaattgagcctccagttcctcctatggagcatgaactttccatcagtgagcagcagcagccagttcagccttctgagacttctagggaggtcgaatcttctccgacccagcaggagaccccaggtcagcctccagaacatcatgaagtcacagtttcacctccaggtcaccatcaaactcatcatttagattcacccagtgtctctgtgaagcctccagacgtgcagctcaccatagcagcagagcctagtgcagaggtgggaacttctctagtccagcaggaggctacaactcggctctcagggtcaggtaatgatatagaacctcccgccatccagcacgggggcccacctctgctttcagagtcatcagaagaagctggacctttagcagttcaacaggagacttcatttcaatctccggaacctattaataatgagaacccctctccaacccagcaggaggctgcagctgagcatccacagaccgctgaggagggtgagtcttccctaacccatcaggaggccccagctcagactccagagttccctaatgtagttgtagctcaacctccagagcattcacacctgactcaagccacagttcaacctttggatctggggtttaccatcactccagaatccatgacagaggttgaactttctccaaccatgaaggagaccccaactcagcctcctaagaaagttgtaccccaacttcgagtatatcaaggggtaacaaatccaacaccaggtcaggatcaagctcagcatccagtgtcacccagcgttacagttcaacttttggacctgggacttaccatcactccagaacccactacggaggttggacattctacagccccgaagaggactatagtttctccaaagcatcctgaggtgacacttccacatccagaccaggttcagactcagcattcacacctgactcgagccacagttcaacctttggacctggggtttaccatcactccaaaatccatgacagaggttgaaccttctacagccctgatgactacagctcctcctccaggacaccctgaggtgacacttccaccttcagacaagggtcaggctcagcattcacacctgactcaagccaccgttcaacctctggacctggagcttaccataactacaaaacctactacagaggttaaaccgtctccaaccacggaggagacctcaactcagcctccagacctgggacttgccatcattccagaacccactacagagactggacattctacagccctggagaagactacagctcctcgtccagaccgggttcagactctgcatcgaagcctgactgaagtcacaggtccacctactgaactagaacctgctcaggattcactggtgcagtctgaaagttacacccaaaataaggctttaactgcaccagaggaacacaaggcctccacaagcaccaacatatgtgagctctgtacctgcggagatgagatgttgtcatgtattgatctcaacccagagcagaggctccgccaagtgcctgtgccagagcccaacacccacaatggcaccttcaccatcttgtaagaatcacttttcctcaattgtcctctgtgtcctgcctgacatggcagccttttcctggaggccttcctgggccttctttatctccccaagccatatggacaactgactttctgctttcacctttgcttgtcaactctcccttctcctcattctcttttaatgttaggccccttctccagtcttttccttttactctggtcttttactcgtttttgtatccatttttatttagccccatcacatcattgcttaaccgctgctctcctcccattttcgcttcaccctctttacagcagcctgtccctctcccgatctcagtgatgatgctctaagtggttaagagttgattccggagccaggctgcctgggtttgaacccagatctatttattagcttggtgacccagagcaagttattctgcctgtgactcaatttcctcacctttaaactggggatcatgctagttagcatttcataggattgttgtgaaatttaggtgagtgaatatatgaaacacttcatcagtgcttagcatatgtaggagagttggctgttcacatgattattcagtcctttagttttgtccagaactcatttttgtccctagctttctatatgtagaactagttttatgtcaaacccagggccaagtatgctactgtctccagaacacgaaaatgataggagggaagaggctgggtgtggtggctcacgcctgtaatcccagcactttgggaggccgaggcgggcggatcatgaggtcaggagatcaagaccatcctggctaacatggtgaaaccccatctctactaaaaatacagaaaaaaattagccaggcatggtggtgggtgcctggagtcccagctactcgggaggctgaggcaggagaatggcatgaacctgggaggcagagcttgcagtgagccgagattgcaccactgcactccagcctgggcgacagagcaagactccatctc

SEQ ID NO: 128029 - DNA, 3414 bp, Homo sapiens
ttactctgcaaaccacagttctttcagcctgagcatcatggggttcaccgtgtgcagatgctcctcgttccacttcttggcgctcctgtagacactgtgccagggcacaggggcccggatcactctttgaggaaacaagcgggggatgctctcaataaagagccgttttctctccattgggtccatgaggatgtaatcaacgatgcttttcatgaggctacagtaatagtcattctccttctcctgcacgaggaccaccatcaggggctccaggaagggactcgtcagcagcgtgttagaaatcagctttgaaatccgaaccatcacttcaccctcctcaggggcaatcatgtctttgcgaattccattggtcagatagtaatagtatctctccaggtccgattcagatggcttcttttctttactttccatttccatctcctgctgtaacatgacatcgagctgctgttctggactcattggtctgcttcctgggaacgtcaaagatgtctttacctccttcttcatgggtgagaagattgacgtcttgaaggccaacttgatcctagtggaatcctctttgtttctggaggaaaacttcgtttttttcctcatgggctctgatgagcttctatttcctgatgatggcagcccctgaccggtcctgtccctagggacactgatggtggccggttggtagaccttcagcagatctttcagcttcaggtcctgggccatcaaggagtagttgttggcgatggaatcactgggtccacggtggtgatgctgttctttgaagggtgcagccaaggtccatgacgtgcgttgcatcaagggcgggtaaaagctgtgtgacatgacagtctgatagagtccagacggttcctcattagcagaagcaggcagaggaggcagctctggctgcccctgggagtggctcatgtgatgtatggagtcacttttggcgatctgtccagaacacaaacattcccgagttcctatgaaaagcattgcatagtgagaggtgacagcgtgcttgctggcagtcctcacagccctcgcttgctctcggcgcctcctctgcctgggctcccactttggcggcacttgaggagtccttcggcccaccactgcactgtaggaggcccctttctgtgctggccaaggccacagccggctccctcagcttgcagggatgtgtggagggagaggcgcgagcgggaaccggggctgtgcgcggcgcttgcgggccagctggaagttcctggtgggtgtgggcttggcgggccccgcactcggagcagccggctggccctgctggctccaggcaatgagggacttagcacccgggccagcggctgtggagggtgtactgggtcccccagcagtgccagcccaccagcgctgtgctcgatttctcgccgggccttagctgccttcctgcagggcagggctggggacctgcagcccgccatgcctgagccttcccccgcctccgtaagttcctgtgcagctggagcctccccgaggagcgccgccccctgctccacggcgcccagtcccatctaccgcccgagggctgagcaatgcgagcgcatggcgcaggactggcaggcagctccacctgcaaccccggtgcaggatccactagctcctgatgccaagaactgccgaattactactttgatttcagtagatgtcaaaaaggatcatcaggaaagtggtaaaatagctgtggagtacagacccagtgaagagattgtagatgtcagatgggaagaagaactacacggcttaattcaagtatgtggagataaaaactcaaggacccagcaggagagcccagctcagcctctagaagagatggaaccttctgcaatccaagatgaggctccaactgagcctccaggtcctcctatagagcctgaactttcccccagtgagcagaagcagccagctcagccttctgagtcttctggggaggttgaatcttctccagcccagcaggacaaccctcctattcccactgagcaggctgacttttctctagcccagcctgatctcccttccccacctctgtgttctccggaaaagactgaatctccagtccagcaagaggccacagctcagactccagatccccctagggaggcagaaccttctccagtccagcaagagttcccagctgagccaccagagccccctaaggaggctgaaccatctgcaacccagcaggaagcctcaagtcatcctctgaagtccactgaagagcaagaggttccagctcagattccagagccctctatggaggcagaaccttctccgacccagcaggaggccacagttcaggctccagagccccctaaggaggtagaatcttcaagccagcagatggtcccagctcagcttccagagccacctaaggaggttgcagctcaacctccagctcattatgaggtgacagttccaacaccaggtcaggatcaagctcagcattggacattgcccagtgtcacagttcaacctttggacctgggacttaccattactccagaacccactaaggaggttgaacattctacagccctgaagaaggctatagttcctccaaagcaccctaaggtgacacttccacatccagaccaggttcagattcagcatttacacctgactcaagccacagttcaacctgtggacctggggcttaccatcactccagaatccactacggaggttgaactttctccaaccacgcaggagaccccaactcagcctcctaagaaagttgtaccccaacttccagtatatcaagaggtaacaattccaacaccaggtcaggatcaagctcagcatcaaatatcacccagtgtcatagttcaacctgtggacctgggacttaccatcactccagaacccactatggaggttgaacattctacacccctgaagaagactatagttctgccaaagcaccctaaggtgacacttccacatccagaccaggttcaggctcagcattcacacctgactcaagccacagttcaacctttggacctgggacttaccatcactccagaatccacgacagagtttgaaccttctacagccctgactacaactcctcctccaaaacactctgaggtgacacttccaccttcagacaagggtcaggttcagcattcaaacctgactcaagtcacagtccaacctctggacctggagcttaccataactacacaacttactacaggggttaaaccatcttcaaccatggaggagacatcaactcagcctccagacctggggcttccatcactccagaacccactacagagactggacatctaccgccctggagaagactacagctcctcatccagaccaggttcagactctgcatcgaagcctgactga

SEQ ID NO: 128030 - DNA, 382 bp, Homo sapiens
aaaacaagggtgctgccaagacccggaaaaccaccacaactccaggaaggaaaccaaggggctaggctctggacacagaatgttcagcttaacaaagaaatgacacttgccagcaaccggagcctggcagaaggaaaccttttgtaccagccccagctggacacgttgaaagcacgcttgacccagaaataccaggaactccaggttctctttgaagcctatcagataaagaagaccaaattaggtaactttttaagggtgatcattcgagaataaagagttgagagaaggacacattttcaagctattgccctaccaggaaagaaatattacggaaaaatttcaggttaagatagcgactctactgcaatgaacaaatagc

SEQ ID NO: 128031 - DNA, 1150 bp, Homo sapiens
atggaagatagggaagtgagcaactcaaatgtcataaaccagagtgctgggggcggcgcagcagcctttattgacttcttcattctctgggtagtggtgaacagccggttctttcaggccttccagcgccggagcctcgggcgtgggcaaaaagcgtccatacgcagcctgagccacttgggagcccccagtttccgaggcagaagaacagtgcccaccagcgcagcggggctgcggcccggaaacctggcggggagccccgagccccggcgggcgcacgccgcgtgggcaccaggcaggcggttggagtacggggcgggggtcggccgagggcgcggggcccccggggctccggctcgcccccgccgctcggggcaggcagccgatggcgtttctgaggtgacgccgcccacaccgggcttctccgggggcggaggaaacacctatgaacctcggcagccttccttgccgggcgccaggggtgagcaggaattcaacagccctcgagatacaccaaaacagaaccctgattctgatggcatgaagaatctcaggcccgggagcagtgctcctgcctgtaatgccagcactttggaggctaagacacagaatgttcagcttaacaaagaaatgacacttgccagcacaccggagcctggcagaaggataccttttgtaccagccccagctggacacgttgaaagcacgcttgacccagaaataccaggaactccaggttctctttgaagcctatcagataaagaagaccaaattagacagacagtctagcagtgcttccttggagaccctgttagcacttcttcaggcagaaggggccaagattgaggaagacactgagaacatggcagagaagtttctggatggagaacttcctctggattccttcattgatgtctatcagagcaaacggaaactggcccacatgcgacgggtgaaaatcgagaagctccaggagatggtcctaaaggggcagagactcccaccaggccctggccccgctgccccccaggctgcccgaactggcacctaccgccccccttccctaccctgccccagagccagtgggcctcctgccgttgcacctcggcgcatcccccccccaccacccccggtgctgcgggacgcttag

SEQ ID NO: 128032 - DNA, 738 bp, Homo sapiens
gaggtgtggggacaggagctgggtgtgctggggactggccgcggacccctaacctgtgtctccggtctacctccggaagcggctaaacccagcacatcgttctggtccccttctggccctgcaggatggtggttgggacgttgaaataagcgcgcgagttgtacgtcctctctccgcgctcacgcccccctcctcaccgtgtttcccgccaggaccatcagcacgtgcccatcgacatccagaccagcaagctgctcgattggctggtggacagaaggcactgcagcctgaaatggcagagtctggtgctgacgatccgcgagaagatcaatgctgccatccaggacatgccagagagcgaagagatcgcccagctgctgtctgggtcctgtgagtgcttaggggctgtcactggagtcccctctttgctgaggtaacattcactactttcactgcctaagaatcctgggccttctcaaaggcacagaggcctccacgaagaatatttttggccgatactcttcacagcggatgaaggcaagtgtgggccaagggccggtagattggcaggagattatagctctgtatgagaaggacaacacctactgtaggtaaagtggcccggcctgggagccctggtatccatggggaagcccactctcagagttctgagataccaggcttataggaggcacagtctgtgagtgagaagagactggagtgtagatgttgcccatt

SEQ ID NO: 128033 - DNA, 639 bp, Homo sapiens
atggaggcagtcacagtggtgcctgtggggacagaggagggaatgggtgaagaggagcaagactctggcactaccacgggctgcgggctgcctagtgtagagaaaatgctggccaccaacccgggcaagaccccaatcagccttctgcagaagtatggtaccagaatagggaagaacacctgtgtactaccttctcaaagccgagggcccaccagcctaatttcaccttctgggtctgttggcaacaccagctgcactgctcagggccccaggaagaaggtagtcaagcacaaggcagctgaggtggccctcagacacctcaaagtggagagcatgttggagccggccccggaggacagcagttctttttctcccctagactcttcactgcctgaggactttccagtttttactgctgcagcagctgctaccccagtttcatctgttttcctaaccaggagcacccccatggaaaagcagcccccgctcctcccttcagcagtcggagtgcatccctgttggtgctcttcagaaactggtggtgcagaaaggctggtggttgccagagcacacagtgacctaggagtccaggccagatcaacacgaagaattgacctgacgagtggagcgtttcactga

SEQ ID NO: 128034 - DNA, 894 bp, Homo sapiens
ttattccagtttaagttcagtggccagagcctgtcccggcagctcagggctcgaggcagtaacagccctggacaggacgccatcacatcgcagagcagactcacccacaccacaatcgttcacactgggactacatagacacagcagtttgcctaacatgatatcttcgggatgtgggaggaaactgaccggggtacactggtcctctaaaccaatcctcacaacaggactgggagacaggtttacctttcccactttacagagaatgaaacagagtggcaaagcctccgaggaccctacacttcggacatcgcaaagcaggatctgagtcccggctccttgtccaaacctacttgctaggctttctttcccatgtctactgcgggagtgtgtggcaacgtggaaggggagcccgagacgccctggtctctccctctctcgcaggttcctttctccccgaacgcagcccgcaggggacgctggggaggagctgagctggagttgccggggccccgggaccgggcgttccggggcggtccccagcagccgcgcattccagagccagcagcgcgtcctggccgtcctgcgctctcccgcctcccggggctcggaggagccggggcacgttccggagctgcctagggctgaggttccaggcctgggggtcgcttccagctgcagatcccgtgcagtcctggggaccctgagaagcaccgagccatccctgaccaggaactttccgcagactcgccgccatctggggtgagtggggccaccggggattgtttgtggggctctggcagagcggagctcttcggattcgcgactacctctagtgcggcccctttccccgggctcccaacgttcttctttattccggtctctcctccccat

SEQ ID NO: 128035 - DNA, 3927 bp, Homo sapiens; identical to SEQ ID NO: 114395

SEQ ID NO: 128036 - DNA, 518 bp, Homo sapiens
cggacgcgtgggcagcagcgcgtcctggccgctcctgcgctctcccgcctcccggggctcggaggagccggggcacgttccaggagctgcctagggctgaggttccaggcctgggggtcgcttccagctgccagatcccgtgcagtcctggggaccctgagaagcaccgagccatccctgacccaggaactttccgcagactcgccgccatctgggagtgaagcaacatggatgcagtcagccaagtccccatggaagtcgtgcttcccaagcacatcctgggatatctgggttatttgtcctcatcatcctgggccaccattgttcattcatggacctcgttgttgctgtgcccaagccactgcaagtaatcatctattcgcatgcggaacttcatccgatccttagtgggggctgttttgagagcctcccaagagggcccgggtgagggaatgaggacaaggcatcctatccccaagcctcttcctgtcttcagaaaagcagcaggagggactttg

SEQ ID NO: 128037 - DNA, 297 bp, Homo sapiens
ctcagttctctgagctgcttctgcaaaggcccccatgtccctccccacaccggccctggggctgattgtgggcggtggagcgccagacagaaaaggattccaatgagaacttcaggttaaagtcagatgccacctaccagggtctacagtcaaaatgttggctttttcttattttttaatgtatgggagaaaaatgtaaaattccagttcttttctaattgtgtttctgaaattaggagtcagctgccagcgtttttgtgtggctgcagtgtgcctggggcccagctcacgggcagt

SEQ ID NO: 128038 - DNA, 3394 bp, Homo sapiens
gtcccgagcgccggcctgcggagcgtagcagcccgggccagacgccggaggagggcgcgcaggccttggccgagttcgcggcgctgcacggcccggcgctgcgcgcttcgggggtccccgaacgttactggggccgcctcctgcacaagctggagcacgaggttttcgacgctggggaagtgtttgggatcatgcaagtggaggaggtagaagaggaggaggacgaggcagcccgggaggtgcggaagcagcagcccaacccggggaacgagctgtgctacaaggtcatcgtgaccagggagagcgggctccaggcagcccaccccaacagcatcttcctcatcgaccacgcctggacgtgccgtgtggagcacgcgcgccagcagctgcagcaggtgcccgggctgctgcaccgcatggccaacctgatgggcattgagttccacggtgagctgcccagtacagaggctgtggccctggtgctggaggagatgtggaagttcaaccagacctaccagctggcccatgggacagctgaggagaagatgccggtgtggtatatcatggacgagttcggttcgcggatccagcacgcggacgtgcccagcttcgccacggcacccttcttctacatgccgcagcaggtggcctacacgctgctgtggcccctgagggacctggacactggcgaggaggtgacccgagactttgcctacggagagacggaccccctgatccggaagtgcatgctgctgccctgggcccccaccgacatgctggacctcagctcttgcacacccgagccgcccgccgagcactaccaggccattctggaggaaaacaaggagaagctgccacttgacatcaaccccgtggtgcacccccacggccacatcttcaaggtctacacggacgtgcagcaggtggccagcagcctcacccacccgcgcttcaccctcacccagagtgaggcggacgccgacatcctcttcaacttctcacacttcaaggactacaggaaactcagccaggagaggccaggcgtgctgctgaaccagttcccctgcgagaacctgctgactgtcaaggactgcctggcctccatcgcgcgccgggcaggtggccccgagggcccaccctggctgccccgaaccttcaacctgcgcactgagctgccccagtttgtcagctacttccagcagcgggaaaggtggggcgaggacaaccactggatctgcaagccctggaacctggcgcgcagcctggacacccacgtcaccaagagcctgcacagcatcatccggcaccgagagagcacccccaaggttgtgtccaagtacatcgaaagtcccgtgttgttccttcgagaagacgtgggaaaggtcaagttcgacatccgctacatcgtgctgctgcggtcagtgaggcccctacggttgttcgtgtatgatgtgttctggctgcggttctccaaccgggcctttgcactcaacgacctggatgactacgagaagcacttcacggtcatgaactatgacccggatgtggtgctgaagcaggtgcactgtgaagagttcatccccgagtttgagaagcaatacccagaatttccctggacggacgtccaggctgagatcttccgggccttcacggagctgttccaggtggcctgtgccaagccaccacccctgggcctctgcgactacccctcatcccgggccatgtatgccgtcgacctcatgctgaagtgggacaacggcccagatggaaggcgggtgatgcagccgcagatcctggaggtgaacttcaaccccgactgtgagcgagcctgcaggtaccaccccaccttcttcaacgacgtcttcagcaccttgtttctggaccagcccggtggctgccacgttacctgccttgtctaggcactcgctgtccccaaaacctgtgcttggggcaggattccaacctcagttctctgagctgcttctgcaaaggcccccatgtccctccccacaccggccctgggcatagcctcagccccaggcctctgtcctgccgagccatcctcccggcgccacactccgggagcacagcatcctcctctcacctgtgggtcagagcaggacagtgatggtgtccccagggctgagcaccaccccacgccctgccctcacccctcaccaccatctgtgcactgatgagtctccagtttagccaagggcttcgttcctggcatggagaatttgttcctggctgctgtgtttccagggggtgctgggggaagggttccgtggagcgagacaaggtgtcctcgggagcagggttccaccgggaagcgtttgggagccctgtatcacacggggcaggcgggtttctcttccggggtctctgctcttatgcatcaggacgaccccgggacggctgtggggccccacactgcacccacagggctctatgcgacaggggcccaggaacagcctgaggccaccacccagcaagcccgccttatcacccattccagctcacccagaaccttcaccagcaaacctcctgctgaggtcctggcaggaggccaccgtcttgttaccgtttccttttcgtttgctgagggtcacagaccccaacagggaaatcagtatctgtcttcccagtggttgccctgctcgccgggcactccacggggtcccgcccttgtgtgagatgggccaggatccttcggcaaggggcgcctggggctggggctgattgtgggcggtggagcgccagacagaaaaggattccaatgagccccagccccaggcgccccttgccgaaggatcctggggctggggctgattgtgggcggtggagcgccagacagaaaaggattccaatgagaacttcaggttaaagtcagatgccacctaccagggtctacagtcaaaatgttggctttttcttattttttaatgtatgggagaaaaatgtaaaattccagttcttttctaattgtgtttctgaaattaggagtcagctgccagcgtttttgtgtggctgcagtgtgcctgggcccagctcacgggcagtgggtggacctaactgcccaggcaggcgagagctacttccagagccttccagtgcatgggagggcagggctaggtgtagcggtgtctcctctttgaaattaagaactatctttcttgtagcaaagctgcacctgatgatgctgcctctcctctctgtgttgtctgggcccttgtttacaagcacgcgttacccttcctgaggggagccatgctctagcccctggagggcctgttgcaggggcagggcgggcccgtcgcctttggcagctcctggagagctgtggacatgcagtccccctcagttcgtgctgcaataaaggccatcttctctt

SEQ ID NO: 128039 - DNA, 2271 bp, Homo sapiens
gagggcagggccgacggacggcgggcggcggcggcggtggcggcgctggagtcggcgcgggtgctggcgccatggaggccgagcggggtcccgagcgccggcctgcggagcgtagcagcccgggccagacgccggaggagggcgcgcaggccttggccgagttcgcggcgctgcacgtctggagtggtgaaggcattggggtggggtctcctgcccacacccctgctgacgggaactctggcccccaggttttcgacgctggggaagtgtttgggatcatgcaagtggaggaggtagaagaggaggaggacgaggcagcccgggaggtgcggaagcagcagcccaaccctcttgctcccccgacttccctttgccccatgcccacccggcagcctcacattgtggcctgtgcccgcagcatcttcctcatcgaccacgcctggacgtgccgtgtggagcacgcgcgccagcagctgcagcaggtgcccgggctgctgcaccgcatggccaacctgatgggcattgagttccacggtgagctgcccatctgggttccggaagggagttccggtgggtggatgggtgagcgagaggtgccatatgtgctctgtctgcagacagctgaggagaagatgccggtgtggtatatcatggacgagttcggttcgcggatccagcacgcggacgtgcccagcttcgccacggcccgccctggaggaggggcctcagcccagtgtcccgtcaccccctctgatgggcactcatgtcttggcacagaggaggtgacccgagactttgcctacggagagacggaccccctgatccggaagtgcatgctgcccctgtcctcatctcaccgaggcatggaaacaccctgtgttcacacatcgcgtgcctccctccctctgcaggcctgcgagttaccatcatggtcactgttattgataaatgagccaccacggccggcctttccctcccttccttgacctcatctctacttccggtgtgtttccttttaggccattccagggctagtgctggagtcccgcttggacacttgggagccgggatcacccagctcgggctctccccacagggtctacacggacgtgcagcaggtggccagcagcctcacccacccggccctcccagtcagggcttctaggcactgccggcctccccttgagctggcgcacctgcctccgccctgcaggaaactcagccaggagaggccaggcgtgctgctgaaccagttcccctgcgagaacctgctgactgtcaaggactgcctggcctccatcgcgcgccgggcaggtggccccgagggcccaccctggtgggtcctggggtggcaccatctgggaacacaggccccaggcgccccccagacagcccttctgctccccaggggcgaggacaaccactggatctgcaagccctggaacctggggctttgtgtgctcgggagccccagggggctctgtcctggccaccagcgagcttgcacctgtgtcctccaggttgtgtccaagtacatcgaaagtcccgtgttgttccttcgagaagacgtgggaaaggtcaagttcgacatccgctacatcgtgggtggcacctccctcgcagggacaaggccgctcaagaacccatatgtgtctgcacacttgtcttccagggcctttgcacagggcaggcgggggcggggaggccccacctggtccggctggctgctggcccgtgaccctgcccgggtctaggacctcctgtcctccctggtgcacagtgttgagcggtgccccatgcagtgggcactcagtgaatggcagctgcaccatctgagcacctggagctcaggcctctgtggcctggctggttaatgagtgtttcagatgcacagaacacctaccccaccctagtagcaggctgcctgctcccggcccagcggaggcctgtacagagcgtgatgggccctgtgtctgttgccaggggcagcagaccccctcttgagaggctgttctgagcaggcctcgtaactcaggctccccggtccccaggctgagatcttccgggccttcacggagctgttccaggtggcctgtgccaagccaccacccctgggccttccccaggccactgtccctgcagagtggaggccaacgagccttcacactctgctgcgctctttgccatcaggaaggcgggtgatgcagccgcagatcctggaggtgaacttcaaccccgactgtgagcgagcctgcaggtaccaccccacct

SEQ ID NO: 128040 - DNA, 600 bp, Homo sapiens
atggaagagcagagagttcagttcactctttggctccacttttcccctcatggcatttgccaatttgaaagtggaagacaagaggctaagaagctgaagggctctggacagcctctcaagactggggaaataaaaactggaattcagaaatatcgaagagaagccctgctccagcactaccttgggccagcatctctggcgggcagaagtaaggcactgacaggcacagcagagaggtcctgtagctctggctcagacagcagcatcttcactctctgtgtcaattataatgacagcagagccatcatgaagactcttgctgccatcgggacaggatttgactgtgctagcaaggctgaaatacaattggtgcagattctggggatgcccccagagaggtttatgtatgcaaattcttgtaaacaaatgtctcaaattaagtacactgccaataatggagtccagatgatgattttcggtaatgaggtcaagttgatgtcagttgccagaacacactcaaagcagcccgtcacatcagtgttaaatctggtgccatgctcaaagccagcaggcttcttttggaatgagcaaaagaactaa

SEQ ID NO: 128041 - DNA, 2153 bp, Homo sapiens
atgagttctgaaaacggcttttcacgccgggaccactttgaggaacacacagcaaaacggggccaattacaacagccagaccgctccgtttgttttaagaacaaccactttctaaaccttcctgcgggactctcaaaggcagcccttcctttgccgccagaaccgtatcccatcgcccagcacttgccacaggccggacaagatctcccaacttccgcctctgttcccaacaccctacgtgtttctcttcctcctcatttacgtatttacaataaaacagcgaagctgcacagtctgtctctaaatcaaactcggttaccatcaaagcctcagactctatgtctcaaccgcaaaatgtctgacaggaaatcaactcgggaatttgtcaattctttagactcaaagctctcacccaccactcgaggctccggaaagaaccgcgggccagagggcaaccaggcccagcctcttgacgcactctcggcacaagcccaagtcaccccaaccctgagccaccaagagccacggagacgccatgagcctcaggatcacctcacgtctccgggacatcttgagcccctgagacgacctgaaccctgggccatctcggtccaccacgccaaatttcccaccggcgcgctgagcaatcggcggcagatggccaatacccagaggccgccccccgacacgccccggagagggcagatttccagtactttaaagagggcatatttgcagcaagttcgtgaagttgcaaggttgggtttccagcaaattccagagaacagatttacagcaaagtccaccagtgcagccattcagatcaccaggggaactgtcaagacccctgatgcccagcctgagcccacagatgcccatgtgcctggtgggggcagccaactcggggttcagaagctgcaggcgcctctcatggtggccaggccggatcacctacttgcagctccacgcactgtcagcaacaggatcaggacgttgaagcctcacaccgaccaacgaggcagttcaacagagtctgcagcctcgaatccagatcacagagggccaggctacagtgacctttctggattctgtaccttgacgttttcatgccgagaaagcaaacaggaaagacgccttttgaacgctgtagtcaaagtttccgctaagaccactgcagaaagctcagcttctcagacctcaggcaagcttgaaagtactttcctctaccattttaaagagaaagggagttgtgcttcactcgcggtcattaacccaacaacttgggctagtctcagagggacacttgctcttctgagcacagcccaggaaaaggcagaaagaaattattcgagtggaccccaaggaaaatacgctgttgggatgcacatcctaggtagtgcgcggagcagatgctcctgggatcccattcaaagccgacccaaggtccttcctgctccaggccctgctcagctgtccagaacccaagctcaaaagaatttggagaaggaatttaaagtcttccttaatagctctgaggttcttggacggaggaggggccctgaaaggagaggcaaggaaagcgccatggaggggcctccgtggacagggccaagccagcgggagccagccctgagaacaggcggcgcccatgggccctccgcaggcccccagcaggaactgtcttgggagccttgtaccggagggaataggtggctgaggtggcagccccatgagaatggaggccttctgccaaaagccacagtggagtcaagggctccagtcaacgtcttggcggaaacaatgctttctccacaagccctgtacaatcttctcagccaggtagaggctgcctggtggatctctcatggctacgccacctgccgcattttgcacactcatgagttactttcagtgcttgactggctgtatgtaaaacacagaagtgaaaccaatcagaaaataatccgaaggccaaatggcaccttatgtcagtcattcactgacacttgtggaatggctctgacagatacgctgaagaaggtagacaagtccaggtctggtcagggacatatgagccattctgaatcttcagaatggaagtggtttaatacagaatcagaagcttatatggctcctggaaggcaggggctaag

SEQ ID NO: 128042 - DNA, 438 bp, Homo sapiens
  misc_feature (1)...(438): n = a,t,c or g
cgggggnaaaagaaaggtggganaggaatcccttggacttacagaaccataaaacatttccccaaataacatttttaaaaggaatgtaataataattaacactgaagtgattgattatatattacccttctatttgggacacttgggtggttttcaatgcctagagttttaaaatgcatataaattacagcctttgagagatgattgtattttcttgaaacaggagtcttctgtgtccaggtccccgcccaacagtgttgatgtagtgttcctgggtcctgcaggcgtccactggaggaagccggatggcgcgggcttggtctttcaggaaggctggctggcaccgggcttccttctggctccagggggaaccgtacagaacggggagaaagggggaagctggtgagaggcagaaggggcgtcacaaggtggctctcc

SEQ ID NO: 128043 - DNA, 632 bp, Homo sapiens
  misc_feature (1)...(632): n = a,t,c or g
ccccaatgggaaacaaanaaaatgtgggtaaggggggaaaccaacggggggaaaanaaatggtgggaaaangaatcccctgggacctnaacangatccataaaaacattcccccaaataacattttaaaaggatggtaataaatattaacactgaagtgattgattaatatattaccccttcctatttggggaacacttgggtggtttttcaaaagccctaaaatttttaaaaatgccataataaaattacaacctttgaaaagatgattgtattttccttgaaaaacaggagtcttctgtgtcccaggtccccgcccaacagtgttgatgtagtgttcctttgttggggggaaaaaaaatcagtactgcctaactggagatgctggatgccttcaagaaaaacattccctgggtcctgcaggcgtccactggaggaagccggatggcgcgggcttggtctttcaggaaggctggctggcaccgggcttccttctggctccagggggaaccgtacagaacggggagaaagggggaagctggtgagaggcagaaggggcgtcacaaggtggctctcccacccccaagtgcaaaggcaggcggatgcggggacctgttcgccgtttgagcctgg

SEQ ID NO: 128044 - DNA, 1003 bp, Homo sapiens
  misc_feature (1)...(1003): n = a,t,c or g
gtactgcctaacctggaggatgctggatgccttcaagaaaaacattcctgtgattnaaatttttaaaaaatttatgttcaattctggtttatcaaacaacctgggtatcttgtctcacaacttacccgaaaatgtccgaattttaagattttagaagtttagaactaagctccttccctagtttaaagggcccacgtctgtcctaataaactttatacaatggcccacgtgcacgcagccttccctcactaacaaataacatgtgttggggaaaaaatgagaaaatagtggaaaggtgccctccttggaggtggtaacatcgggtcaattaatcagctgagtataaattgattcactttatacaagtctcccacacattatgatgcacatttagcaacgctgaaaaacaatttaaaagaataccttagggagttgttaaagagaatttatagtctggaacgaattgcaatcttcttaattgacacagaaatgtttggctaaaatattgctttattcacatttttgtccttggaggaaaatctaggcacactgcaacttggatcgtgtaaataaaggtacaaggaatgttttaagtcagaaaagggcatcacgcagtcagggggctgtgtggacgagctcaatttcgatgcatctcgggagacccgggcaaaaggccgcttggattccgggaggcaacgccccaaagtcaggatcccttgctcgccgcccccaaccggtcaggatccctggctcgcgtccccaaccggttccgtgtctcacctgggtcctgcaggcgtccactagaggaagccggatggcgcgggcttggtctttcaggaaggctggctggcaccgggcttccttctggctccagggggaaccgtacagaacggggagaaagggggaagctggtgagaggcagaaggggcgtcacaaggtggctctcccacccccaagtgcaaaggcaggcggatgcggggacctgttcgccgtttgagcctgg

SEQ ID NO: 128045 - DNA, 1503 bp, Homo sapiens
gtgagggtggcccatattcctattgctgcagcagaaattgctgccatccctgacagaggagggcacctgagtgttggaaagcggaaactcacattttggtttttctatggagtgttgccattcagggatgtggccatagaattctccccagaagagtgggagtgcctggactctgctcagcagcatttgcacagggatgcgatgttagagaactatggaaacctggtgtctctggctgcaggagatcaaagccttccaggagatgcagctgcttcagctgtctgcagacaattatcaccttcagcctgtggggcaattttgggtctgcctccagttaatggagtggctccagtaagactgagaggtgaaattgtgacatatacatggtcacagctcactggcctggcactcgccctcagcaaagatggcgcggacggtctcaggcgcctcacgcgacccacccgccgggctcctccggcgctgctcttagccccgcagacggctgccgagcggtggagaggaaagtgtgatccgaggcacggcggtggctgcgccctggcgctgcagggctggacgctgtatccccgggagagcccgtcgcgggagtccaaggagctgggcggcctctggagcttccgcgccgacttggacagtcgacgccagggcttcgaggagcagtggtacccgcggccgctgcgggagctgcggggcaggggcgggaggcgcccggaagcccggcggtgggagggggggagccctggtccctgcaggctccttcccctgagcgccccggagctggcgccctacaggaagttaaaggtcaatgggcttaggggcgcaggcttgggggacggggagaccgggggaactggggagggccgaggcgggagaagaaggaagcgctgctgccgaaccctctcacgagacgaaggcttcaacgacatctgtcaggactggtggctgcggcagtttgttggctgggtgttgtacgaacaggaggtgaccctgccggagcaatggacccagcacctgcgcacaagagtggtgctgaggattgccagtgcccactcctatgccactgtggtcagtgcagccaggagcaggcagggtagggggataggtggcctgatctacacccttgggatgccattcttcctgtctggctggcaggtccctgagccccatgctgcgggttatgtgagggagtgcctgatagcagggcccctcctcatgccccaacctgctgccccctcctcatatctcctgtgtctgcagtgggtgaatggggtcgacacgctagagcatgaggggccgacagcagcagtctggtccagaacacagactttgacttcttcaactacgcgggactgcagcggtactgtgcttctgtacacgacacttaccacatacatcgatgacatcaccatcaccaccggcgtggagcatgacagtgctgagataccaatttttcctgaatatctcagggtgaatactgggaactga

SEQ ID NO: 128046 - DNA, 307 bp, Homo sapiens
cacctccaagtatcccaagggttactttgtccagaacacatattttgactttttcaactacgctggactgcagcggtctgtacttctgtacacgacacccaccacctacatcgatgacatcaccgtcaccaccagcgtggagcaagacagtgggctggtgaattaccagatctctgtcaagggcagtaacctgttcaagttggaagtgcgtcttttggatgcagaaaacaaagtcgtggcgaatgggactgggacccagggccaacttaaggtgccaggtgtcagcctctggtggccgtacctgatg

SEQ ID NO: 128047 - DNA, 427 bp, Homo sapiens
cataataacctgggtgtttggctactgtcttctgtctccttgcattccaaggctcttttctttgctccagacaggtcatcaagtctggcttaaagatagcaagacccaaggagaccaggtttccgtagttctctaacatcacatccctatacaaacgctgctgagcagagtccaggcattcccactcttctggggagaattctacagccacatccctgaatgtcaacactcccatttcccagcctccagatgttccgccgtcctccctatggatctcccagtacctgcaggtcacaggataacagaagctatagtagagtcaccgaggaactccaggaacggaggagatggaacagtggagacgcgaactaggatcagagcccggaagctaggagacaaaggccccgccatattgaagaggccgccc

SEQ ID NO: 128048 - DNA, 2835 bp, Homo sapiens
atgggcaaatattatacgcaaggcgacaaggtgctgatgccgctggcgattcaggttcatcatgccgtttgtgatggcttccatgtcggcagaatgcttaatgaattacaacagtactgcgatgagtggcagggcggggcgtatcccaagggttactttgtccagaacacagactttgacttcttcaactatgcgggactgcagcggtctgtgcttctgtacacgacacctaccacctacatcgatgacatcaccatcaccaccggcgtggagcatgacagtgctgctgccccgatggtggattcgttaattgcgcgcgtaggagtaatggctcgcggtaatgccattactttgcctgtatgtggtcgggatgtgaagtttactcttgaagtgctccggggtgatagtgttgagaagacctctcgggtatggtcaggtaatgaacgtgaccaggagctgcttactgaggacgcactggatgatctcatcccttcttttctactgactggtcaacagacaccggcgttcggtcgaagagtatctggtgtcatagaaattgccgatgggagtcgccgtcgtaaagctgctgcacttaccgaaagtgattatcgtgttctggttggcgagctggatgatgagcagatggctgcattatccagattgggtaacgattatcgcccaacaagtgcttatgaacgtggtcagcgttatgcaagccgattgcagaatgaatttgctggaaatatttctgcgctggctgatgcggaaaatatttcacgtaagattattacccgctgtatcaacaccgccaaattgcctaaatcagttgttgctcttttttctcaccccggtgaactatctgcccgggattttgccgatttcggaaccaccatcaaacaggattttcgcctgctggggcaaaccagcgtggaccgcttgctgcaactctctcagggccaggcggtgaagggcaatcagctgttgcccgtctcactggtgaaaagaaaaaccaccctggcgcccaatacgcaaaccgcctctccccgcgcgttggccgattcattaatgcagctggcacgacaggtttcccgactggaaagcgggcaggattttgccgatttcggaaccaccatcaaacaggattttcgcctgctggggcaaaccagcgtggaccgcttgctgcaactctctcagggccaggcggtgaagggcaatcagctgttgcccgtctcactggtgaaaagaaaaaccaccctggcgcccaatacgcaaaccgcctctccccgcgcgttggccgattcattaatgcagctggcacgacaggtttcccgactggaaagcgggcagtatcccaagggttactttgtccagaacacagactttgacttcttcaactatgcgggactgcagcggtctgtgcttctgtacacgacacctaccacctacatcgatgacatcaccatcaccaccggcgtggagcatgacagtgctgaatctctttgccttgaataccagggtccacctctgatgttcactgaagagtaccagaagagtctgccagagcagtaccatctgggtctggatcaaaaacgcagaaaatacgtggttggagagcttatcgggaattctgccgatttcacgactatgcagtacgctgatgacacatcaatctacatgttttatcaaaaggtcggcgacaactcaatcgacagctggaaaaacgcgggccgtgtctttaaagacagcgataagttcgacgccaacgatccgatcctgaaagatcagacgcaagaatggtccggttctgcaacctttacatctgacggaaaaatccgtttattctacactgactattccggtaaacattacggcaaacaaagcctgacaacagcgcaggtaaatgtgtcaaaatctgatgacacactcaaaatcaacggagtggaagatcacaaaacgatttttgacggagacggaaaaacatatcagaacgttcagcagtttatcgatgaaggcaattatacatccggcgacaaccatacgctgagagaccctcactacgttgaagacaaaggccataaataccttgtattcgaagccaacacgggaacagaaaacggataccaaggcgaagaatctttatttaacaaagcgtactacggcggcggcacgaacttcttccgtaaagaaagccagaagcttcagcagagcgctaaaaaacgcgatgctgagttagcgaacggcgccctcggtatcatagagttaaataatgattacacattgaaaaaagtaatgaagccgctgatcacttcaaacacggtaactgatgaaatcgagcgcgcgaatgttttcaaaatgaacggcaaatggtacttgttcactgattcacgcgccccgcagacggctgccgagcggtggagaggaaagtgtgatccgaggcacggcggtggctgcgccctggcgctgcagggctggacgctgtatccccgggagagcccgtcgcgggagtccaaggagctgggcggcctctggagcttccgcgccgacttggacagtcgacgccagggcttcgaggagcagtggtacccgcggccgctgcgggagctgcggggcaggggcgggaggcgcccggaagcccggcggtgggagggggggagccctggtccctgcaggctccttcccctgagcgccccggagctggcgccctacaggaagttaaaggtcaatgggcttaggggcgcaggcttgggggacggggagaccgggggaactggggagggccgaggcgggagaagaaggaagcgctgctgccgaaccctctcacgagacgaagggtga

SEQ ID NO: 128049 - DNA, 2937 bp, Homo sapiens
atgatcacctttgacttcatgtctcacatccaggtcacactgatgcaagaagtgagcttccatggccttgggcagctccgcccctgtggctttgcagggtatagcccccctcctggctgctttcataggctggcatccagtgtctgcagcttttccaggtgcacggtgcaagctgcagtggatttgccattctggggtctggagggcactagccctcttcttgcagcttcactaggcagtgccccagtagggactttgtgtgggggctctgaccccacatttccctcctggactgctctagcagatgttctccatgaggagggccacacccctgcatcaaacttctgcctgcgcaatctggctggggaggcctcacaatcatggagaaaggagggactggggaccccaaggcccactgcttcttccacggaggaactccagaccctgaatgaggattctcgtcttatgacgtccccgcacaatctggaggagactcgggattgcgacacagagctgcccaaaaagtctctgggctggaaagaaattcgcgtttatggacaaaacaagacgctcgggttttggctgcaggctcagctcctaatctgcgacggagggaacctccggatgttccgccttcttccctatggatctcccagtacctgcaggtcacaggataacaggggctatggtggagtcaccgaggagctaatggagcggaagagatggaatagtacagacgggttccacatacagggagtgttggagcagggagtcaatctagaatcagaacttactggagatgacaggagcattggaccagcttactcacaccagttatccaggataccaggcctggcactcgccctcagcaaagatggcgcggacggtctcaggcgcctcacgcgacccacccgccgggctcctccggcgctgctcttagccccgcagacggctgccgagcggtggagaggaaagtgtgatccgaggcacggcggtggctgcgccctggcgctgcagggctggacgctgtatccccgggagagcccgtcgcgggagtccaaggagctgggcggcctctggagcttccgcgccgacttggacagtcgacgccagggcttcgaggagcagtggtacccgcggccgctgcgggagctgcggggcaggggcgggaggcgcccggaagcccggcggtgggagggggggagccctggtccctgcaggctccttcccctgagcgccccggagctggcgccctacaggaagttaaaggtcaatgggcttaggggcgcaggcttgggggacggggagaccgggggaactggggagggccgaggcgggagaagaaggaagcgctgctgccgaaccctctcacgagacgaaggcttcaacgacatctgtcaggactggtggctgcggcagtttgttggctgggtgttgtacgaacaggaggtgaccctgccggagcaatggacccagcacctgcgcacaagagtggtgctgaggattgccagtgcccactcctatgccactgtggtcagtgcagccaggagcaggcagggtagggggataggtggcctgatctacacccttgggatgccattcttcctgtctggctggcaggtccctgagccccatgctgcgggttatgtgagggagtgcctgatagcagggcccctcctcatgccccaacctgctgccccctcctcatatctcctgtgtctgcagtgggtgaatggggtcgacacgctagagcatgaggggccgacagcagcagtctggtccagggaccatctgctacatgatcaacacctccaagtggataccatcttgtctccaccgcatgcacctaccttcccatcccaccctgtggtcttcctgctagggacagggtggccttggcagagtggaggacctggatctgaggagacctgtgagctgaggtcaagggactcagggcaagggcccagcgaaccactgtcctccgaccctaggtatcccaagggttactttgtccagaacacagactttgacttcttcaactacgcgggactgcagcggtctgtgcttctgtacacgacacctaccacctacatcgatgacatcaccatcaccaccggcgtggagcatgacagtgctggcatattagggatgctatcaggtgggatcgataggttaatatccccagaagtgatatgggctggtgaattaccagatctcctcaagtgcagcaaccagatccagttggaagtgcatcttttggaggcagaaaacaaagccatggccactggggcctttactcagggccagctgaaggtgcggctgactgcacagacgtcactggggcctttgtctgacttctacacactccctgtggggatccgcactgtggctgtcactgagagccagttcttcatcaacgggaaacctttttatttccacagcatcaacaagcacgaggatgcggacctgcgtttgtgctcctgggtcctcgttggggctgcttctggtcaccttccacttttgccttccatcctagggaagggcttcaactggctgctgctggtgaaggacttcaacctgcttcactggcttggtgccaacgccttctgcaccagccactacccctacgcgggggaagtgctgcagatgtgtgaccgctatgggattgtggtcattgatgagtgtcccgctgtgggcctggtgctggtgcagcttttcaacaatgtgtctgtgcatcaacacatgtgggtgatggaggaactggtgtgcagggacaagaaccaccccgccgtggtgatgtggtctgtggccaacaagcctgcatcctacctggaacctgccggctactacttcaggctggagatcagtgacatgatcttggctctctacaacctccgcttcccgggtttaagtgattattttgcctcaggctcctga

SEQ ID NO: 128050 - DNA, 472 bp, Homo sapiens
aggagccaaagcactgtccagaaaggctggaacttggcctcccagtgagccggcttctgcctcttgaagtcatattcttcccggagctcctggagcacccgcttggtggacccggtggccatccacacttcctgagccatttcctcgtggaagaggatctcccgctggaacttctccaatttctagaccaggtcttgtgcaatcttcttgagccagtcgcgggtctgactcacggcttccagttgtcctgcatcttgccaagcctccggtccaggtccagacagtaggcgtcctcctccatgcactcctgctgaggccccatcacggctctctgcccagtgcaggaagagtgggggcctcagctgcagctgcaggacctccgtctccagccgtgcccttgccccctgcagagaggcctgctccctgagcacagattggatttgggctctcactttttaaccggacgcgtggg

SEQ ID NO: 128051 - DNA, 952 bp, Homo sapiens
atggggcctcagcaggagtgcatggaggaggacgcctactgtctggacctggaccggaggcttggcaagatgcaggacaactggaagccaaaatggccttctttcattgaaaaggttttaggcttacagctctgtgaattggaatttgaaagttgtcaatgctgtgttgatttactcgagttactgatgataggagccttttggtgtattggagctcttttggatgtacgtgcagaaacccaactgaaactgacctccactgaaatggcccttgaccagaccaccagtgaacaccacgttgccaaatgtaatggcaattctaaactgccttctcactcaacttccagggaggtgtggagggagaggtgtgggcaggaaccagagctgcgcgtggcgcttgtgctggtgagcgtgggctcggcgggtcccgcactcggagtggctggctggcactgccggccccgggcaggcagggcacgggacctgcagcctgccatgcccgagcctccccccggccatgggctcctgcgtgtccgagcctccccgacaagcgccgccccctgctccatggcgcctggtcccatcgaccgcccaagggctgaggagtgtgggcacacagtgcgggactggtggcagctccgcctgcggcccttgtgtgggatccaggattctaaacgcaccaatcagcaccctgtcaaaatggaccaatcagctctctataagacagaccaatcagctctctgtaaaatggaccaatcagcaggatatcatcagcaactcatgaaagtcagcaagtatacaggatcactgaaaagtttatcactggagcagagctttactcagtatttgaatgacgagagtagtgtttggtcctctcccattttcagaactaagaaagcaggcaaataccaaatttacgtatacctgcatgtcaactgggttgcaaaaggaa

SEQ ID NO: 128052 - DNA, 536 bp, Homo sapiens
acgaggagcccgagcgccccacaggggcccaggtgaagcgtcacgcctcctcctgcagtgagaagtcccatcgtgtggacccgcaggtcaaagtcaaacgccacgcctccagtgccaatcaatacaagtatggcaagaaccgagccgaggaggatgcccggaggtacttggtagaaaaagagaagctggagaaagagaaagagacgattcggacagagctgatagcactgagacaggagaagagggaactgaaggaagccattcggagcagcccaggagcaaaattaaaggctctggaagaagccgtggccaccctggaagctcagtgtcgggcaaaggaggagcgccggattgacctggagctgaagctggtggctgtgaaggagcgcttgcagcagtccctggcaggagggccagccctggggctctccgtgagcagcaagcccaagagtggggaaactgcaaataaaccccagaacagcgttccagagcaacctctccctgtcaactgtgtctctgagctgaggaagaggagc

SEQ ID NO: 128053 - DNA, 690 bp, Homo sapiens
atgaagagcacccacactgagcaggccccagaccagatgataatgctggagcagctgctcccagagctcaccgggctgctcagcctcctggaccacgagtacctcagcgataccaccctggaaaagaagatggccgtggcctccatcctgcagagcctgcagccccttccagcaaaggaggtctcctacctgtatgtgaacacagcagacctccactcggggcccagcttcgtggaatccctctttgaagaatttgactgtgacctgagtgaccttcgggacatgccagaggatgatggggagcccagcaaaggagccagccctgagctagccaagagcccacgcctgagaaacgtcaggttcagctttttcttatcaatgtctcttgattcaggagcaaaattaaaggctctggaagaagccgtggccaccctggaagctcagtgtcgggcaaaggaggagcgccggattgacctggagctgaagctggtggctgtgaaggagcgcttgcagcagtccctggcaggagggccagccctggggctctccgtgagcagcaagcccaagagtgggcaactctctgaggaagatacgctcacctccaatggtgctctctcagagagaacttctctgacctcatctacaccagggcttctcaaccccaacactactgacattttggaccagtaa

SEQ ID NO: 128054 - DNA, 492 bp, Homo sapiens
  misc_feature (1)...(492): n = a,t,c or g
nagcgcggntnnnnnnnaatacgganaattttgctnactgtgcgtggaattccgcgattcgtgccggccggtcctggttctccggtcccgccgctcccgcagcagccatgtcgttcttcccggagctttactttaacgtggacaatggctacttggagggactggtgcgcggcctgaaggccggggtgctcagccaggccgactacctcaacctggtgcagtgcgagacgctagaggcggcttttttccaggactgcatttcagagcaggaccttgacgagatgaacatcgagatcatccgcaacaccctctacaaggtaatgccccacacaagccatgggggattggcctgtcggtgggtggggctgtgggaagtggtanggtggtgatttatgtgaggtgctgggacaggatgcagctatgtcaggctcctatcccagggacttactgcttattctctggctcccatgctgggcacaaggctgtgtggaa

SEQ ID NO: 128055 - DNA, 1446 bp, Homo sapiens
atgctgacttcagcggtgctgagctgagccttgatgttggcactgcttgccacgagaggagcccacatgggctttgcccccatggagggcatcagaaggcctgaccaggccctgctcccagagctcccaggcctgggccttcgggccccattgaagaagacagttgcataacaggcataagaggatctgttgcaggaggctcaggccttggcagaggtaactgctcagggaaaagggttgggacaggtaagatccctggatctgtctttagaggcctgtgctggttccccacccctgcaggtactagacctgcaggaccgcgagccccgctccctcacgtcgctgccgtcaagtgcagcaaaccggggaaagctagagaaggcccagtcaaatccctgcggccacaggcgccaccaagcggccggcctcaaacttcctctttttagcgcgcaggcgccgcagggccagcccacgcctgcaccgcgcttccgcgcagccacccggaagccgggcaccgctcagagccacgcccccttatggtcaccagccatgtcgttcttcccggagctttactttaacgtggacaatggctacttggagggactggtgcgcggcctgaagggctgggcgagctcagccaggccgactacctcaacctggtgcagtgcgagacgctagaagacttgaaactgcatctgcagagcactgattatggtaacttcctggccaacgaggcatcacctctgacggtgtcagttcatcgatgaccggctcaaggagtaagatggttggtggagttccgcccacatgagggaaccatgccttatgagcccacttcgcctagcttcccttagacttccattaccttacagtttacatgattcgacaacgtgattcctggctcattcacagggcacgcttgcaccagcgctccatcgctgagctcgtgccccaagttgcccacccactagggcagcttcgagcagatggaggccgtgaacattgctcagacacctgctgagctctacaatgccattctggtggacacgcctcttgcggcttttttccaggactgcatttcagagcaggaccttgacgagatgaacatcgagatcatccgcaacaccctctacaaggcctacctggagtccttctacaagttctgcaccctactgggcgggactacggctgatgccatgtgccccatccctggagtttgaagcaaaaccgccgggcctttattaataccactaaatttttttgggcaccaagactgtcccaaagaaggaccggtgcccagccttttttccacattgggggcggggtttttccctgagggcccggcggcaatggggtttgggctgaacaaccttttaacaggggccaaaaaacggggcccatataatttcccggaagtccagctggcttttttaaggggcgacggcc

SEQ ID NO: 128056 - DNA, 1185 bp, Homo sapiens; identical to SEQ ID NO: 127225

SEQ ID NO: 128057 - DNA, 517 bp, Homo sapiens
ctcgaatcctgggtcccggcgctgagctcgatttctcgccgggccttagctgccttcccgcaggacagggctccgggacctgcagcccgccatgcctgagcctcccacccactccatgggcacctgtgcggcccgagcctccccgacgagcaccaccccctgctccacggcgcccagtcccatcgaccgggaaggaacaaacaacccaagggctgaggagtgcaggcgcagggcaccgggactggcaggcagctccacctgcagccccggtgcgggatccactaggtgaagccagctgggctcctgagtctggtggggacgtggagagtctttatgtctagctcagggattgtaaatataccaatcagcaccctgtgtttagctcaaggtttctcaaggtttgtgaatgcaccaatcgacactctgtatctagctgctctggtggggccttggagaacctttatgtctagctcagggattgtaaatacaccaatcggcactctgtatctagctcaag

SEQ ID NO: 128058 - DNA, 464 bp, Homo sapiens
gctatattctaatggggatggcagtggaagtagataataaacaaaatatatagtgtgtcagataagtgctgtggagaaaatgcaagaagggaaggagagtgagtgctaggatggctgttgcacttttaagaaaggtgaatacggtaagcatcattgataaagtaacaattgagcaaaaacctgaagaaggtgatataggacactggttggacatgggtgccaagtactttgtaggtgctcaagaaatatttgtggcaatttattgtcctgaaaacatggtttcctgggcctcgactctgagcagggcagcagatgtggcaagtgctgcttttgacacaaaaacggggttacgtgtggcagtgaagaagctctccagaccatttcagtccatcattcatgcgaaaagaacctacagagaactgcggttacttaaacatatgaaacatgaaaatgtaatgagctaa

SEQ ID NO: 128059 - DNA, 3757 bp, Homo sapiens
ggaaccgcgaccactggagccttagcgggcgcagcagctggaacgggagtactgcgacgcagcccggagtcggccttgtaggggcgaaggtgcagggagatcgcggcgggcgcagtcttgagcgccggagcgcgtccctgcccttagcggggcttgccccagtcgcaggggcacatccagccgctgcggctgacagcagccgcgcgcgcgggagtctgcggggtcgcggcagccgcacctgcgcgggcgaccagcgcaaggtccccgcccggctgggcgggcagcaagggccggggagagggtgcgggtgcaggcgggggccccacagggccaccttcttgcccggcggctgccgctggaaaatgtctcaggagaggcccacgttctaccggcaggagctgaacaagacaatctgggaggtgcccgagcgttaccagaacctgtctccagtgggctctggcgcctatggctctgtgtgtgctgcttttgacacaaaaacggggttacgtgtggcagtgaagaagctctccagaccatttcagtccatcattcatgcgaaaagaacctacagagaactgcggttacttaaacatatgaaacatgaaaatgtgattggtctgttggacgtttttacacctgcaaggtctctggaggaattcaatgatgtgtatctggtgacccatctcatgggggcagatctgaacaacattgtgaaatgtcagaagcttacagatgaccatgttcagttccttatctaccaaattctccgaggtctaaagtatatacattcagctgacataattcacagggacctaaaacctagtaatctagctgtgaatgaagactgtgagctgaagattctggattttggactggctcggcacacagatgatgaaatgacaggctacgtggccactaggtggtacagggctcctgagatcatgctgaactggatgcattacaaccagacagttgatatttggtcagtgggatgcataatggccgagctgttgactggaagaacattgtttcctggtacagaccatattaaccagcttcagcagattatgcgtctgacaggaacaccccccgcttatctcattaacaggatgccaagccatgaggcaagaaactatattcagtctttgactcagatgccgaagatgaactttgcgaatgtatttattggtgccaatcccctggctgtcgacttgctggagaagatgcttgtattggactcagataagagaattacagcggcccaagcccttgcacatgcctactttgctcagtaccacgatcctgatgatgaaccagtggccgatccttatgatcagtcctttgaaagcagggacctccttatagatgagtggaaaagcctgacctatgatgaagtcatcagctttgtgccaccaccccttgaccaagaagagatggagtcctgagcacctggtttctgttctgttgatcccacttcactgtgaggggaaggccttttcacgggaactctccaaatattattcaagtgcctcttgttgcagagatttcctccatggtggaagggggtgtgcgtgcgtgtgcgtgcgtgttagtgtgtgtgcatgtgtgtgtctgtctttgtgggagggtaagacaatatgaacaaactatgatcacagtgactttacaggaggttgtggatgctccagggcagcctccaccttgctcttctttctgagagttggctcaggcagacaagagctgctgtccttttaggaatatgttcaatgcaaagtaaaaaaatatgaattgtccccaatcccggtcatgcttttgccactttggcttctcctgtgaccccaccttgacggtggggcgtagacttgacaacatcccacagtggcacggagagaaggcccataccttctggttgcttcagacctgacaccgtccctcagtgatacgtacagccaaaaaggaccaactggcttctgtgcactagcctgtgattaacttgcttagtatggttctcagatcttgacagtatatttgaaactgtaaatatgtttgtgccttaaaaggagagaagaaagtgtagatagttaaaagactgcagctgctgaagttctgagccgggcaagtcgagagggctgttggacagctgcttgtgggcccggagtaatcaggcagccttcataggcggtcatgtgtgcatgtgagcacatgcgtatatgtgcgtctctctttctccctcacccccaggtgttgccatttctctgcttacccttcacctttggtgcagaggtttcttgaatatctgccccagtagtcagaagcaggttcttgatgtcatgtacttcctgtgtactctttatttctagcagagtgaggatgtgttttgcacgtcttgctatttgagcatgcacagctgcttgtcctgctctcttcaggaggccctggtgtcaggcaggtttgccagtgaagacttcttgggtagtttagatcccatgtcacctcagctgatattatggcaagtgatatcacctctcttcagcccctagtgctattctgtgttgaacacaattgatacttcaggtgcttttgatgtgaaaatcatgaaaagaggaacaggtggatgtatagcatttttattcatgccatctgttttcaaccaactatttttgaggaattatcatgggaaaagaccagggcttttcccaggaatatcccaaacttcggaaacaagttattctcttcactcccaataactaatgctaagaaatgctgaaaatcaaagtaaaaaattaaagcccataaggccagaaactccttttgctgtctttctctaaatatgattactttaaaataaaaaagtaacaaggtgtcttttccactcctatggaaaagggtcttcttggcagcttaacattgacttcttggtttggggagaaataaattttgtttcagaattttgtatattgtaggaatccctttgagaatgtgattccttttgatggggagaaagggcaaattattttaatattttgtattttcaactttataaagataaaatatcctcaggggtggagaagtgtcgttttcataacttgctgaatttcaggcattttgttctacatgaggactcatatatttaagccttttgtgtaataagaaagtataaagtcacttccagtgttggctgtgtgacagaatcttgtatttgggccaaggtgtttccatttctcaatcagtgcagtgatacatgtactccagagggacagggtggaccccctgagtcaactggagcaagaaggaaggaggcagactgatggcgattccctctcacccgggactctccccctttcaaggaaagtgaacctttaaagtaaaggcctcatctcctttattgcagttcaaatcctcaccatccacagcaagatgaattttatcagccatgtttggttgtaaatgctcgtgtgatttcctacagaaatactgctctgaatattttgtaataaaggtctttgcacatgtgaccacatacgtgttaggaggctgcatgctctggaagcctggactctaagctggagctcttggaagagctcttcggtttctgagcataatgctcccatctcctgatttctctgaacagaaaacaaaagagagaatgagggaaattgctattttatttgtattcatgaacttggctgtaatcagttatgccgtataggatgtcagacaataccactggttaaaataaagcctatttttcaaattt

SEQ ID NO: 128060 - DNA, 1017 bp, Homo sapiens
caaaatatatagtgtgtcagataagtgctgtggagaaaatgcaagaagggaaggagagtgagtgctaggatggctgttgcacttttaagaaaggtgaatacggtaaataaaaacccatattatttattgtcctccctgcctttacagatgtaaacccctctcctcttttcatcagagctccccctcttttactgtataaataccccaaaataatatttagaacagctttttaatggtgggttttttcccttttttctccttagtgctgcttttgacacaaaaacggggttacgtgtggcagtgaagaagctctccagaccatttttaagacctgatgggtactatactgagtttaatatttatttactttttaatttttatattcttactagtagtgctgtgtgagttgtcctgagtcattcagtggtaattgagtgcctactatctatcagacactgttctcggtactttagaaagtcttctgaagataagaactttcttaggggttctagattgttatgtaacttttcactaatttctaggtatctggtgacccatctcatgggggcagatctgaacaacattgtctaaaggtacagataatacaagtaataattttttaaaatgaattctccctttctccccttacctgtagggggagaattgatcatgcatcataaagttgatcctgtctgttttgtttttttttccctgcctgtttctaagtcttagcagtttgtctgttcctcttctgccctttagattctggattttggactggctcggcacacagatgatgaaatgacagccaaggggcagccagagtgcttcgttaggtgggcctgtgcctcttgactggatgagacccctccaacaggggtcgccagacaccttatgcaagagcattcccactggcatcaggttggtgcccctctgggacggagctcccagaggaaggaacaggcagccatctttgctgttctgcagtctccactggtgacacctccaggtacagga

SEQ ID NO: 128061 - DNA, 784 bp, Homo sapiens
cttttccgcaagagggagatcgcagctggtgtgaactcttttctcctcccctaaaggcacattcaggaccccgcgagccagcggctgacgtggaacaagtccccaaagagcgtccttgtcatcaagaagatgagagatgccagcctactgcagccgttcaaggagctctgcacgcacctcatggaggcacgcggggcaggggggggccacgatgccaggtctctgaccacagcgcccgtgagtcgggaacctccctgcaggagggtggggtctgcaggtggaatgagcaggttggcactttgcttccaggagaacatgatcgtgtatgtggaaaagaaagtgctagaagaccctgccatcgccagcgatgaaagctttggggcagtgaagaagaaattctgtacctttcgagaagattatgatgacatttccaatcagatagacttcatcatctgcctggggggagacgggacgctgctgtacgcttcctcgcttttccagggaacgcagctgttgttctccggagtcggctgaaggtcagggtggtgaaggagctccgggggaagaagacggccgtgcacaatgggctgggtgagaaaggctcgcaggctgcaggcctggacatggatgtcgggaagcaggccatgcagtaccaggtcctgaatgaggtggtgattgacagaggcccctcctcctacctgtccaatgtggatgtctacctggacggacacctcatcaccacggtgcagggcgacggagtgatcgtgtccaccccgacgggcag

SEQ ID NO: 128062 - DNA, 1592 bp, Homo sapiens
aaatcccccaagttctcatgatccttgcttccctttccagtcacccttggtgccctgtacttcactgtggtcctgaactgaagagctgtgtttttcaggaagacttggccaggccgtgttccgtgtctctggattcaagtcccaggagtcctgaccagagagcaggcatcagtgtttttctgaccgaagtgctaatttcctgacaatggagatggaacaagaaaaaatgaccatgaataaggaattgagtccagacgcggctgcttactgctgctcggcctgccacaggcgatgagacctggagttacaaccaccccatccggggccgggccaagtctcgcagcctgtctgcctcgcccgccctggggagcaccaaggagatcaggaggacacgctctcttcatgggccatgcccggtgaccacttttggaccaaaggcctgtgtgctgcagaacccccagactcattatgcacattcaggaccccgcgagccagcggctgcacgtggaacaaaggcccccaagaaccgtccttgtcatcaagaagatgagagatgccagcctactgcagccgttcaaggagctctgcacgcacctcatggaggagaacatgatcgtgtatgtggaaaagaaagtgctagaagaccctgccatcgccagcgatgaaaagctttggggcagtgaagaagaaattctgtacctttcgagaagattatgatgacatttccaatcagatagacttcatcatctgcctgggggtagacgggacgctgctgtacgcttcctcgcttttcccagggcagccgtcccctccggtcatggccttccacctgggctccctgggcttccttgacccccatcagctttgagaactttcagtcccaagttactcaggtgatagaggggaacgcaagctgttgttcttccggaagtcggctgaaaggtcaggggtggtgaaggagcctccgggggaagaagacggctcgtgcacaatgggctgggtgagaaaggcttcgcaggcttgcaggcctggaacaatggatgtcgggaaagcaaggccatgcaagtacccaggtcctgaaatgaggtgggtgattgacagaggcccctcctcctacctgtccaatgtggatgtctacctggacggacacctcatcaccacggtgcagggcgacggtaaggcccgcagcactgtcctggggccctgagcgtccctcgggcgggagtgacgcctgcgcctgtccctgtcaggagtgatcgtgtccaccccgacgggcagcacggcgtatgcggccgcggccggggcctccatgatccaccccaacgtgccggccatcatgatcacgcccatctctagaagcgtcctccccacagctgggggcccacacctctccctgcttgaccctcagatcatgctgtcacctgaagcaaggaacgccgggggtgggcctttctggaagccctggctcaggctgctgctctcccgtcccagcatcagcatcactacctcatgctacccgctcccctccatctgtgtgcgggaccccgtgagcgactggtttgagagcctcgcccagtgcctgcattggaacg

SEQ ID NO: 128063 - DNA, 473 bp, Homo sapiens
gacaaacatccatactatatcccagcacactcagcattaatcattaggtcaacttgtccctgacctgcttccttatagttgtttactgcctattttctcagaagtatgtagactctgctacaagatcatagttcacctcaactactttatagataacaacttaaatattaaggaaacattaagttttccctttgaaatattgtttcaggtcctgcatgccagtaaaactactcatgtcagctgttctgcaggatcccatgagaaggtgagtcaccagaaaatgcagtttccacatcctgatgatttcatctccctaccccaactgatcaatttctccaattttccagcctctcaccctccacaatccccttaaaaactgtagcccagaactctctggaatgatgaatttgaaggtttgctcctgtctcctcactcagaagcctgtaatcattaaactctttctctgatgcaaa

SEQ ID NO: 128064 - DNA, 462 bp, Homo sapiens
ggaattcccgggtcgaccctcggaaaagagaggttctgcgaccgagaaattcggtgcaacaagtgctgtgacagaaaaccccccgctcggcgctgctggcgaaagagccaacaaaacgctgggtgctgccaccgtgacaccgactttaggaccccggcctcggatggagaaaggagggtacggagccaccacataacttcctaatgtcttcaaatagcgaaagtgctagccggaaactgccggctgggtttacctattggtgctcgtgtgggactagcagattcgagaaaccagcgggactggaacctagtacacttcggcctctcaaagtgctgggattatagaagtgagccaccacgctcggcaaatgtttcaattttattcacaaaagtatactttacccaattgttgtaaactataaatattaatgtttaaaataaaatttttcttgactcaaaaaaa

SEQ ID NO: 128065 - DNA, 1779 bp, Homo sapiens
atgagtcacagggtcactcagcctttctgtggcgaaacatcgacttcctacgacctagaaatcgccgccagggctaggctggtgtttgtcctaaaaaatggaggcatcgagcaacgagctgtgctgagaccgagagacctcagttctgcgaaatgtcggtgcctggagcttgcgaatgactgcggccggcgggttgtcaaggacaacattccttatggcgcaaccaacagcgctgtcaccaagaaactggactctgagaaaaaagagggtttcggccaccgagaaactccgtgccacatgtgccgtgacagcaaaaccgcccgctccgcgccgctggtgaaagagctaacgaacgccagcgctgtcgcaaccggaaaactgtcaggccagtgctgctgcggatgtgagaaaccggtgatccgaaggaggagtggcgctgggcgctggactcgctggtgtgaaaatctggctgctctaggacccggcaagcgcgggcaccaggcgaacgccagcgactttgccagacaaatgcatgtcttttttggtcgccattcaaagatgcagccggcagtcagccccggctctgagaaacaagtggaggtgtcagccataaaccctccgttcagggaaaagagagtcgctgcgacggatcgattggccgttggttgtttactgcctattttctcagaagtatgtagactctgctacaagatcatagttcacctcaactactttatagataacaacttaaatattaaggaaacattaagttttccctttgaaatattgtttcaggtcctgcatgccagtaaaactactcatgtcagctgttctgcaggatcccatgagaagcagccaaaccagaaacatgcatggcgctaccaagagcgcggcaaccgagaaaacacggagtcgcccctagtggcgaaagtgcggatgcgaaaccgctggctcggcatcggctaccagagctgccgccaccgagaaaatggaggcaccgaggaacaagatgtgccgcgaccaagagaactcggcttggcgaaatgcggtgccgggaccctaagagtgacgccagccggaggagttcccaaggacaacatccattttggcggaaccaacggtgttgtcacgcagaaaatgtcgaccctcggaaaagagaggttctgcgaccgagaaattcggtgcaacaagtgctgtgacagaaaaccccccgctcggcgctgctggcgaaagagccaacaaaacgctgggtgctgccaccgtgacaccgactttaggaccccggcctcggatggagaaaggaggcacaagatgtccttcaaccctttagcccagcgtgcaagagagacagcccgagagccccagtgggaaccatccggagacccagaagatcgaattcgcgggacggcgcgttaccttccaacaccgctgggccaccactctgagaaccagaatcagcggtactggggcttccccacgggacaggagcgcgttctttggattcccctggtgcggcgtgcacaaccttcggacgaagagtccacgcctgccacccaggaggaggcccaggcgcaggcaggagtggcggccgcagcctcgtcggaggagcccggtcactgcgctccgcggccgccacacgcgccgcgatcggccctcttcgaagactggtcgcgggaaccagagaggtctgacgatggggacctctcggagtgtcgtcgccctgctactgagccttggcggccaccgggctcagcctggaggcttccttgtgcagcatag

SEQ ID NO: 128066 - DNA, 1223 bp, Homo sapiens
atttcgtggagccgagagacccgagtgcacgtgtggagtatcttttgcacaagcgcggcggcgggagacactcccgcccccatcagactcaagccctcactcgactctcgcggccttcgttgctcgcacagctccctgcccaggctaggaggccggcttgcggggttgagtggcccgagctaagggtgcggagacccaagggcggcgactacgacggcgttgatatcggtggtaacgacggcctcagcaggcggggaagatgaaagggtgaggaagggcagccgggcagggcccggccggtggggtagaagggtccgggcccatgtagagggggagagccgcaaaggcgaggagagattcagggcgaagacgggcggagggagatttctctgcttctcagttccctcggctcccggagggggcggaggcgaggctcgggctgttggcgggctgaagggccagcggaggcaagacccggggggcttcagggtttcggttcggagacgagtgtgggttgttgagtggggagaagcgaccgagtggggcaacatggaaaggctattgtgaagcgcccggggcctccttcccgggagcggaccgctgagccacgccggcccgcagctccaggtggagtggtttggttgtcttccacctccagactcaactctggaacttgtggtctgtggcacagttgccatttcccgggtaaggatgtctgcagtctgtgtactgaggacctggagccaggaatgctgggccagctgatttggtttcactgttttccaaccatgtagtaatgttcatgttttgaaggcccaaattatgtgtgtttctttggattatccttcattccaagtatagtcatcccacataactttctgaaaacaattaatgctgtatgtggacagcctggttcagttcagattcccagacactgaagaagggattagaaaagtaactgttaatgttatgtaaaagaaggagatacagtgtctcagtttgataacatcggtaaagttcaaagtgataaagcttctgttacccatcgctagtccttatgatggagtcattgaaaactctagcatagtctagatgatattgcctatgtggggaagccattagtaaacatagaaacagaagctttaaagggtactgttaatttgttttaccaaattgattattgtccaccttttgtcattgggtctcaattaaaagtgacctta

SEQ ID NO: 128067 - DNA, 930 bp, Homo sapiens
ctagttattcagcagagtgcccagtaaaggtccaccccgataccaccacacatcctctcggggatgaacaagggctgactgattgataagctcttggaaactcttaagctcactgcatcccttcaggtctccaaggaatgctaaatctcctccccactccaagggctcctgtgcggcccgagcctcctcgacgagcaccaccccctgctccacggcgcccagtcccattcgaccacccaagggcgtgcggcactggtaggcagctccacctgcagccccggtgcgggatccactaagtgaagccagctgggctcctgagttgaggctgtgaaccaggtgacttggtttctcctccacctgctcctccacgtgccctggctgcttctggctctgcaccttgccatgcagagcacctggcttctcatctgccaagctcactctgacccggctgctgggtaggatacaatatcgaaggggccagtatactgccctcagggggctctgtggcctcttgaccttgtggatgatgctgaccataatgttctgcttgtccctggctgaagacaggcccctccagggccctggccccaccacacagctgagctggcccaagccaaagagttgctggagcagcagctggagtggatcaggctctgctggagggggtggggggcccaggccctgatggtcaagatccagaaccgtggaggagacatctgtctcatcaggcagctcactaacactgacctcgaagcgatgctgcccatcacactggatccttgcatgattctcatctgacacaaacgctgatggccaagccctgtcattgataaaggcaatgctcatccacttgatgtctatgacgtggcccaataggttggtaaccatagaactggtcattgaaaatcttttggggtcattcttggacat

SEQ ID NO: 128068 - DNA, 597 bp, Homo sapiens
atgcaagctgtgttactcacggttctccagaaacacaaccaatcggttatatactggtatatgaaatacatttactatgagggattggtgattatggatgattatgattatgtgattatggattacatgactatggagactgagaaatcccatgatctgcaggctggaggcccaggaaagccagtggtacagtttcagttcaagcccaaaatcctgcaagccagtagaggcaatggcgttaagtcctggtccaagtccaaaggcttgagaaccaggtgtgctaatgtccaagggcaggaaaatagggagggcccagctaagcattcacctttcctctgcctttttgttcttttcggctcctcaacaggtcgaatgatacccaaccacactggtgacacaagtaaggtaatagctggaacagaagaaagaggggtccccaaaaaggtaaccttaaaatttgatgcttgtgctgctattgataggccgtgggcacatcaactcgattgtacctatcacttcaagggttctaatgacgagcatgattcccgtttacatactaatgctggccatcaggccaatcactttctagtggtgtga

SEQ ID NO: 128069 - DNA, 2811 bp, Homo sapiens
  misc_feature (1)...(2811): n = a,t,c or g
atttgagaaaccattggagtnccntgtcnagtgtggtggaattcgggagacagaatttatgtaaaaagagtgttatatggtaaattcttgtcctgaaataaactaactggtgtttaaagaaaaaaaatgtttgtaataagtcagaaagttgagacacattgaagaattgtcggcaaaagtcgtgaaagaaaaaatgttataaaaaaatttatgcaaaaaatgttgtataatttaaaagtaataaggcctcctgagtactattaaaaaaacagtttatgtgcaaggtgtacaagaaaagtaaaatatacctttggtaaaaaaaattataaaggggcataagaatgtggatttttacctacattaaaaggttaaaaacaattattgtttttaagagtttaagcaagttttaaaatgttaattgtaaagaaaattctgtgtgtaaacatattagctaaagttaaaaaggtatcatccagtttttctgtgaactggacattaaagtaaaaatgtgacaggtttttcttaaagcatcaacctgctctttaacaaaaattataaaaggttaaaaagagtctataaaaccttaccttatggtcaaacatgaaaaattggataaatatgtctacaaggttttattaaaattaagtttaacattaataacacactaatataaaggtaaaatttagcttatctggtataaaagtcatacaggaagcattagtaaatataaaatagcgtttagctttcttttgtctaaaaactaataaaaattggtgctaaaggaagcattcattttactagaggatcataaaagttaaagacttaaaacaaactttgggcaattaagacagcataccaaggatgcaaatgcctgggttgaaatgggatcaaatattccatctgcagggttaaacaaaaggcaattaggcatgcttgtgtgcacatgggcagggccaggaggaccctggattgtcccccttccacttaagggtgggtcctcccagtcgggccaggcatgggctgcatggtagctcttttccaggattctatagcctggagtaataagtcgatgccaagctctctctctgctatatctcaaagtccagcaccctgcgggtcagcccccgagggccatccagcttccatctcccgaacactaagttcacttcatgtctctcatggcagggaggagacttagcattccttggagacctgaagggatgcagtgagcttaagaattttcaagagcttatcagtcagtcagcccttgttcatccccgagcggatgtgtgatggtattgtcgtggacctttattgggcactctgccgaataactagagtggcacttgtgctttagcctatttggctatccctttcaccctggcatttcatcaaccagaggaaggaaaaaaaaaaataataagacatcataaagcgagagaagctccttataggtctttcaactctcacatctatttagatgcaactggagccccgcaaggaataccagatcaatttaaagcttgaaatcaaatagttacaggatttaagtcaatattttgatagatgacagtcaataaaaatgtagattagataaactgcatctattacacccaacagcaatgagcttttcatgagttgaaaaaaagaaaaaacccatgtcggccccagccctgaggctacctgacctgacaaaactctttacgctctatgtgtcagaaacaaaaaaaatggcagttagagttttaacccagactgtagggccctggccaaggccagtggccttagctctcaaaacaactagatgaggtttccaaacgctggcccccatgtccaaagtccctggtagcaatagccctgttagcacaagaagcagataagctaactcttagacaaaacctaaacataaagtccccctgtgctgtggtgattttaataaataccaaaggacaccattagctaatgaatgctagactagctagataccaaagcttgctctgtgaacatccccgcataacccttggaagtttgcaacacctaaaccccgccaccttcctcccggtgtcagagagcccagttaaacataactgtgtagaggtattggactcagtttattcctatgtggggcctaaccaccgagaccatcctttaaacatcagtagactgggagctgtaacatggatggggagcagctttcaccaacccctgcaaagtgacactctgaagaagacgacaagccctggttccagtcacacccggaagctgactggtccacgcacagctgaagcatgaggaaactcatcgcgggactaattttccttaaaatttagactgccacagtaagggcttcaactgaccttcctcaagactgagaactgtttccagtatatacatcaagtcacctgagggtagggacaaaagattggctacattcctattattttatgggttattataagtgtccccaggacctcctaaaagaaacttgtttgtataatgctattcctatcccaaggtatgtagccccaggaaataacccaacttgatgcgtgttatgacccattttaagcctcccgtgatcacagtttttaaaataaaattaaggactggtccttttctaggtgacacaagtaaggtaatagctagaatggaaaaaagaggggcccccaaaaatgtaaccttaaaatttggtgcttgtgccgctattgatagtaagcagcatggaataggatgcggttctctaaattggaaaaaaaaagtgacacagtaaaaaaaaaaataagtatatctgtcaagaatcatatttaaaaa

SEQ ID NO: 128070 - DNA, 845 bp, Homo sapiens
atggcgcctcctctgcgacccctcgcccggctgcgaccgccggggatgctgctccgcgcgctcctgctcctgctgctgctcagtcctttgccagggctgcgagagggaataggtgaactcataaccccaatcggcaccagcttgccggatctggatccagccaggaggagatgggagggtggaattggcagggttggaagtgaagtggccgatttgtgccccggaaaggaggggggaaaagtccccgaagctgaaaaggaaggagtgtggtgctttagcgaactgtcttttgtaaaagaaccacaggatgtaactgtcacaagaaaggacccagtcgttttagattgccaggctcacggagaagttcctattaaggtcacatggttgaaaaatggagcaaaaatgtctgaaaataaacggatcgaggttctttctaacggctctttatacatcagtgaggtggaaggcaggcgaggagagcagtccgatgaaggattttatcagtgcttggcaatgaacaaatatctgagccattcttaaccaaaaagctcatcttgccttatcaaggatagggagtacatagaggaggcggccagataggccatgagaagacgaagcatttgtcatgaccacacattgtttccaagacctcctgacaagcctgatagaatcctagggcttccagaaacacttttggaaaaacacagagctttctaacttcatacacaaaatgtgaatggtgtgtgataggtgtaacaaacaaaatgtcagaactggctctttaaatatctttagatatttgcatctctatagaaaggattactaacaataactatgtacatgcg

SEQ ID NO: 128071 - DNA, 329 bp, Homo sapiens
gggcagagggggaggggatgaagctgcccggcgccattttgcttgtgggctgccgcccgccgttgcctctccgcggaggctcgaagatagcaaactggaggcgcccagtctggcctccagcgctgggtgaacccggttggggtgtcactcgacgcccactaggggctgaggaggctccagtgcgcaggctccgggcaccggataaaagcggagctggcgagtctagtgctgtctcgatggaggagcaagaaacggaagaggtcggggggagaagcagccggaaaaatgcagccaccgtcaacgccgcctccctgccaccgtgcttcggg

SEQ ID NO: 128072 - DNA, 895 bp, Homo sapiens
gtcattttagtggggaaacccttcttttattctttggtctcccccttttttcttcgagaacactggctggccctccctcgtttaatcaccgccatataaaggaattcccactcccctccccgcacattgtcccaccgggggggaaatccttccccgaggccaaaagaagtataggaggcagcgacggcaactgcaccgacggcaacggcagctttttaccccgaagcacggtggcagggaggcggcgttgacggtggctgcatttttccggctgcttctccccccgacctcttccgtttcttgctcctccatcgagacagcactagactcgccagctccgcttttatccggtgcccggagcctgcgcactggagcctcctcagcccctagtgggcgtcgagtgacaccccaaccgggttcacccagcgctggaggccagactgggctgggggaggagggggagaggaacggggagacgggactggggttgtttgggagggggagaaggtgtatcgctttcggagggtgacgggagggagttcgttcccaagccctgctgtccttgttcgtgcacccaatactggcatgcccaagctcacctatatccagacttgagggcctctgggggaaagggggaaagaaccagtcccaccgaataccgacacttcctcaaaccttcggtggattgttgaatgcatctgttgtcagaaagacagagattccgtccccctcaccgcctccagtttgctatcttcgagcctccgcggagaggcaacggcgggcggcagcccacaagcaaaatggcgccgggcagcttcatcccctccccctctgccccccgtgcacttgccgccgccgccgccgccgccgcggccgccgccgccgccgccgccat

SEQ ID NO: 128073 - DNA, 1110 bp, Homo sapiens; identical to SEQ ID NO: 115202

SEQ ID NO: 128074 - DNA, 794 bp, Homo sapiens
gcccttttttttttttttttttttttacatttcctgttttcattttattgggaacttcaaagaaaagaaagagagacggattggttcccaagacaagccgtgacgtagactcccaacaagctggggaattctggacagcgaaggggtggacagtgagactcagcacagcccaaagtcaaaggcattagggttgttctgaaaatagagattcaagaagccctggaaaatgctccttatccatgagaagagccacagactgtggggtcccacttcatggctgatatccagagccgcagggctggcgtgtggctcacacagtccagtatcccatacacatccagccgctcaaaccagggcccagagggaggtaatcaatcatggatatacaggttccacccaaagaaggtggtgttctgatactcaagaatctcttccaggttgctgaattcctggacgcagggctgccttcagattagtgcattctctcccacatcttcaacgctaccaggcactccttggtcaaatgtgggaccttacaaaatagctccaataacatcttttggcgagctcgttcataagggtcatatggaaacagcttccttcctggataagcatcatccaggtactcacaagcaataacagattcatagatcagttgacattggctggtctccaggacaggaatgtggcccaaaagggtgctttgtatagtaccattcaggcttgtttctcaggttaatgttgaccacttcatgtctgatgtctttggccttgaggacgaggcgggtcctgtg

SEQ ID NO: 128075 - DNA, 1419 bp, Homo sapiens; identical to SEQ ID NO: 119507

SEQ ID NO: 128076 - DNA, 3450 bp, Homo sapiens
cacaccaaaaacccatctgtacatcaccatcgtcaaagaccaaaagtagataaaaccacaaagatggggaaaaaacagaacagaaaaactggaaagtctaaaacgcagagcgcctttcctcctccaaaggaacgcagttcctcaccagcaatggaacaaagctggatggagaatgactttgacgagctgagagaagaaggcttcagacgatcaaattactctgagctacgggaggacattcaaaccaaaggcaaagaagttgaaaactttgaaaaaaatttagaagaatgtataactagaataaccaatacagagaagtgcttaaaggagctgatggagctgaaaaccaaggctcgagaactacgtgaagaatgcagaagcctcagaaattggataaagagtcaagacccatcactgtgctgtattcaggaaacccatctcatgtgcagagacacacataggctcaaaataaaaggaaggaggaagatctaccaagccaatggaaaacaaaaaaaggcaggggttgcaatcctagtctctgataaaacagactttaaaccaacaaagatcaaaagagacaaagaaggccattacataatggtaaagggatcaattcaacaagaagagctaactatcctaaaaatatatgcacccaatacaggatcaccaagattcatgaagcaagtcctgagtgacctacaaagagacttagactcccacacattaataatgggagactttaacaccccactgtcaacattagacagatcaacgagacagaaagtcaacaaggatacccaggaattgaactcagctctgcaccaagcggacctaatagacatctacagaactctccaccccaaatcaacagaatatacatttttttcagcaccacaccacacctattccaaaattgaccacatactgggaagtaaagctctcctcagcaaatgtaaaagaacagaaattataacaaactatctctcagaccacagtgcaatcaaactagaactcaggattaagaatctcactcaaaacggctcaactacatggaaactgaacaacctgctcctgaatgactactgggtacataacgaaatgaaggcagaaataaagatgttctttgaaaccaacgagaacaaagacacaacataccagaatctctgggacgcattcaaagcagtgtgtagagggaaatttatagcactaaatgcccacaagagaaagcaggaaagatccaaaattgacaccctaacatcacaattaaaagaactagaaaagcaagagcaaacacattcaaaagctagcagaaggcaagaaataactaaaatcagagcagaactgaaggaaatagagacacgaaaaacccttcaaaaaattaatgaatccaggagctggttttttgaaaggatcaacaaaattgatagaccactagcaagactaataaagaaaaaaagagagaagactcaaatagacacaataaaaaatgataaaggggatatcaccaccgatcccacagaaatacaaactaccatcagagaatactacaaacacctctacgcaaataaactagaaaatctagaagaaatggatacattcctcgacatatacactctcccaagactaaaccaggaagaagttgaatctctgaatagaccaataacaggagctgaaattgtggcaataatcaatagtttaccaaccgtgggcttcatccctgggatgcaaggctggttcaatatacgcaaatcaacaaatgtaatccagcatataaacagagccaaagacaaaaaccacatgattatctcaatagatgcagaaaaagcctttgacaaaattcaacaacccttcatgctaaaaactctcaataaattaggtattgatgggacgtatttcaaaataataagagctatctatgacaaacccacagccaatatcatactgaatgggcaaaaactggaagcattccctttgaaaactggcacaagacagggatgccctctctcaccgctcctattcaacatagtgttggaagttctggccagggcaatcaggcaggagaaggaaataaagggtattcaattaggaaaagaggaagtcaaattgtccctgtttgcagatgacatgattgtttatctagaaaaccccatcatctcagcccaaaatctccttaagctgataagcaacttcagcaaagtctcaggatacaaaatcaatgtacaaaaatcacaagcattcttatacaccaacaacagacaaacagagagccaaatcatgagtgaactcccattcacaattgcttcaaagagaataaaatacctaggaatccaacttacaagggatgtgaaggacctcttcaaggagaactacaaaccactgctcaaggaaataagaggacacaaacaaatggtgcccaaggtaatttacagattcaatgccatccccatgaagctaccaatgactttcttcacagaattggaaaaaactactttaaagttcatatggaaccaaaaaagagcccgcatcgccaagtcaatcctaagccaaaagaacaaagctggaggcatcacactacctgacttcaaactatactacaaggctacagtaaccaaaacagcatggtactggtaccaaaacagagatatagatcaatggaacagaacagaggcctcagaaataatgccgcatatctacaactatctgatctttgacaaacctgagaaaaacaagcaatggggaaaggattccctatttaacaaatggtgctgggaaaactggctagccatatgtagaaagctgaaactggatcccttccttacaccttatacaaaaatcaattcaagatggattaaagatttaaacgttagacctaaaaccataaaaaccctagaagaaaacctaggcattaccattcaggacataggcgtgggcaaggacttcatgtccaaaacaccaaaagcaatggcaacaaaagccaaaattgacaaatgggatctaattaaactaaagagcttctgcacagcaaaagaaactaccatcagagtgaacaggcaacctacaacatgggagaaaattttcgcaacctactcatctgacaaagggctaatatccagaatctacaatgaactcaaacaaatttacaagaaaaaaacaaacaaccccatcaaaaagtgggccaaggacatgaacagacacttctcaaaagaagacatttatgcagccaaaaaacacatgaagaaatgctcatcatcactggccatcagagaaatgcaaatcaaaatacctgtgagccaaataaacctcttttatttacaaattactcaacctcatgtatgcctttctagtcgtacaaatggcctaaaacagaaaattggtatgaaggagtgcagttttgttataaagatacctgaagatgtggaagtggctttggaactgggtaatgagcagcaa

SEQ ID NO: 128077 - DNA, 3171 bp, Homo sapiens; identical to SEQ ID NO: 121976

SEQ ID NO: 128078 - DNA, 2433 bp, Homo sapiens
atgagaacaaagacacaacataccagaatctctgggacgcattcaaagccagtgtgtagagggaaatttatagcactaaatgcccacaagagaaagcaggaaaaatccaaaattgacaccctaacatcacaattaaaagaactagaaaagcaagagcaaacacattcaaaagctagcagaaggcaagaaataactaaaatcagagcagaactgaaggaaatagacacacaaaaaacccttcaaaaaataaatgaatccaggagctggttttttgaaaggatcaacaaaattgatagaccactagcaagactaataaagaaaaaaagagagaagaatcaaacagacacaataaaaaattgtaaaggggatatcaccactgatcccacagaaatacaaactaccatcagagaatactacaaacacctctacgcaaataaactagaaaatctagaagaaatggataaattcctcaacacatacactctcccaagactaaaccaggaagaagttgaatctctgaatagaccaataacaggagctgaaattgtggcaataatcagtagtttaccaaccaaagagtccaggaccggatggattcacagccgaattctaccagaggtacaaggaggaactgaaaaagagggaatcctccctaactcattttatgaggccagcatcattctgataccaaagccgggcagagacgcaaccaaaaaagagaattttagaccaatatccttgatgaacattgatgcaaaaatcctcaataaaatactggcaaaacgaatccagcagcacatcaaaaagcttatccaccatgatcaagtgggcttcatccctgggatgcaaggctggttcaatatacgcaaatcaataaatgtaatccagcatataaacagaaccaaagacaaaaaccacatgattatctcaattgatgcagaaaaagcctttgacaaaattcaacaacgcttcctgctaaaaactctcaataaattaggtattgatgggacatatttcaaaataataagagctatctatgataaacccacagccaatatcatactgaatgggcaaaaactggaagcattccctttgaaaactggcacaagacagggatgccctctctcaccgctcctattcaacatagtgttggaagttctggccagggcaattaggcaggagaaggaaataaagggtattcaattaggaaaagaggaagtcaaattgtccctgtttgcagatgacatgattgtatatctagaaaaccccattgtctcagcccaaaatctccttaagctgataagcaatttcagcaaagtctcaggatacaaaatcaatgtacaaaaatcacaagcattcttatacaccaacaacacacaaacagagagccaaatcatgagtgaactcccattcacaattgcttcaaagagaataaaatacctaggaatccaacttacaagggatgtgaaggacctcttcaaggagaactacaaaccactgctcaaggaaataaaagacgatacaaacaaatggaagaacattccatgctcatgggtaggaagaatcaatatcgtgaaaatggccatactgcccaagaattggaaaaaaactactttaaagttcatatggaaccaaaaaagagcccacatcaccaagtcaatcctaagccaaaagaacaaagctggaggcatcacactacctgacttcaaactatactacaaggctacagtaaccaaaacagcatggtactggtaccaaaacagagatatagatcaatggaacagaacagagccctcagaaataatgctgcatacctacaactatctgatctttgacaaacctgagaaaaacaagcaatggggaaaggattccctatttaataaatggtgctgggaaaactggctagccatatgtagaaagctgaaactggatcccttccttacaccttatacaaaaatcaattcaaaatggattaaagacttaaacgttagacctaaaaccataaaaaccctagaagaaaacctaggcattaccattcaggacataggcatgggcaaggacttcatgtccaaaacaccaaaagcaatggcaacaaaagccaaaattgacaaatgggatctaattaaactaaagagcttctgcacggcaaaagaagctaccatcagagtgaacaggcaacctacaaaatgggagaaaattttcgcaacctactcatctgacaaagggctaatatccagaatctacaatgaactcaaacaaatttacaagaaaaaaacaaacaaccccatcaaaaagtgggtgaaggacatgaacagacactttgcaaaagaagacatttatgcagccaaaaaagatgaaaaaatgctcatcatcaccggccatcagagaaatgcaaatcaaaaccactatgagataccatctcacaccagttag

SEQ ID NO: 128079 - DNA, 1023 bp, Homo sapiens; identical to SEQ ID NO: 124177

SEQ ID NO: 128080 - DNA, 2313 bp, Homo sapiens
atgaccgatcccacagaaatacaaactaccatcagagaatactacaaacacctctacaaaaataaactagaaaatctagaagaaatggataaattccttgacacgtacactcccccaagactaaaccaggaagaagttgaatctctgaatagaccaataacaggatctgaagttgtggcaataatcaatagcttaccaaccaaaaagagtccaggaccagatggattcacagccgaattctacaagaggtacaaggaggaattgataccattccttctgacactattccaatcaatagaaaaagagggaatcctccctaactcattttatgaggcaagcatcattctgataccaaagctgggcagagacacaaccaaaaaagagaattttagaccaatatccttgatgaacactgatgcaaaaatcctcaataaaatactggcaaaacgaatccagcagcatatcaaaaagcttatccaccatgatccagtggggttcatccctgggatgcaaggctggttcaatatacacaaatcaataaatgtaatccagcatataaacagagccaaagacaaaaaccacatgattatctcaatagatgcagaaaaggcctttgacaaaattcaacaacacttcatgctaaaaactctcaataaattaggtattgatgggacatatttcaaaataataagagctatctatgacaaacccacagccaatatcatactgaatgggcaaaaactggaagcattccctttgaaaacttgcacaagacagggatgtcctctctcaccactcctattcaacatagtgttggaagttctggccagggcaattaggcaggagaaggaaataaaggttattcaattaggaaaagaggaagtcaaattgtccctgtttgcagacgacatgattgtatatctagaaaaccccattgtctcagcccaaaatcttcttaagctgataagcaacttcagcaaagtctcaggatacaaaatcaatgtacaaaagtcacaagcattcttatacaccaacaatagacaaacagagagccaaatcatgagtgaactcccattcacaattgcttcaaagagaataaaatacctaggaatccaacttacaagggatgtgaaggacctcttcaaggagaactacaaaccactgctcaaggaaataaaagaggatacaaacaaatggaaggacattccatgctcatggataggaagaatcaatatcgtgaaaatggccatactgcccaaggtcatttacagattcaatgccatccccatcaagctaccaatgccttttttcacagaattggaaaaaactactttaaagttcatatggaaccaaaagagagcccacatcaccaagtcaatcctaaagaacaaagctggaggcatcacactacctgacttcaaactatgctacaaggctacagtagccaaaacagcatggtactggtaccaaaacagagatacacatcagtggaacagaacagagccctcagaaattacaccacatatctacaactatctgatctttgacaaacctgagaaaaacaaacaatggggaaaggattccctatttaataaatggtgctgggaaaactggctagccatatgtagaaagctgaaactggatcccttccttacaccttatacaaaaatcaattcaagatggattaaagacttaaatgttagacctaaaaccataaaaaccctagaagaaaacctaggcaataccattcaggacataagcatgggcaaggacttcatggctaaaacaccaaaagcaatggcaacaaaagacaaaatatgcaaatgggatccaattaaactaaagagcttctgtacagcaaaagaaactaccatcagagtgaacaggcaacctacaaaatgggagaaaatttttgcaacctactcatctgacaaagggctaatatccagaatctataatgaactccaacaaatttacaagaaaaaaacaaacaaccccatcaaaaagtcggcaaaggatatgaacagacacttcccaaaagaagacatttatgcagccaaaaaacacatgaaaaaatgctcatcatcactggccatcagagaaatacaaatcaaaaccacaatgagataccatctcacaccagttagaatggcgatcattaaaaagtcaggaaacaacagaatgaagctgcagaccttcatggctggtattgaatctcctaaagttggtgcagacccagagcgagcagcagcaagatttattgacaaagcttccacagcatggaaggggacctgcatggattgccactgctgg

SEQ ID NO: 128081 - DNA, 1692 bp, Homo sapiens
atggggagaaaccagcgcaaaaaggctgaaaattccaaaaaccagaacgcctcctctcccgcaaaggatcacaactcctctccagcaagggaacaaaactggacaaagaatgagtttgatgaattgacagaagtaggcttcagaagaataaccagtgtagagaagaacataaatgacctgatgaagctgaaaaacacagcacgagaacttcatgaagtatgcagaggtatcaatagccgaattgaccaagcagaagaaaggctatcagagattgaagatcaactcaatgaaataaaatgcagaaaaggccttcgacaaaattcaacagccttttatgctaaaaactcccaaaaactaggtatcgatggaaggtatctcaaaataataagagctatttacaacaaacccagagccaatattatactgaatgggcaaaaccaggaagcactccctttgaaaaccggcacaagacaaggatgccctctctcaccactcctattcaacatagcgttggaagtcctggccaggtcaatcaggcaagagaaagcaataaagcgtattcaaataggcagagagaaagtcaaattgtctttgtttgcagatgacatgattgtatatttagaaaaccccattgtctcagccccaaatctccttacgctgataagcaacttcagcaaagtctcaggatacaaaatcaatgtgcaaaaatcacaagcattcctatacaccaataatagacaagagacagagatccaaatcatgagtgaactcccattcacagttgctacaaagagaataaaatacctaggaatccaacttacaagggatgtgaaggacctcttcaaggagaactacaaaccactactcaacgaaataagagaggacataaacaaatggaaaaacattccatgctcatggataggaagaatcaatatcatgaaaatggccgtactgcccaaagtaatttatagattcaatgctatccacatcaagctaccattgactttcttcacagaattggaaaagactactttaaattttatatggaaccaaaaaagagcccacatagccaagaaaagccgaagcaaaaagaacaaagctggaggcatcatactacctgacttcaaactatactacaaggctacagtaaccaaaacagcatggtactggtaccaaaacagatatatagaccaatggaacagaacagaggcctgcaaaataacaccacacgtctacaaccatctgatctttgacaaacctgacaaaaacgagctatggggaaaggattccctatttcatgaatggtcttcggaaaactggatagccatatgcagaaagctgaaattggaccccttccttacaccttatacaaaaattaactcaagatggattaaagacttaaatgtaagacctaaaaccataaaaaccctagaagaaaacctaggcaatagcattcaagacataggcatgggtaaagacttcatgattaaaacaccaaaagcaatggcaacaaaagccaaaattgacaaatgggatctaattaaactaaagagcttctgcacagcaaaagaaactatcatcagagtgaacaggaaacctacagaatgggagaaaatttttgtaatctgtccatctgacaaagggctaatatccagaatatacaaagaacttaaacaaatttacaagaaataa

SEQ ID NO: 128082 - DNA, 2523 bp, Homo sapiens; identical to SEQ ID NO: 117787

SEQ ID NO: 128083 - DNA, 2871 bp, Homo sapiens; identical to SEQ ID NO: 120361

SEQ ID NO: 128084 - DNA, 3099 bp, Homo sapiens
atgggagaattgatcaccccactgtcaacattagacagatcaacaagacagaaagtcaacaaggatacccaggaattgaactcagctctgcaccaaggggacctaatagacatctacagaactctccaccccaaatcaacagaatatacatttttttcagcaccacaccacacctattccaaaattgaccacatacttggaagtaaagctctcctcagcaaatgtaaaagaacagagattataacaaactatctctcagaccacagtgcaatcaaactagaactcaggattaagaatctcactcaaaaccgctcaactacatggaaactgaacaacctgctcctgaatgactactggatacataacgaaatgaaggcagaaataaagatgttctttgaaaccaatgagaacaaagacacaacataccagaatctctgggacgcattcaaagcagtgtgtagagggaaatttatagcactaaatgcccacaagagaaagcaggaaagatccaaaattgacaccctaacatcacaattaaaagaactagaaaagcaagagcaaacacattcaaaagctagcagaaggcaagaaataactaaaatcagagcagaactgaaggaaatagagacacaaaaaacccttcaaaaaattaatgaatccaggagctggttttttgaaaggatcaacaaaattgatagaccgctagcaagactaataaagaaaaaaagagagaagaatcaaatagacacaataaaaaatgataaaggggatatcgccaccaatcccacagaaatacaaactaccatcagagaatactacaaacacctctacgcaaataaactagaaaatctagaagaaatggataaattcctcgacacatacactctcccaagactaaaccaggaagaagttgaatctctgaatagaccaataacaggagctgaaattgtggcaataatcaatagtttgccaaccaaaaagagtccaggaccagatggattcacagccgaatcctaccagaggtacaaggaggaactggtaccattccttctgaaactattccaatcaatagaaaaagagggaatcctccctaactcattttatgaggccagcatcattctgataccaaagccgggcagagacacaaccaaaaaagagaattttagactaatatccttgatgaacattgatgcaaaaatcctcaataaaatactggcaaaccgaatccagcagcacatcaaaaagcttatccaccatgatcaagtgggcttcatccctgggatgcaaggctggttcaatatacgcaaatcaataaatgtaatccagcatataaacagagccaaagacaaaaaccacatgattatctcaatagatgcagaaaaagcctttgacaaaattcaacaacccttcatgctaaaaactctcaataaattaggtattgatgggacatatttcaaaataataagagctatctatgacaaacccacagccaatatcatactgaatgggcaaaaactggaagcattccctttgaaaactggcacaagacagggatgccctctctcaccactcctattcaacatagtgttggaagttctggccagggcaattaggcaggagaaggaaataaagggtattcaatcaggaaaagaggaagtcaaattgtccctgtttgcagacgacatgattgtatatctagaaaaccccattgtctcagaccaaaatctccttaagctgataagcaacttcagcaaagtctcaggatacaaaatcaatgtacaaaaatcacaagcattcttatacaccaataacagacaaacagagagccaaatcatgagtgaactcccattcacaattgcttcaaagagaataaaatacctaggaatccaacttacaagggatgtgaaggacctcttcaaggagaactacaaaccactgctcaaggaaataaaagaggatacaaacaaatggaagaacattccatgctcatgggtaggaagaatcagtatcgtgaaaatggccatactgcccaaggtaatttacagattcagtgccatccccataaagctaccaatgactttcttcacagaattggaaaaaactactttaaagttcatatggaaccaaaaaagagcccgcatcgccaaggcgatcctaagccaaaagaacaaagctggaggcatcacactacctgacttcaaactatactacaaggctacagtaaccaaaacagcacggtactggtaccaaaacagagatatagatcaatggaacagaacagagccctcagaaataacgccacatatctacaactatctgatctttgacaaacctgagaaaaacaagcaatggggaaaggattccctatttaataaatggtgctgggaaaactggctagccatatgtagaaagctgaaactggatcccttccttacaccttatacaaaaattaattcaagatggattaaagacttaaacattagacccaaaaccataaaaaccctagaagaaaacctaggcagtaccattcaggacataggcatgggcaaggacttcatgtccaaaacaccaaaagcaatggcaacaaaagacaaaattgacatatgggatctaattaaactaaagagcttctgcacagcaaaagaaactaccatcagagtgaacgggcaacctacaaaatgggagaaaattttcgcaacctactcatctgacaaagggctaatatccagaatctgcaatgaactcaaacaaatttacaagaaaaaaacaaacaaccccatcaaaaagtgggcgaaggatatgaacagacacttctcaaaagaagacatttatgcagccaaaaaacacatgaaaaaatgctcatcatcactggccatcagacaaatgcaaatcaaaaccacaatgagataccatctcacaccagaaagttccgctccacatcccatcaatcaccctaaagagaagccaggggacccgggccactcgccaatgcagggtctcctgggctcaggcagatacccgaaacttgccacctcaagcacccacttggaatgcttctgctgtcacatcactctgctctatctgccacccacaacccaa

SEQ ID NO: 128085 - DNA, 3419 bp, Homo sapiens
acacagactggcaaattggataaagagtcaagacccatcagtgtgctatattccggaaacccatctcacgtgcagagacacacataggctcaaaataaaaggatggaggaagatctaccaagccaatggaaaacaaaaacaggcaggggttgcaatccacatctctgataaaacagactttaaaccaacaaagatcaaaagagacaaagaaggccattacataatggtaaagggatcaattcaacaagaaaagctaactatcctaaatgtatatgcacccaacacaggagcacccagattcataatgcaagtcctgagtgacctacaaagagacttagactcccacacattaataatgggagactttaacaccccactgtcaacattagacagattaacgagacagaaagtcaacaaggatacccaggaattgaactcagctctgcaccaagtggacctaatagacatctatagaactctccaacccaaatcaacagaatatacattgttttcagcaccacaccacacctattccaaaattgaccacatacttggaagtaaagctctcctcagcaaatgtaaaagaacagaaattataacaaactatctctcagaccacagtgcaatcaaactagaactcaggattaagaaactcactcaaatccgctcaactgcatggaaactgaacaacctgctcctgaatgactactgggtacataacgaaatgaaggcagaaataaagatgttctttaaaaacaatgagaataaagacgcaacatgccagaatctctgggacacattcaaagcagtgtgtagagggaaattcttagcactaaatgcccacaagagaaagcaggaaagatccaaaatcaacaccctaacatcacaattaaaagaactagaaaagcaagagcaaacacattccaaagctagtagaaggcaagaaataactaaaatcagagcagaactgaaggaaatagagacacaaaaaacccttcaaaaaattaatgaatccaggagctggttttttgaaaggatcaacaaaattgatagaccactagcaagactaataaagaaaaaaagagagaagaatcaaatagacacaataaaaaatgataaaggggatatcaccaccgatcccacagaaatacaaactaccgtcagagaatactacaaacacctctacgcaaataaactagaaaatctagaagaaatggataaattcctcgacacatacacactcccaagactaaaccaggaagaatttgaatctctgaatagaccagtaacaggatctgaaattgtggcaataatcaatagcttaccaacgaaaaagagtccaggaccagatggattcacagccgaattctaccggaggtacaaggaggaactgcatataaacagagccaaagacaaaaaccacatgattatctcaatagatgcagaaaaagcctttgacaaaattcaacaacccttcatgctaaaaactctcaataaattaggtactgctgggacgtatttcaaaataataagagctatctatgacaaacccacagccaatatcatactgaatgggcaaaaactggaagcattccctttgaaaactggcacaagacagggatgccctctctcaccactcctattcaatatagtgttggaagttctggccagggcaattaggcaggagaaggaaataaagggtattcaattaggaaaagaggaagtcaaattgtccctctttgctgatgacatgattgtatatctagaaaaactcattgtctcagcccaaaatctccttaagctgataagcaacttcagcaaagtctcaggatacaaaattaatgtacaaaaatcacaagcattcttatacaccaataacagacaaacagagagccaaatcatgagtgaactcccattcacaattgcttcaaagagaataaaatacctaggaatccaacttacaaggaatgtgaaggacctcttcaaggagaactacaaaccactgctcaaggaaataaaagaggatacaaacaaatggaagaacattccatgctcatgggtaggaagaatcaatatcgtgaaaatggccatactgcccaagggaatttacagattcaatgccattcccatcaagctaccaaagactttcttcacagaattggaaaaaactactttaaagttcatatggaaccaaaaaagagcccacatcaccaagtcaatcctaagccaaaagaacaaagctggaggcatcacactgcctgccttcaaactatactacaaggctacagtaaccaaaacagcatggtactggtaccaaaacagagatatagatcaatggaacagaacagagccctcagaaataacgccacatatctacaactatctgatctttgacaaacctgagagaaacaagcaatggggaaaggattccctatttaataaatggtgctgggaaaactggctagccatatgtagaaagctgaaactggatcccttccttacagcttatacaaaaatcaattcaagatggattaaagacttaaacattagacctaaaaccataaaaactctagaagaaaatctaggcattaccattcaggacataggcatgggcaaggacttcatgtctaaaacaccaaaagcaatggcaacaaaaaccaaaattgacaaatgggatctaattcaactaaagagcttcttctgcacagcaaaagaaactaccatcagagtgaacaggcaacctacagaatgggagaaaatttttgcaacctactcatctgacaaagggctaatatctagaatctacaatgaactcaaacaaatttacaagaaaaaaacaaacaaccccatcaaaaagtggacaaacgatatgaacagacacttctcaaaagaagacatttatgcagccaaaaaacacatgaaaaaatgctcatcattaccggccatcagagaaatgcaaatcaaaaccacaatgagataccatctcacaccagttagaatcgcgatcattaaaaagtcaggaaacaacagcaaagtggatgatatccatgctatctgtagccttcttaaagactttcttcgaaacttcaaagaacctcttctgacctttcgcctaaacaaagcctttatggaagcagcagaaatcacagatgaagacaacagcatatctgccatgtaccaggctgttggtgaactgccccaggccaacagggacacattggttttcctcatgattcacttgcagagagtggctcagagtccatatactaaaatgaatgttgccaatctggctgaagtctttggctctacaatagtggcccatgctgtgcccaatccagaaccagtgacgatgttacaggacatcaagtgtcaacccaaggtggtcgagcgcctgccttccttgcccctggagtactgga

SEQ ID NO: 128086 - DNA, 2685 bp, Homo sapiens; identical to SEQ ID NO: 121971

SEQ ID NO: 128087 - DNA, 1616 bp, Homo sapiens
ctgtccctgcccctctgcccttctggtccctgccagctggtttcattcacttgttcaacaaatatttgtcaagtacctaccaccatgtgccaggctacattagccagcaatgaccagggctatgaaggacaaatgccaagcaaggtgcggcactcagagcacatgagtcaggtgcgagtggccaggagacgctttcctgaggaccttacgtagcctctggcccaggcaggctgagtggccagctctgtctttactatgctgtgtacctctgggcaacctgctaccctctctgtggctgccacgcagatgctgcatggggtcagtcagaaattcagcacaagtcaaagcagagagaagaaaacatcctgtgagctcaccgacagcaacccctgggggcctggtaaagagcaacaactgatgcaactccaccttttgcttggtagccaaaacctgagagctcagagcctcatccaggggaacggacaaaacctcacctccccagtcacccccacctttccacttccagtgccatcaaggcacggtcatcaaagccaggcaggtctgagtgctgctctgcaacttactacctttatgaccatacgcaagtcataagtctggccatacgccctactgccagagaccccattttattctgtaagaagtgacaggaaggcatagcttgttccccacaaaataccccatcttcaattttctcccttgcctggctccaacggcagagaaaaatgtgcatggacaccaaaccatctccaagaagcagccattaggtaatctgggacatggcattgacaatggcaccgggcacagggcttctgacatcatataagcaagggcggaagtcaaattgtccctgtttgcagatgacatgattgtatatttagaaaaccccatcatctcagcccaaaatctcctcaagctgataagcaagttcagcaaagtctcaagatacaaaattaatgtgcaaaaatcacaagcattcctatacaccaataacagacaaacagagagccaaatcatgagtgaactcccattcacaattgctacaaagagaataaaatacctaggaatacaacttacaagggatgtgaaggacctcttcaaggagaactacaaaccactgctcaatgaaataaaggaggacacaaacaaatggaagaacattccatgctcatggataggaagaatcaatatcgtgaaaatggccatactgcccaaggtaatttatagattcagtgccatccccatcaagctaccaatgactttcttcacagaattggaaaaaaaaaactggctagcaatatgtagaaagctgaaactggatttcttctttataccttacacaaaaattaattcaagatggattaaagacttaaatgttagacctaaaaccatgaaaaccctagaagaaagcctaggcaataccattcaggacataggcatcggcaaggacttcatgactaaaacaccaaaagcaatggcaacaaaagccaaaagagcttctgcacagcaaaagaaactaccatcagagtgaacaggcaacctacagaatgggagaaaatttttgcaatctatccatctgacaaagggttaatatccag

SEQ ID NO: 128088 - DNA, 4695 bp, Homo sapiens
atgaaggcagaaataaaggtgttctttgaaaccaacgagaacaaagacacaacataccagaatctctgggacacattcaaagcagtgtgtagagggaaatttatagcactaaatgcccacaagagaaagcaggaaagatccaaaattgacaccctaacatcacaattaaaagaactagaaaagcaagagcaaacacattcaaaagctagcagaaggcaagaaataactaaaatcagagcagaactgaaggaaatacagacacaaaaaacccttcaaaaaatcaatgaatccaggagctggttttttgaaaggatcaacaaaattgatagatcgctagcaagactaataaagaaaaaaagagagaagaatcaaatagacacaataaaaaatgataaaggggatatcaccaccgatcccacagaaatacaaactaccatcagagaatactacaaacacctctatgcaaataaactagaaaatctagaagaaatggataaattcctcgacacatacactctcccaagactaaaccaggaagaagttgaatctctgaatagaccaataacaggagctgaaattgtggcaataatcaatagtttaccaaccaaaaagagtccaggaccagatggattcacagccgaattctaccagagctgggcagagacacaaccaaaaaaagagaattttagaccaatatccttgatgaacattgatgcaaaaatcctcaataaaatactggcaaaacgaatccagcagcacatcaaaaagcttatccaccatgatcaagtgggcttcatccctgggatgcaaggcttggttcaatatacgcaaatcaataaaggtaatccagcatataaacagagccaaagacaaaaaccacatgattatctcaatagatgcagaaaaagcctttgacaaaattcaacaacccttcatgctaaaaactctcaataaattaggtattgatgggacgtatttcaaaataataagagctatctatgacaaacccacagccaatatcatactgaatgggcaaaaactggaagcattccctttgaaaactggcacaagacagggatgccctctctcaccgctcctattcaacatagtgttggaagttctggccagggcaatcaggcaggagaaggaaataaaaggtattcaattaggaaaagaggaagtcaaattgtccctgtttgcagacgacatgattgtttatctagaaaaccccattgtctcagcccaaaatctccttaagctgatacgcaacttcagcaaagtctcaggatacaaaatcaatgtacaagaatctacaagcattcttatacaccatcaacagacaaacagagagccaaatcatgagtgcactcccactcacaattgcttcaaagagaataaaatacctaggaatccaacttacaagggatgtgaaggacctcttcaaggagaactacaaaccaactgctcaaggaaataaaagaggatacaaacaaaatggaagaacattccatgctcagggggaaggaagaatcaatatcgtgaaaatggccatactgcccaagaattggaaaaaaactacttttatggttcatttggaaccataaaagagcctgtattgccaagacaatcctaagccaaaagaacaaagctggaggcatcacactacctgacttcaaactatactacaaggctacagtaaccaaaacagcatggtactggtaccaaaacatagatatagaccaatggaacagaacagagccctcaaaaataataccacgcatctacaacaatctgatctttgacaaacctgacaaaaacaagaaatggggaaagtactccctatttaataaatggtgcttggaaaactggctagccatatgtagaaagctgaaactggatcccttccttacatcttatacaaaaattaattcaagatggattaaagacttaaatgtcagacctaaaaccataaaaaccctagagggaaacctaggcaataccattcaggacataggcatgggcaaggacttcatgtctaaaacaccaaaagcaatggcaacaaaagccaaaattgacaaatgggatctaaataatctaaagagcttctgcacagcgaaagaaactaccatcagagtgaacatgcaacctacagaatgggagaaaatttttgcaatctacccatctgacaaagggctaatatccagaatctacaatgaactcaaacaaatttacaagaaaaaaacaaccaaaccccatcaaaaagtgggcaaaggacatgaacagacacttctcaaaagaagacatttatgcagccaaaaaacacatgaaaaaatgttcatcgtcactggccatcagagaaatgcaaatcaaaaccacaatgagataccatctcacaccagttagaatggcaatcattaaaaagtcaggaaacaacaggtgctggagaggatgtggagaaataggaacacttttacactgttggttggactgtaaactagttcaaccattgtggaagtcagtgtggtgattcctcaggaatctagaactagaaataccatttgacccagccatcccattactgggtatatacccaaatgactataaatcatgctgctataaagacacatgcacacgtatgtttattgcggcattattcacaatagcaaagacttggaaccaacccaaatgtccaacaattatagactggattaagaaaatgtggcacatatacaccatggaatactatgcagccataaaaaatgatgagttcgtgtcctttgtagggacatggatgaaattggaaatcatcattctcagtaaactatcacaagaacaaaaaaccacacaccgcatattctcactcataagtgggagttgaacaatgacaacatatgggcacagggaaggaaacatcacacatcagggcctgtcaacagttgtctggagaaacaggaagagccaccatcattgcttcgtctaaataatcggatcaaacagctactcccaccggtagatttaacggaactgttacttgagatagatgcccagacaggatttacacatgagtttgcgcatgtcagtgaatctggtgctcgagcgcaagatttgcacatcagtttatgtgcggtattgatggctgaagcctgtaatatcggactggaaccgctgataaagcacaatataccagcactgacccgccatcggctcagttgggtgaaacagaattaccttcgtgcagaaacgctggtcagggccaatgcccgcctggttgattttcagtccacactggagcttgctggtcgttggggaggtggagaagtggcatcagctgacggcatgcgccttgtcacaccagtgaagaccatcaactcaggatctaacagaaaatatttttgttctggacgagggatcacctggtataacttcgtatctgatcggtactctgggttccatggcattgtggtacccggtacattacgggattcgatttttgtacgggaaggacttcttgagcagcagacagggctgaatccagttgaaatcatgacagacattgcgggtagcagcgatattattttcggtctgttctggctactggggtatcagttttccccccggcttgccgatgcaggtgaggcggtgttctggcgggtgaataaatcggcaaactacggagtactggataagttggcccgaggatatgcagatctgtcaaaagcggagagtcagtgggatgagatgatgcgaaccgctggttcgctgaagttgggtacaattcatgcgtcagaactcattcgctctttactgaaaagctcgcgcccatcaggactggcacaggcaattatggaagtagggcgtgtaaacaaaacgctatatctcctcaattatattgatgatgaagattatcgtcggcggatcctgacgcagcttaatcgaggagaaggccgccacgctgtggctcgtgcgatttgttacggacaacgcggagagatcagaaagcgttatcgtgaagggcaggaagatcaactgggggcgctgggcctggttactaatgcagtggttctgtggcacacgctctatatggaggaagcgttgagttggatgcgccgcaatggcgaagaaattatagatgaagatatcgcttggctatctcccctgatgcacgggcatatcaatatggcaatcaggcaggagaaagaaataaagggtattcaattaggaaaagaggaagtcaaatggtccctgtttgcagatgacatgattgtatatttagaaaaccccatcgcctcagcccaaaatctccttaagctgataagcaacttcagcaaagtctcaggatacaaaatcaatgtgcaaaaatcacaagcattcttatacaccaataacagacaaacagagagccaaatcatgagtgaactcccattcacaattgcttcaaagagaataaaatacctaggaatccaacttacaagggatgtgaaggacctcttcaaggagaactacaaaccaatgctcaatgaaataaaagaggatacaaacaaatggaagaacattccatgctcatggataggaagaatcaacatcgtgaaaatggcaatactgcccaagctaatttatagattcaatgccatccccatcaagctaccaatgactttcttcacagaattggaaaaaactactttaaagttcatatga

SEQ ID NO: 128089 - DNA, 3871 bp, Homo sapiens
atgtaccaagcaaatggaaaacaaaaaaaggcaggggttgcaatcctagtctctgataaaacagactttaaaccaacaaagatcaaaagagacaaagaaggccattacataatggtaaagggatcaattcaacaagaagagctaactatcctaaatatatatgcacccaatacaggagcacccacattcatacagcaagtcctgagtgatctacaaagagacttagactcccacacattaataataggagactttaacaccccactgtcaacatcagacagatcaacgagacagaaagtcaacaaggatacccaggaattgaactcagctctgcaccaagcagacctaatagacatctacagaaccctccaccccaaatcaacagaatatacatttttttcagcaccacaccacacctattccaaaattgaccacatacttggaagtaaagcactcctcagcaaatgtaaaagaacagaaattataacaaactatctctcagaccacagtgcaatcaaactagaactcatgattaagaatctcactcaaaaccactcaaccatatggaaactgaacaacctgctcctgaatgactactgggtacataaggaaatgaaggcagaaataaagatgttctttgaaaccaacgagaacaaagacacaacataccagaatctctgggacacattcaaagcagtgtgtagagggaaatttatagcactaaatgcccacaagagaaagcaggaaagatccaaaattgacaccctaacatcacaattaaaagaactagaaaagcaagagcaaacactttcaaaagctagcagaaggcaagaaataactaaaatcagagcagaactgaaggaaatagagacacaaaaaacccttcaaaaaattaacgaatccaggagctgaaatacaaactaccatcagagaatactataaacacctctatgcaaataaactagaaaatctagaagaaatggataaattcctcaacacatacactctcccaagactaaaccaggaagaagttgaatctctgaatagaacaataacaggctctgaaattgaggcaagaattaatagcttaccaaccaaaaaaagtccaggaccagatggattcacagctgaattctaccagaggtacaaggaggagatggtaccattccttctgaaactattccaatcaatagaaaaagagggaatcctccctaactcattttatgaggccagcatcatcctgataccaaagcctggcagagacacaacaaaaaaagagaattttagaccaatatccctgatgaacatcgatgcaaaaatcctcaataaaatactggcaaaccaaatccagcagcacatcaaaaaccttatccaccatgatcaagtgggcttcatccctgggatgcaaggctggttcaacatatgcaaatcagtaaatgtaatccagcatataaacagaaccaaagacaaaaaccacatgattttctcaatagatgcagaaaaggcctttgacaaatttcaacaactcttcatgctaaaaactctcaataaattaggtattgatgggatgtatctaaaaataataagagctatttatgacaaactcacagccaatatcatactgaatgggcaaaaactggaagcattccctttgaaaactgccacaagacagggatgccctctctcaccactcctattcaacatagtgttggaaattctgaccagggcaatcaggcaggagaaagaaataaagggtattcaattaggagaagaggaagtcaaattgtccctgtttgcagatgacatgattgtatatctagaaaaccctatcatctcagcccaaaatctccttaagctgataagcaacttcagcaaagtctcaggatacaaaatcaatgtgcaaaaatcaccaagcattcctatacaccaacaacagacaaacagagagccaaatcatgagtgaactcccatttcacaattgcttccaagagaattaaatacctaggaatccaacttaacaagggatgtgaaggacctcttcaaggacaactacaaactactcactgatcaaggaaataagagaggacacaaacaaatggaaaaacattccatgctcatggataggaagaatgaatatcatgaaaatggccatactgcccaaggtaaatttatagattcaatgccatccccatcaagctaccaatgactttcttcacagaattggaaaaaactactttaagtaaagttcatatggaaccaaaaaaggtcctgcattgccatgacaatcctaacccaaaagaataaagccggaggcatcacactacctgacttcaaactatactacaaggctacagtacccaaaacagcatgcccgtctttcaaaacaaaagactataatttcatcaaagctgtttgctttgcccttggtcggcttctcagaataatcacctctacagtctgcaacgtgtcttggaaatgtgggctttcccggggttgtaaagcgttacagctactgctagaaggaggcttttcagggcatgccattctgcacatggtttctgagacttttaaatcggagagggagctcaaagaccacgaaatcatacctgttaactttacaggtgaggaaaggaaggctcagaggcactgtggggagccgctgaaagattttaaacagggatgggccaacggggctctctggtctgcggcttcattcctgaagtcagtgagaccacgaacctactggaaggaagaaactccagacacatctgaacatctgaagaaaccaactccagacacatcatctttaagaactgtaacactcactgtgaggttccgcggcttcattcttgaagtcagcgagaccaagaacccaccagaaggaaccaattccagacacattttggcaaccacaaagggactattgactatcgccaagtggaggaaaactagcgtttctgctgctgcgtcagtgagcgcaactattccgatcagcagggtccagggaccgttgcgggttcttgggcaagaggtgtttctgctgcttcatcgcctccctatagctccccttcctattaatgataagcctcctctaatcttccccacccagaaggaaataaacaaagacatctccaaaggaccacaaaaccctctgggctatcagttatgtccccttcatgctatagggggaggagaatttggcgcaacctggaattggaaaaaactacttaagttcatatggaaccaaaaaagagcctacattgccaagacaatcctaagccaaaagaacaaagctggaggcttcatgctacctgacttcaaactatactacaaggctacagtaaccaaaacagcattgtactggtaccaaaagagagatatagaccaatggaacagaacagagcccttagaaataataccacacatctacaaccttctgatctttgacaaacctgacaaaaacaagaaacggggaaaggattccctacttaataaatggtgctgggaaaactggctagccatatgtagaaagctgaaactggatcctttccttacaccttatacaaaaactaattcaagatggattaaagacttaaatgttagacttaaaaccataaaaaccctagaagaaaacctaggcaataccattcaggacataggcatgggcaaggacttcatgactaaaacaccaaaagcaatggcaccaaaagcaatggcaacaaaagccaaaattgacaaatgggatctaattaacctaaaaagcttctgcacagcaaaagaaactaccatcagagtgaacaggcaacctacagaatgggagaaaatttttaccatctacccatctgacaaagggctaatatccagaatctaa

SEQ ID NO: 128090 - DNA, 425 bp, Homo sapiens
  misc_feature (1)...(425): n = a,t,c or g
ggcctcgtgccatttgactgctataattatttgtactgttgatcacatgtacttaaaacatctgatactgtattctaagacaggttgtttttgcaattaaatttattttaataagacgatcatgaataaaactttaaattgatatttttnnnnnnnnnnnnnnnnnnnnnnnnnnnnnnnnnnnnnnnnnnnnnnnnnnnnnnnnnnnnnnntctgtctctgacnnnnnnnnnnnnnnnnnnnnnnnnnnnnnnnnnnnnnnnnnnnnnnnnnnnnnnnnnnnnnnnnnnnnnnnnnnnnnnnnnnnnnnnnnnnnnnnnnnnnnnnnnnnnnnnnnnnnnnnnnnnnnnnnnnnnnnnnnnnnnnnnnnnnnnnnnnnnnnnnnnnnnnncnnnnnnnnnnnnnnnnnnnnnnnnnnnnnnnnn

SEQ ID NO: 128091 - DNA, 916 bp, Homo sapiens
actgtgacggttatccatacagttgccagagtgggaaatctggacatccagattcagaggaaatctgaactcttcctgtccctggtagtttgtgaagctataaaaaatgaaatgaatgttatgctgaaaagttctccagttgatttggtaactgctacggaccaaaaagttgaaaaaatgcttatctcttccataaaggaaaagtatccatctcacagtttcattggtgaagaatctgtggcagctggggaaaaaagtatcttaaccgacaaccccacatggatcattgaccctattgatggaacaactaactttgtacatagatttccttttgtagctgtttcaattggctttgctgtaaataaaaagaaaaaagtggatgaaacatacttaggtttggtaaaggaaacttgttttcctctgcagatagaatttggagttgtgtacagttgtgtggaaggcaagatgtacactgccagaaaaggaaaaggtgccttttgtaatggtcaaaaactacaagtttcacaacaagaagatattaccaaatctctcttggtgactgagttgggctcttccagaacaccagagactgtgagaatggttctttctaatatggaaaagcttttttgcattcctgttcatggggatccggagtgttggaacagcagctgttaatatgtgccttgtggcaactgggcggagcagaatgcatattatgaaatgggaattcactgctggggatgttgcaggagctggcattattgttactgaagctggtggcgtgctaatggatgttacaggtggaccatttgatttgatgtcacgaagagtaattgctgcaaataatagaatattagcagaaaggatagctaaagaaattcaggttatacctttgcaacgagacgacgaagattaa

SEQ ID NO: 128092 - DNA, 2903 bp, Homo sapiens
  misc_feature (1)...(2903): n = a,t,c or g
tttcgtcgttcacagagctagccggacgtcctccgactcaagctcctagaaacttggtgcatccccaggcccaggtagtcactctaagtgatggggcagcgcccaggtcctgtgctgcccgcagtcgcggtgctgggacgggtggcaaaaaggaaggtggcctggctcctacgctggaaggctgtgaccaggacagaaacagcaggaaacagttcaggtgtttatggctttgggaaaatgaaaatatttgtcaaatattttcagaagatggctgatccttggcaggaatgcatggattatgcagtaactctagcaagacaagctggagaggtagtttgtgaagctataaaaaatgaaatgaatgttatgctgaaaagttctccagttgatttggtaactgctacggaccaaaaagttgaaaaaatgcttatctcttccataaaggaaaagtatccatctcacagtttcattggtgaagaatctgtggcagctggggaaaaaagtatcttaaccgacaaccccacatggatcattgaccctattgatggaacaactaactttgtacatagatttccttttgtagctgtttcaattggctttgctgtaaataaaaagatagaatttggagttgtgtacagttgtgtggaaggcaaagatgtacactgccagaaaaggaaaaggtgccttttgtaatggtcaaaaactacaagtttccataaacaagaaagaatattaccccaaaccccctcctgggtggactgaagttgggcctcctcccagaacacccagagacctgtgaagaatggttcctttcctaatatggaaaagccttttttgccattccctgttcatgggatccggagtgttggaacagcagctgttaatatgtgccttgtggcaactggcggagcagatgcatattatgaaatgggaattcactgctgggatgttgcaggagctggcattattgttactgaagctggtggcgtgctaatggatgttacaggtggaccatttgatttgatgtcacgaagagtaattgctgcaaataatagaatattagcagaaaggatagctaaagaaattcaggttatactctttgcaacgagacgactattattaattaaggcagcctcatagtcaatcccaggtgctttttcccagatttggtgactcatcaatggatattgtgtttttggatgtatgatatgcttggtttaaattctctttgtccaggtcaaaaatttggaacttgtttcttattttactatgtctaggtttgcaagaattgacataatgtttgtttcactgatttaaaaaattttgcatgtaagaatgtacctttaggggaacatacccaggaagttcaggttgtaaatataacatcaactgaaatagtcaattagcaattttgtgtttctaaatatatatggacccctgaaattttgaccttagtatataggtgcagagacaccccacntagaaagttaactgtttggaaaaacatttctctttagtttcaaaaaccatatataattaaatccgtaaggatatactgagtaccctaggccaacttttttttctttgcagagaaccttttttgctttattcttcagtgttcatatagcacctgggcccattacatatctagggcaactaaaaacaaacattgtaaggaatgaatatttttaatgtaggtaattcctagttacaataggatacataaagtaatggaactcagcattctgtacttttgcttccgggttggaggtaaaaattatctagttaaatttttttttatttcacgttaccatgccatttcacattaccataccatcagatagcatggcttattgtgggcatttctgcagtgaatacattttccaaaacagttaaattgtctgtttggatttgctttaaagtcttgtgtaagagagaagaaactatttctataataaaaagcactctcatcagatatctgacataattagatacaatataacattttactaagttcagtattcatgttttaaaggtgtttatactgatttgattgtgctggcaaatatactgtattgttaatattgaactgtttatttttctcttagtcttcttatttaattaaccttcattggcccgctggattctgttcagccctttaaaaatatttcttagtggtcattgctctgcaggaactcaaaaaggaaaattggtaccttggttcatagacatttttaaaggggttaatttattggtccagcccttacccctggcacgtaaacagactactaaacttattgtaggttcggtttgagcttttgtgttgtaaaattaaaaatgcttctgtaaagttttcaagggtagggagtgattttattattgtgtatatctaatatattaagtatgtgtgatactaaggtttgactgcttataattatttgtactgttgatcacatgtacttaaaacatctgatacctgtattctaaggacaggttgtttttgcaattaaatttattttaataaggacgatccatggaataaaactttaaaattggatatttttattcattattacccattatcattattattatttttagattcagggtctcgctctgttgcccagggtctgtctctgactgtgctgtggtgcagtcatagctcactgtatccttaaattcctgggggctcaagtgatcctcctctttcagtctcctgagtagctggggactataagttcatgccaccatgccctactaatgttttaattttatttttgtaaagatgggatcttcctatgttttcccagccccttggcctcccaaagtgctgggattacagatgtgagccaccgagccaggccacgatatttacattattaaagttaatagttcaaactaca

SEQ ID NO: 128093 - DNA, 375 bp, Homo sapiens
gagttgcaatgcaaagctccataatgacttccctctccctcttccaaagacacagattctctgcatcatgctgcgctcctaggggaagggcgaagggtagtgtgagcaattcaaggctgtctttcccaccctcttcagtgcctcttccttgatatgatgttaaaaccaggtactgtgattgctcaccttattttctggttcttttgaaggcgctgtcttctgtggataatagttcaatttggtgttcttgaggggtgaggttggaggggacagggtgggatgatagctggagggttctgtttggccatcttgctctctttatagttattcttcattagatagaatcaccaaggcaggaaggtgtcattactgctt

SEQ ID NO: 128094 - DNA, 879 bp, Homo sapiens
tcagatgtgagaagtgagatgcttggtgtggtgaggttcacagtgcagctctccaccaccagcttcacgatgtggaagctgctcatctgctccttctcggcattgcccctgcagagattttgagcctgcagtggcagggcttgctagaactccggttctgactaccaagacgaacccttctcctccagctaggactggtctaaatgctccctccatgggcaccagcctaattctgccctgtgttgctttccactgtatcagggcagcactgagttgcaatgcaaagctccataatgacttccctctccctcttccaaagacacagattctctgcatcatgctgcgctccttattttctggttcttttgaaggtgctgtcttctgtggataatagttcaatttggtgttctgctggtcctccagcccagtctgctctctgtacacaatccccatgagcagcatgagtgccaagaactgctcagtgctcaggtctggcacctgggcttctttcacgtgctcataaggcagccagcgtgtttccctaggtaccccggaggctttgggcacagaggaccacacgtccagaagtttgggccattcacatgtgtgccatgtggacctctctccagccactgcttcctgtagcttccaaacggcctcctcagaagtgtcacctccagccactgcttcctgtagcttccaaacggcctcctcagaagtgtcacctccagccactgcttcctgtagcttccaaacggcctcctcagaagtgtcacctgcagccactgcttcctgctctttcacattttctttcttctttgtctgtgctctgtggtttggcatctgccccagctgctctgctgccgtcttgtctaccat

SEQ ID NO: 128095 - DNA, 202 bp, Homo sapiens
atgaacatcaatgcgaaaatcctcaataaaatactggcacaccgaatccagcagcacatcaaaaagcttatccaccatgatcaagtgggcttcatccctgggataaccaacgacaaaaaccacatgattatctcaatagatgcagaaaaggcctttgacaaaattcaacaacccttcatgctaaaaactctcaataaactag

SEQ ID NO: 128096 - DNA, 245 bp, Homo sapiens
cacatggccagtgaggacatagcgagtgacgaggagcacacggtcatccatgaggaggagggggtggagaagctgaggacaggctcagggaaccggagaccgagaaggcgctgtcctcttcactgcacgcgccccggaccagtgccggccctgatcatgcagctcttccaggcccactgcttcttcctgtccactaggccacagctgctctccaggcccactatgcacacatcttcccctccaag

SEQ ID NO: 128097 - DNA, 2061 bp, Homo sapiens; identical to SEQ ID NO: 119522

SEQ ID NO: 128098 - DNA, 339 bp, Homo sapiens
atgaacgaagaccaaatgaatgaaatgaagcgagaggagaagtttagagaaaaaacagtaaaaagaaatgaacaaagcctccaagaaatatgggactatgtgaaaagaccaaacttatgtctgactggtgtacctgaaagtggcggggagaatggaaccaagttggaaaacactcttcaggatattatccatgagaacttccccaacctagcaagaaccgaagacaaaaaccacatgattatctcaatagatgcagaaaaggccttcgacaaaattcaacagcccttcatgctaaaaactctcaataaactagtattgatgggacgtatctcaaaataa

SEQ ID NO: 128099 - DNA, 1638 bp, Homo sapiens
atgattatctcaatagatgcagaaaaggcctttgacaaaattcaacagcccttcatgctaaaaactctcaataaattaggtactgatgggacgtacttcaaaataataagagctatctatgacaaacccacagccaatatcatactgaatggacaaaaactggaagcactccctttgaaaactggcacaagacaaggatgccctctctcaccactcctattcaacatagtgttggaagttctggccagggcaatcaggcaggagaaggaaataaagggcattcaattaggaaaaggggaagtcaaattgtccctgtttgcagatgacatgattgtatatctagaaaacgccatcatcgcagcccaaaatctccttaagctgataagcaacttcagcaaagtctcaggatacaaactcaatgtacaaaaatcacaagcattcttatacaccaataacagacaaacagagagccaaatcataagtgaattcccattcacaattgcttcaaagagaataaaatacctaggaatccaacttacaagggatgtgaaggacctcttcaaggagaactacaaaccactgctcagtgaaataagaggatacaaacaaatggaagaacattccatgctcatggataggaagaatcaatatcgtgaaaatggccatactgcccaaaaattggaaaaaattactttaaagttcatatggagtcaaaaaagagcccgcatcaccaagtcaatcctaagccaaaagaacaaaggtggaggcattatgctacctgacttcaaactatactacaaggctacagtaaccaaaacagcatggtactggtaccaaaacagagatatagaccaatggaacagaacagagccctcagaaataatgccgcatatctacaactatctgatctttgatgaacctgacaaaaacaagcaatggggaaaggattccctatttaataaatggtgctgcgaaaactggctagccttatgtagaaagctgaaactggatcccttccttacaccttatacaaaaattaatgcaagatggattaaagacttacatgttagacctaaaaccataaaaaccctagaagaaaacctaggcaataccattcaggacataggcatgggcaaggacttcatgtctaaaacaccaaaagcaatggcaacaaaagccaaaattgacaaatgggatctaattaaactcaagagcttctgcacagcaaaagaaaccaccatcagagtgaacagtcaacctacagaatgggagaaaatttttgcaacctactcatgtgacaaagggctaatatccagaatctacaatgaactcaaccaaatttacaagaaaaaaacaaacaaccccatcaaaaagtgggcaaaggatatgaacagacacttctcaaaagaagacatttatgcagccaaaaaacacatgaaaaaatgctcttcatcactggccatcagagaaatgaaaatcaaaaccacaatgagataccatctcatatcagttagaatggagatcattaaaaagtcagaaaacaacaggtgctggagaggatgtggagaaataggaacacttttacactgttggtgggactgtaaactagttcaaccattgtggaagtcagtgtggtga

SEQ ID NO: 128100 - DNA, 1443 bp, Homo sapiens; identical to SEQ ID NO: 122745

SEQ ID NO: 128101 - DNA, 2805 bp, Homo sapiens
ctaaaggccaactactaattccttgccacatggcccttccacatcatggccctttgccttttcaaggctgttggagagtctcctccagtatgctgtgaggagccttatcacaggaaagtaatgagagatgtaagattttgctgctgagacttgcagaaagttatcgccgtcattgtcactgtcattgtcagcatcatgatcatcactgacacattttttgtcatccttgggcaatatggccattttcacaatattgattcttcctatccatgagcatggaatgttcttccatttgtttgtgtcctcttttatttcgttgagcagtggtttgtagttctccttgaagaggtccttcacatcccttgtaagttgtatttctaggtattttattctctttgaagcaattgtgaatgggagttcactcatgatttgactctctgtttgtctgttactggtgtataggaatgcttgtgatttttgcacattgattttgtatcctgagactttgctgaagttgcttatcagcttaaggagattttgggctgagatgatggggttttctaaatatacaatcatgtcatctgcaaacagggacaatttgacttcctcttttcctaattgaataccctttatttctttctcttgcctgattgccctggccaaaacttccaacactatgttgaataggtgtggtgagagagggcatccctgtcttgtgctgcttttcaaagggaatgcttccagtttttgcccattcagtatgatattggctgtgggtttgtcataaatagctcttattattttgagatatgtcccatcaatatctaatttattgagagtttttagcatgaagggctgttgaattttgtcaaaggccttttctgcatctattgagataatcatgtggtttttgtccttggttctgtttatatgctggattacatttattgatttgtgtatgttgaaccagccttgcatcccagggatgaagcccacttgatcatggtggataagctttttgatgtgctgctggattccgtttgccagcattttattgaggattttcacatcgatgttcatcagggatattggtctaaaattctctttttttgttgtgtctctgctaagctctggtagaattcggctgtgaatccatctggtcctggacttttttttggttggtatgctattaattattgcctcaacttcagagcctgttattgatgtattcagagattcaacttcttccttgtttagtcctgagagggtgtatgtgtccaggaatttatccatttcttctagattttctagtttatttgcatagaggtgtttatagtattctctgctgatagtttgtatttctgtgggattggtggtgatatcccctttatcattttttattgtgtctatttgattcttctctcttttcttctttattagtcttggtagtggtctatcaattttgttgatcttttcaaaaaaccagctcctggattcattgattttttgaaggcttttttgtgtctctatctccttcagttctactctgatcttagttatttcttgtcttctgctagcttttgaatgtgtttgctcttgcttctctatttcttttaattgtgatgctagggtgtcaatcttagatctttcctgctttctcttgtgcgcatttagtgctataaatttccctctacacactgccttaaatgtatgccagagattctggtatgttgtgtctatgttctcattggtttcaaagaacatctttatttctcccttcatttcattatgtacccagtagtcattcaggagcaggttgttcagtttccatgtagttaagcagttttgagtgagtttcttaatcttgagttctttctctctggctgcccttaacattttttccttcatttcaactttggtgaatctgacaattatgtgtcttggagttgctcttcttgaggagtatctttgtggcgttctctgtatttcctgaatttgaatgctggcctgccttgctaggttggggaaattctcccggataatatcctgcagagtgttttccaacctggttccattctccccgtcactatcaggtacaccaatcagacgtagatctggtcttttcacatagtcccatatttcttgtaggctttgttcgtttctttttactcttttttctctaaacttctcttctccctttatttcattcatttgactttcaatcacttctgaagccttcttctgtgaactcatcaaactcattctccgtccagctttgttccactgctggtgaggagctgcattcctttggagggagagagccactctgatttttagaattttcagcttttctgctatgttttttccccatctttgtggttttatgtaactttggtctttgatgatggtgacgtacagatggggttttggtgtggatgtcctttttgttgatgttgatgctattcctttctgtttgttagttttccttctaacagtcaggaccctcagctgcaggtctgttggagtttgctggaggtccactccagacgctgtttgcctgggtatcagcagcggaggccctccattactgactgactcttcacttataatccagctgtttggtttcttgataccttctaagccccactgtctcaatggctgggttaagatacttaaagtctgcctgcaggttccactaaaatcacaaccttgaattccttcctgtgttacatccaagaactctctcttggagtctggatcaatagcccattttccggcaacatctctgtagccagtgccatacat

SEQ ID NO: 128102 - DNA, 1989 bp, Homo sapiens; identical to SEQ ID NO: 117890

SEQ ID NO: 128103 - DNA, 1932 bp, Homo sapiens; identical to SEQ ID NO: 126823

SEQ ID NO: 128104 - DNA, 1578 bp, Homo sapiens; identical to SEQ ID NO: 122770

SEQ ID NO: 128105 - DNA, 1857 bp, Homo sapiens
atgcaagggtggttcaatgtacgcaaatcactaaatataatccatcacataaacagaaacaatgacaaaaaccacatcattatctcaatagatgcagaaaaggccttcgacaaaattcaacagcccttcatgctaaaaactctcaatgaactaggtattgatggaacgtatctcaatataataagaactatttatgacagacccgcagccaatatcatactgaatgtgcaaaaactggaagcattccctttgaaaacaggcacaagacaaggatgccctctcttaccactcctattcaacataatgttggaagtgctggccagggcaatcaggcaagagaaagaaatgaagggtattcaattaggaaaagaggaaattaaattttccctgtttgcagatgacatcattgtctatttagaaaaccccattttctcagccccaaatttccttaagctgataagcaacttaagcaaattctcaggatacaaaatcaatgtgcaaaaatcacaagcattcctatacatcataaacagacaaacagagagccaaatcatgagtgaactccgattcacaattgctaccaagagaataaaatacctaggaatccaccttacgagggatgtgaaggatctcttcaatgagaactacaaaccactgctcaatgaaataaaagaggacacaaacaaatggaagaacattccatgctcatggacaggaagtatcaatattgtgaaaacagccatactgcccaaagtaatttatagattcaatgccattcccatcaagctccaactgactttcttcacagaattggaaaaaactgctttgaagttcatgtggatacaaggctacagtaaccaaaacagcatggtactgactctgctggtgatacccaggaaaatgcggtctgcagtggaactccagcaaacttcaacagacctgcagctgagggacctgactgttagaaagaaaactaacaaacggaaagcaacagcatcaacttcacaaaaaggtcatctacaccaaaaccccatctgtaggtcaccaacatcaaagaccaaagaagtaggcttcagaaggtcggtaataacaaacttctctgagctaaaggaggatgttcgaacctatcacaaggaagctaaaaaccttgaaaacagattagatgaatggctaactagaataaacagtgtagagaagaccttaaatgacctgaaggagctgaaaaccatggcacgagatcttcatgatgcatgcacaagcttcaatagacgatttgatcaagtggaagaaagggtaacagtgactgaagatcaaattaatgaaataaatgatggagagaatggaaccaagttggaaaacactcctcaagatattatccaggagaacttccccaatctagcaaggcaggccaacattcaaattcaggaaatacagagaacactacaaagatactcctcgagaagagcaaccccaagacacataattatcagattcaccaaggttgaaatgaaggaaaaagtgttaaaggcagccagagagaaaggtcgagttacctacaaagggaagcccatcagactaacagcggatatctcggcagaaatcctacaagccagaagagagtgggggcccatattcaacattctcaaagaaaagaattttcaacccagaatttcatatccagccaaactaagcttcataagtgaaagagaaataaaatcctttacagacaagcaaatgctgagagattttgtcaccaccaggcctgccttacaagagctcctgaaggaagcactaaatatggaaaggaacaaccggtgccagcactgcaaaaacttgccaaattgtaaagaccattga

SEQ ID NO: 128106 - DNA, 1106 bp, Homo sapiens
aaatacaaactaccatcagagaatactataaacacctctatgcaaatgaactagaaaatctagaagaaatggataaattcctggacacatataccctcccaagactaaaccaggaagaaggtgaatctctgaatagaccaataacaggctctgaaattgaggcaataattaataacctaccaaccaaaaaaagtccaggaccagatggattcactgccaaattctaccagagcaccaacaataaaaaccacatgattatctcaatagatgcagaaaaggccttccacaaaattcaacagcctttcatgctaaaaactctcaataaactaggtattgatggaacttatctcaaaataataagagctatttatgacaaacccacagccaatatcatactgaatgggcaaaaactggaagcattccctttgaaaactggcacaagacagggatgccctctctcaccactcccattcaacatagtgttggaagttctggccagggcaatcaggcaggagaaagaaataaactgtattcaattacacaatgaggaagtcaaattgtctccatttgcagatgacatgattgcatatttagaaaaccccatcgtctcagcccaaaatctccttaagctgataagcaacttcagcaaagtctcaggatacaaaatcaatgtgcaaaaatcacaagcattcctatacaccattaacagacaaactgagagccaaatcatgagtgaactcccattcacaattgctacaaagagaataaagtacctaggaatccaacttacaagggatgtgaagtacctcttcaaggagaactacaaaccactgctcaatgaaataaaagaggatacaaacaaatggaagtacattccatgctcatggataggaagaatcaatatcgtgaaaatggccatactgcccaaagtaatttatagattcaatgccatccccattaagctaccaatgaccctttcttcacagaattggaaaaaaactactttaaagttcatatggaaccaaaaaagagcccgcattgccaagtcaatcctaagcaaaaagaacaaagctggaagcatcatgctacctgacttcaaactatag

SEQ ID NO: 128107 - DNA, 1063 bp, Homo sapiens
atgcaagggtggttcaatgtacgcaaatcactaaatataatccatcacataaacagaaacaatgacaaaaaccacatcattatctcaatagatgcagaaaaggccttcgacaaaattcaacagcccttcatgctaaaaactctcaatgaactaggtattgatggaacgtatctcaatataataagaactatttatgacagacccgcagccaatatcatactgaatgtgcaaaaactggaagcattccctttgaaaacaggcacaagacaaggatgccctctcttaccactcctattcaacataatgttggaagtgctggccagggcaatcaggcaagagaaagaaatgaagggtattcaattaggaaaagaggaaattaaattttccctgtttgcagatgacatcattgtctatttagaaaaccccattttctcagccccaaatttccttaagctgataagcaacttaagcaaattctcaggatacaaaatcaatgtgcaaaaatcacaagcattcctatacatcataaacagacaaacagagagccaaatcatgagtgaactccgattcacaattgctaccaagagaataaaatacctaggaatccaccttacgagggatgtgaaggatctcttcaatgagaactacaaaccactgctcaatgaaataaaagaggacacaaacaaatggaagaacattccatgctcatggacaggaagtatcaatattgtgaaaacagccatactgcccaaagtaatttatagattcaatgccattcccatcaagctccaactgactttcttcacagaattggaaaaaactgctttgaagttcatgtggatacaaggctacagtaaccaaaacagcatggtactgactctgctggtgatacccaggaaaatgcggtctgcagtggaactccagcaaacttcaacagacctgcagctgagggacctgactgttagaaagaaaactaacaaacggaaagcaacagcatcaacttcacaaaaaggtcatctacaccaaaaccccatctgtaggtcaccaacatcaaagaccaaag

SEQ ID NO: 128108 - DNA, 1014 bp, Homo sapiens; identical to SEQ ID NO: 118424

SEQ ID NO: 128109 - DNA, 1216 bp, Homo sapiens
tcatgatattgattcttctatccatgagcatggaatgttcttccatttgtttgtgtcctcttttatttcattgagcagtaatttgtagttctccttgaagaggtccttcacatcccttgtaaattggattcctaggtattttattctctttgtatcaattgtgaatgggagttcactcgtgatttggctctccatgtgtctgttattggtgtataggaatgcttgtgatttttgcaggttgattttgtatcttgagactttgctgaagttgcttatcagcttaaggagattttgggctgagacgatggagttttctaaatagacaatcatgtcatctgcaaacagagacaatttgacttcctcttttcctaattgaataccttttatttctttcttttgcctgattgtccctagtttattgagagtttttagcatgaagggctgttgagttttgtcgaaggccttttctgcatctattgagataatcatgtggtttttgtcattggtttggtttatgtgatggattacgtttattgatttgcattttttgaaccagcctttcatctcagggatgaagccgacttgatcgtggtggataagcttttcgatgggctgccggattcggtttgccagtattttattgaggatttttgcatcgatgttcttcagggatattggtctaaaattctctttttttgttgtgtctctgccaggttttggtatcaagatgatgctagcctcataaaatgagttagggaggattccctctttttctattgattggaatagtttcagaaggaatgataccaactcctctttgtacctctcgtagaatttggctgtgaatccatctggtcctggactttttttggttggtaggctattaattattgcctcaatttcagagcccattattggtctattcagagattcaacttcttcctgctttagtcttgggagggtgtatgtgtccaggaatttatccatttcttctagattttttagtttatttgcatagaggtgtttatggtattctctgatggtaatttgtatttctgttaattgatgcagtttcttcatagcattgatgttctttacaatttggcaggtttttgcagtggctggtaccagttgttcctttccatgtttagtgcttcctttaggaactcttgtaacacaggcctggtggtgacaaaatctctgagcatttgcttgt

SEQ ID NO: 128110 - DNA, 1518 bp, Homo sapiens; identical to SEQ ID NO: 120944

SEQ ID NO: 128111 - DNA, 1596 bp, Homo sapiens
tcatttttggttccatatgaactttaaagtagttttctccaattctgtgaagaaagtcattggtagcttgatggggatggcattgaatctataaattaccttggccagtatggccattttcatgatattgattcttcctatccatgagcatggcatattcttccatttgtttgtatcctcttttatttccttgagcagtggtttgtagttctccttgaagaggtccttcacatcccttgtaagttggattcctaggtattttattctccttctggcaattgtgaatgggaattcattcatgatttggctctctctttgtctgttattgatgtataggaatacttgtgatttttgcacattgattttgtatcctgagactttgctgaagttgcttatcagcttaaagagatttggggctgagacgatggggttttctaaatatacaatcatgtcctctgcaaacagggacaatctgactttctcttttcctaattgaatacactttatgtctttctcttgcctgattgccctggccagaacttccaatgctatgttgaataggagtggtgagagaggacatccttgtcttgtcctgtcttttaaagggaatgcttccagtttttgcccattcagtatgatactggctgtggatttgtcataaatagctcttattattttgagatacgtcccatcaatacctagttttttgagagtttttagcatgaagggctgttgaattttgtcaaaggccttttctgcatctattgagataatcatgtggtttttgtcattggttctgtttatgtgatggattacgtttattgatttgcatatgttgaaccagccttgcatcccagagatgaagccaacttgatcatggtggataagctttttgatgtgctgctggattcggtttgccagtattttattgaggattttcacatcgatgttcatcagggatattggtctaaatttctctttttgttgttgttgtgtctctgccaggcttctgaagcctacttctgtcagctcgtcaaagtcattctccatccagctttgttccattactggtgaggagctgtgatcctttggaggagaaaaggcactctggtttttagaattttcagcttttctgctctggtttctccccatctttgtggttttatctacgtttggtctttgatattggtgacctacagatggggttttggtgtggatgtcctttttttttgatgttgatgctattcctttctgtttgttcgttgtccttctgacagtcaggtccctcagctgcaggtctgttggagtttgctggaggtccactccagactgtgtttgcctgggtatcaccagcggaggttgtagaaatgtttctacagggctgaaggaaaccattttatatgagctatcatcatttgaaatggcactgatgaaagtctggactatggtgaggacttcagcttccccggtgggggatgtgtttgggagaggatggtctccctttcccacttccacagttggggcactcacagtgtttggggtgtctcctgggtcctgcaggagcagtccgcttccttcagagcgtctgtgggtcat

SEQ ID NO: 128112 - DNA, 1128 bp, Homo sapiens
atgaagcgagaagagaagtttagagaaaaaagagtaaaaagaaatgaacaaagcctccaagaaatatgggactatgagaaaagaccaagtctgcctctgattggtgtacctgaaagtgacggggagaatggaaccaagttggaaaacactcttcaggatattatccaggacaacttccccaatctaggaaggcaggccaacattcaaattcaggaaatacagataatgccacaaagatactcctcaaggagagcaactccaagacacataattgtcagattcaccaaagttaaaatgaaggaaaaaatattaagggcagccagagagaaagaaatacagactaccatcagcgaatactataaacatctctacgcaaataaactagaaaatctagaagaaatgggtaaattactggacacatacaccctcccaagacaaaaccaggaagaagttgaatccctgaatagaccaatagcaggctctgaaattgaggcaataattaatagcctgccaaccaaaaaaagtccaggaccagacggattcacagccaaattctaccagaggcacaaagaggagctggtaccattccttctgaaacaattccaatcaatggaaaaagaggtaatcctcccaaactcattttatgaagccagcatcatcctgataccaaagcctggcagagacacaacagaaaaagagaattttacaccgatatccctgatgatcattgatgcaaaaatcctcaataaaatactggcaaaccgaatccagcagcacatcaaaaagcttatccaccaagatcaagttggcttcatctctgggatgcaaggctggttcaacgaacacaaatcagtaaacgtaattcatcatataaacagaaccaaagacagaaaccacatgattatctcagtagatgcagaaaaggccttcaacaaaattcagcagcccttcatgctaaaaactctcaataaactaggaatccaacttacaagggatgtgaaggaccccttcaaggagaactacaaaccactgctcaatgaaataaaagaggatacaaacaaatggaagaacattccatactcatggataggaagaatcaatatcgtggaaatagccatactgcccaag

SEQ ID NO: 128113 - DNA, 918 bp, Homo sapiens
atgcaagcctggttcaagatatgtaaatcaataaacataatccatcacataaacagaaccaacgacaaaaaccacgtgaatatctcaatagatgcagaaaaggcctttgacaaaattcaacagcccttcatgctaaaaactctcaataaactaggtattgatggaacgtatctcaaaataataagagctatttatgacaaacccacagccaatatcataatgaatggacaaaaactggaagcaatccctttgaaaaccagcacaagacaaggatgccctctctcaccgctcctattcaacatagtattggatgttccggcaagagcaatcaggcaagagaaagaaataaagggtattcaattaggaaaagaggaagtcaaattgtctctgtttgcagaggacatgaatgtatatttagaaaaacccatcgtctcagccccaaatctccttaagctgatatgcaacttcagcaaagccttaggatacaaaatcaatgtgcaaaaatcacaggcattcctatacaccaataatagacaaacagagagccaaatcatgagtgaacttctattcacaattgctacaaagagaataaaatacctaagaatccaacttacaagggatgtgaaggacctcttcaaggagaagtacaaaccactgctcaaggaaataagagaggacacaaacaaatggaacaacattccatgctcattgttaggaagaatcaatactgtgaaaatggccatactgcccaaaattgacccaacattaagaaagcatcgagaacagttggtcattgaagttggacgaaaactagacaaagctcagatgattcgttgtgaggagcgaactggatatttttcctcaactgatttgggtagaactgccagccattactatattaaatacaacaccattgag

SEQ ID NO: 128114 - DNA, 3309 bp, Homo sapiens
tcatgtccttcgcccactttttgatggggttgtttttttcttgtaaatttgtttgagttcattgtagattctggatattagtcctttgtcagatgagtaggttgcggaaattttctcccattttgtaggttgcctgttcactctgatggtagtttcttttgctgtgcagaagctctttagtttaattagatcccatttgtcaattttggcttttgttgccattgcttttggtgttttagacatgaagtccttgcccatgcctatgtcctgaatggtattgcctaggttttcttctagggtttttatggtttcaggtctaacatgtaagtctttaatccatcttgaattaatttttgtataaggtgtaaggaagggatccagtttcagctttctacatatggctagccagttttcccagcaccatttattaaatagggaatcctttccccattgctggtttttgtcaggtttgtcaaagatcagatggttgtagatatgcggcattatttctgagggttctgttctgttccattgatctatatctctgttttggtaccagtaccatgctgttttggttactgtagcattgtagtatagtttgaagtcaggtagcgtgatgcctctggctttgttcttttggcttaggattgacttggcgatgcgggctcttttttgattccacatgaactttaaagtagttttttccaattctgtgaagaaagtcattggtagcttgatgggggtggcattgaatctgtaaattaccttgggcagtatggccattttcacaatattgactcttcctacccatgagcatggagtgttcttccatttgtttgtatcctcttttatttcattgagcagtggtttgtagttctgcttgaaaaggtccttcacatcccttgtaagttggattcctaagtattttattctctttgaagcaattgtgaatgggagttcactcatgatttcgctctctgtttgtctgttattggtgtataagaatgcttgtgagttttgtacattgattttgtatcctgagactttgctgaagttgcttatcagcttaaggagattttgggctgagacaatggggttttctagatatacaatcatgtcatctgcaaacagggacaatttgacttcctcttttcctaattgaataccctttatttccttctcctgcctaattgccctggccagaacttccaacactaatttattgagagtttttagcatgaagggctgttgaattttgtcaaaggccttttctgcatctattgagataatcatgtggtttttgtctttggttctgtttatatgctggattacatttattgatttgcgtatgttgaaccagccttgcatcccagggatgaagcccacttgatcatggtggataagctttttgatgtgctgctggattcggtttgctagtattttattgaggatttttgcatcaatgttcatcaaggatattggtctagaattctcttttttggttgtgtctctgcccggctttggtatcaggatgatgctggcctcataaaatgagttagggaggattctctctttttctattgattggaatagtttcagaaggaatggtaccagttcctccttgtacctctggtagaattcagctgtgaatccatctggtcctggactctttttggttggtaagctattgattattgtcacaatttcagatcctgttattggtcttctgctagcttttgaatgtgtttgctcttgcttttctagttcttttaattgtgatgttagggtgtcaattttggatctttcctgctttctcttgtgggcatttagtgctataaatttccctctacacactgctttgaatgtgtcccagagattctggtatgttgggtctttgttctcgttggtttcaaagaacatctttatttctgccttcatttcgttatgtacccagtagtcactcaggagcaggttgttcagtttccatgtagttgagcggttttgagtgagtttcttagtcctgagttctagtttgattgcactgtggtctgagagacagtttgttgtagtttctgttcttttacatttgctgaggagtgctttacttccaactatgtggtcaattttggaataggtgtggtgtggtgcttcactcattacatttaatgtgtcttgttttccatctccttcttgtgactggcctggatctagtgaagtctgagaaaggctaacttctgctgataactggtcaagactttgataacttttctcataccactgtttattgtgttttcggtaaagcaacgtatccaaggcaacagcattgacatccagagctcctggagaaggccactggttggtgagatgggcagttaactcttgtctcgatcttaaatcattattctttagcacagtcctgtgaatattaagatggtgagtgcttttgtcttcactgttctgcctcgccattcctgtaagagggtgcacagagcacagcctgcactgccccgcctgagtgttttgccagtgacctgggagcagtttagcttccccagcacagctggtgttcaacccttctgcttgagggagccccatggcctggaacacttgggacagccccgcaatttcagcacagaaagcttggaacaaatctagctggttaggtctgttcagctgatcttgaagctccacaattatatattctaattgttccttctccagtttatgagccagatcggaatcttcaatcctttgaagtagtattttattctgggagacagattcagatagttggttctctcgaagtcgtaagagttcttcaaggtaacccttctgttccagggtaagctgatacttttgtttaactctcttacacttgttgaaccaactgttctcatccatgaggaaaggaggtccgacattctctggagtactgctttcgctaccactgcttcccaaagtccttagctcctcctcatcactgctgatactatcagaacaatgtgacaaactgctgagaagtgaattgtcagagagcccctctgcccctgcaaacctgggcaattctgccaatagtaatctggaaacatcctgtgggcagagcaccaggtggtcagcttgtgcagctgggctcacattgcccccaaacctgagctgaagcagtgggtgcgatactcgttgtgcagattcagggaatctcagcccttgtgtcactgcatcaccagattccccacaaacatttctcagagtcttctctgaatcagcagtgtaaaagggttcccctttctccatacccttgccagcattcat

SEQ ID NO: 128115 - DNA, 590 bp, Homo sapiens
atgcccataggaaaagtgggagagtactacatcaagggaacactccgtgcgacaaaagagtctgaacaacagtcttcagccctagaactttcctctgacagagtctacctaaatgagaaggaaccaggagaccaaccctggaatgctgcatttgtcttccgaggctgcggtgtggctctcgcactgcggccgcctcaccttggctggggagaacctcggtgggcaggattcagaggggcttttggtttcccgttttccacactgaacccttctaactggtctctgaccctgattattcagggctgcaaacaggaaggattttattcaccgtcgatgcggccccgagttgtcccaaagcgaggcagtgcccccaaggtccgtgctgaggagaacgctgctctgccttcgcgttgtccccctggacccctgcctgtggcacaaccaaggggcctgctgatgggggctcatgtgagcagtgccccagctgtgggtgtgggtgctgccagctgccaccgcctttgccctggtttcccagatagaccccgacccacactccgaagctgtatcatgaacgctgtggtgggcggctg

SEQ ID NO: 128116 - DNA, 777 bp, Homo sapiens
atgttcgtgtggagcaatgtggaaggtcactctgtggccatgttcccctggtactccatccccttcctgaaccctccctgcagccacacgaggcccagcaacctgccagtcactcagtggcctccaaccagagaaaacaacctgccaagttggcagctgttgctcacgagcatccaccaggcccagttcctcagtgccctgcacaaggaacagggctcatcttctgagaaggatggacgcagccccaacaaatgggacaaggaccacatccggtgtcccatgagtggcggtcatgatcttcagcaagcggcaccaggccctggcagggcacaccagggtcaccccaaccaggataactggaccgtcagccagatgctgagcaagtggtggtacaccctggggcccaatgagaggcagaaataccatgaactggccttccaggccacagccgccctccaggcccactatgtacacatcttcccctccaagggccgctgggagctgctgcatgggtcccagaggctggactggggcaggtgccaactgaagctgctggggcagcaagggcaggatgttctgcacacaaaccttggaaaagaagaaaatagttcctgctggggctacaagatggagtgtgaagagggctttgggccacagggaggcgactgtggactagggggagttcatgcaccccttctttccccagaggggctggactcagaacagaacacgttgatcatgggcgatatttttcattgtgccaaaaagttgccatga

SEQ ID NO: 128117 - DNA, 753 bp, Homo sapiens
atgcctgaaagctttgcaatttacatcgaggacgtgaatgagtgtgcagagaaccctggcgtctgcactaacggcgtctgtgtcaacaccgatggatccttccgctgtgagtgtccctttggctacagcctggacttcactggcatcaactgtgtggatgtagatgaatgccgtatgcttgctcacctgtgtgctcatggggagtgcatcaacagccttggctccttccgctgccactgtcaggccgggtacacaccggatgctactgctactacctgcctggaccctatagttgtaaaagaacaagggcgcaaggaacaggactcatcttctgagaaggatggacgcagccccaacaaatcagacaaggaccacatccggtggcccatgagtggcgctcatgatcttcagcaggcggcaccaggccctggcggggcgcaccagggtcatcccaaccaggataaccggaccgtcagccagatgctgagcgagcggtggtacaccctggggcccaatgagatgcagaaatacaacctggccttccagcacatggccagcgaggtcatagcgagtgacgaagagcacacggtcatccatgaggaggaaggggctgactaccagatcctgtgtggaaatcaggccccgggattcctcactgacatccacacggggaagccccttgggtgttggatgtgcaacgtggccaaccgatgccccaagcttcgtacgtggcaaaccgtcgtgcctctctag

SEQ ID NO: 128118 - DNA, 2484 bp, Homo sapiens
ctatccgcgccgccgtcctagccgtgccggcgtccttgccgggcccgccgtccttgccgggccgccgtcctcgccgggccgccgtcctcgccgcgccgcgttcttcgccgagccgccgttctcggcgcgccgtagtcctcgccgcgccgccgtcctcgccgttccgccgtcctcgccgcgccgccgtcctcgccgcgccgccgtcctcgccgcgccgcgcgtcctcgccgcgccgccgtcctcgccgcgccgccgtcctcgccgcgccgccgtcctcgccgcgccgccgtcctcgccgcgccgctgccgggtctctcccgggggctgagctcccgcagagctcgcgcctagccgcacacctcgactgctgattagcccgacagctgaatagcggcgggagcagttccacgtggctgggaaggcctcacaatcatggcggaaggcaaggaggagcaagtcacattttacgtggatggcagcagacaaagagcttatgcagaaaaacctccagttgtaaaaaccatccgatcttgcactgttttggtcacagccgtcacaattcttcgtctggaatgtaatatctcctaatagtcctatccattccaattcactttccagattccttctttgctccaagctgcactctggctttgcctttgagtcacgtggcatttctttgtacgatgaccggttctgtcgagtaggcactgcttcagccctggtggcctgttctctctgtccctccagagtgccggctgcccggcaggctcccttcaggctgagttcgtggccctgccccctggtggccagagccggcttcacaggacaagagccagctaagttccaggggctttccaggaaaagtgtcccttggaaagggtatggccttttcacccctccaaacagcaccctagaaatggcttggcctttcccctcccctgagctccacagagaacacagccagcagaggacacacttccccgtcatccagaaatgggtttgattctcagccaagggacagcaggactggtagagagtgtcaggccacacagctgcctgcacagcactcccatgcggaggtcttgcactttggaggggcaatgtcgggacagctttctcttgttgggccacaagactccaagaggacagcacggttgactgattcccagcacttggggagcccaacgtaacagccaccaggcctgacagaaggaacatcgctcgaacaaggatgatgaagctaaatgggatggatggttggagtgatcgccggagccccctctgggtggtcaggaagctcaggaccctctgaagggacccctttattttcttctcctgcctgattgccctggccagaacttccaacactatgttgaataggagtggtgagagagggcatccctgtcttgtgccagttttcaaagggaatgcttccagtttttgctcattcagcataatgttggctgtgggtttgtcataaatagctcttattattttgagatacgtcccatcaatacctaatttatggagggtttttagcatgaagggctgttgaattttgtcaaaggccttttctgcatctattgagataatcatgtggtttttgtctttggttctgtttctatgctggattacatttattgatttgcgtgtgttgaaccagccttgcatcccagggatgaagcccactcgatcatggtggataagctttttgatgtgctgctggatttggtttgccagtattttattgaggatttttgcatcaatgttcatcaaggatattggtctaaaattctctttttttgttgtgtctctgccaggctttggtatcaggatgatgctggccttataaaatgatttcgggaggattccctctttttctattgattggaatagtttcagaaggaatagtaccagctcctccttgtacctctggtagaattcgactgtgaatccttctggtcctggactttttttggttggtaggctgttaactattgcctcaattttagagcctgttattgatctgttgagggattcaacttcttcttggtttagtcttgggagggtgtatgtgtccaggaatttatcgatttcttttagattttctactttatttgcgtagaggtgtttataatattctctgatggtagtttgtatttctgtgggattggtggtgatatcccctttatcattttttattgtgtctatttgattcttctctcttttcttctctattagtatactggtcccatagggctggccagcatctccccctggccaacatggccacctgcatccccaatgccacaggagccccctgctcccatgaggcggtgcatgcctgttgttgatcatgacgtgcatgatggtcttgggcgtgacaccaaccatgaggtcccacacggtcttgttgacaatggccgcgtaggagtccaccaggttctgcgtggtttccatttgccgctccagctgtgggtccat

SEQ ID NO: 128119 - DNA, 1235 bp, Homo sapiens; identical to SEQ ID NO: 118425

SEQ ID NO: 128120 - DNA, 2715 bp, Homo sapiens
atggggaaaaaacagagcagaaaaacaggaaaccctagaaagcagagcacctctcttcctccaaaggaacacagctcctcaccagtaacagaacaaagctggacggagaatgactttgacgagttgagagaagaaggcttcagacgatcaaactactctgagctacaggaggaaattcaaaccaatggcaaagaagttaaaaactttgaaaaaaaattagacgaatggataactagaataaccaatgcagagaagtccttaaaggagctgatggagctgaaagccaaggaaacccatctcacatgcggagacacacataggctcaaaataaagggatgcaggaagatctaccaagcaaatggaaaacaaaaaaaggcaggggttgcaatcctagtctctgataaaacagactttaaaccaacaaagatcaaaagagacaaagaaggccattacataatggtaaagggatcaattcaacaagaagaactaactatcctaaatacatatgcacccaataaaggagcatccagattcataaagcaagtccttagtgacctacaaagagactttgacttccacacaataataattgaagactttaacactccactgtcatcattagacagatcaacaagacagaaagttaacaaggatatccaggaattgaactcagctctgcaccaagcagacctaatagacatatacaaaactctccaccccaaatcaacagaatatacatttttttcagcaccacatcacacctattccaaaactgaccacatagttggaagtaaagcactcctcagcaaatgtaaaagaacagaaattataacaaactgtctctcagaccacagtgcaatcaaactagaactcaggattaagaaacccactcaaaaccgctccactacatggaaactgaacaacctgctcctgagtgactactgggtacctaatgaaatgaaggcagaaataaagatgttctttgaaaccaatgagaacaaagatacaacataccagaatctctgggatccattcaaagcagtgtataaagggaaatttatagcactaaatgcccacaagagaaagcaggaaagatccaaaattgacaccctaacatcacaattaaaagaagtagaaaagcaagagcaaataaattcaaaagctagcagaaggcaagaaataactaagatcaacaaaatagatagactgctagccagactaataaagaagaaaagagagaagaatcaaatagatgcaataaaaaataatacaggggatatcaccactgattccacagaaatacaaactaccatgagagaatactataaacacctctacgcaaataaactagaaaacctagaagaaatggataaattcctggacacatacaacttcccaagtctaaaccaggaagaagtcgaatccttcaatagaccaataacaagttctgaaattgaggcagtaattaatagcctaccaatcaaaaaaagtccaggaacagacagattcacaagtaaattttaccagaggtataaaaaggaggtggtaccattccttctgaaattattccaaacaatagaaaaagagggaatcctccctaattcattttatgaggccagcatcatcctgatgccaaaacctggcagagacaaaaccaaaaaagagaattttagaccaatatccttgatgaacattgatgcaaaaatcctcaataaaatattggcaaaccgaatccagcagcacatcaaaaagcttatccaccatgctcaagtgggcttcatccctgggatgcaaggctggttcaacatacgcaaatcaataaatgtaatccagcatataaacagaaccaaagacaaaaaccacatgattatctcaatagatgcagaaaaggccttcgacaaaattcaacagcccttcatgctaaaaactgtcaataaactagagaataagatacataggaatccaacttacaagggatgtgaagaacctcttcaaggagaactacaaaccagtgctcaacaaaataaaaaaggatacaaacaaatggaaaaacatttcacactcatgggtaggaagaatcaatatcgtgaaaatggacatattgcccaagtgagggtaaagaggggcttctcttcccagcaggcattgagtgaagaaggatcctacacctgcagactatggagagcccagggcagagctgggagaagtcggttagagctggatgaggagtgggctggagagagaccgggtgtgggccaaggagaggcagttctgcccaatacccgaaaaagacatccggcttccgtggcttttttagaagagggttgtaggtgtgggaagccttacggaactgaatccaaggaacaatgcacactccagcccagatattgcccttgtcccacggtctttgcaacctgcagaccaggagattcccttcggtgcctaccccaccagggccctgtgtttcaagcacaaaactgggcggccgtttgggcagacacagaagtagctgcaggagttgttgttgttgtttttttcccataccccagtggtgcctggaacgccagtgagacagagccgttcattcccctggaaaggggtgctgaagccccaggaagccaagtggtctggatcggcgggtcccacccccatggagcccagcaaactaagatccactggctggaaattctcgctgccagcacagcagcagtctga

SEQ ID NO: 128121 - DNA, 1304 bp, Homo sapiens
aaatacaaactaccatcagagaatactataaacacctctatgcaaataaactagaaaatttagaagaaatggataaattccttgacacatacaccctcccaagactaaatcaggaagaagtagaatctcttaatagaccaataacaggctctgaaattgaggcaataattaacagcttaccaaccaaaaaaagtccaggaccagatggattcacagccgaattctaccagaggtataaggaggagctgaccaatatccttgatgaacatcgatgcaaaatcctcaataaaatactggcaaatggaatccagcacgacatcaaaaagcttatccacgatgatcaagtgggcttcatccctgggatgcaaggctggttcaacatacgcaaatcaataaacgtaatccagcatgtaaatagaaccagagacaaaaaccacatgattatctcaatagatgcagaaaaggcctttgacaaaattcaacagcccttcatgctaaaaactctcaataaattaggtattgatgggatgtatctcaaaataataagagctatgtatgacaaacccacagccaatatcatactgaatgggcaaagactggaagcattccctttgaaaactggcacaagacagggatgccctctctcaccactcctattcaacatagtgttggaagttctggccagggcaatcgggcaagagaaagaaataaagggtattcaattaggaaaagaggaagtcaaattgtccctgtctgcagatgacatgattgtatatctagaaaaacccatcatctcagcccaaaatctctttaagctgataagcaacttcagcaaactctcaggatacaaaatcaatgtgcaaaaatcacaagcattcttatacaccaataatagacaaacagagagccaaatcatgagtgaactcccattcacaattgctacaaagagagtaaaatacctaggaatccaacttacaagggatgtgaaggacctcttcaaggagaactacaaaccactgctcaatgaaataaaagaggacacaaacaaatggaagaacattccatgctcatggataggaagaatcaatattgtgaaaatggccatactgcccaagtgcaaaactgttgggttattgagtaatatctcaacccacaaaagtgcagtgcatgctttggtagaagcgggaggcattccatctctaatcaacctactggtttgtgatgagcctgaagtacactctcgctgtgctgtcattctatatgatattgctcaatgtgaaaacaaggatgttattgccaaatat

SEQ ID NO: 128122 - DNA, 1158 bp, Homo sapiens
atgttcgtgtggaggaatgtggaaggtcactctgtggccgtgttcccctggtactccatccccttcctgacccctccctgcagccacatgaggcccagcaaactgccagtcactcagtggcctccaaccagagaaaacaacctgccaagttggcagctgttgctcatgagcgtccaccaggcccagtccctcagtgccctgcgcaaggaacaggactcatcttctgagaaggatggacgcagccccaacaaatgggacaaggaccacatctggtggcccatgagtggcagtcataatcttcagcaagcagcaccaggccctggcagggcgcaccagggtcaccccaaccaggataaccggaccatcagccagatgctgagcgagcaatggtacaccctggggcccaatgagatgcagaaatacgacctggccttccagaacgtagaggcccggatccgctacgtcatcgtccgcggaaacgagcaaggtttctttcgcatgcatcacctccgtggcgtcagctccctgcagctggggcggaggcgtccggggcctggaacctaccggctggaggtggttgacatgattacaatcgatgctcggtaccggtgttcaggactgaggtctccaccagaccccgaccatctgaaatctgtggacttacacaggaatgaacacttctttctgcaaaaagccaggtgggaaatacatttggttttgcaggccacaccatctcagatacaactactccatgtggcctttgtactagcaaagcagccattgaggtgccggaagcagacactcttcctcatatctgtagttggcacaaaggagaagaatgtggcctccgagggccggaacccagttcgccccctccgcggccatcgctggctgcccgcgtctccgccggccgcggagcacttcgcaggcggcgccgaccggaagtcccgcctctcccgcgcgccccggagcgccgcgacagctacgccggccaatgagcagcgcgccgtggcggacgtcggccaatgggctcgcgcgcggggggggcgtgtccgggccgcgggccggagcggcctactccgagtgaagatgatgaagatgaagaccgttatgatccacttccacttaatgaaagatgaatatattttctcttcctaa

SEQ ID NO: 128123 - DNA, 1584 bp, Homo sapiens
tcagatgaggtaagatggaagctggtttcctcttgtgtcaacttgggcaatggggatagtcagtctagtgaacatgttgtaactgactcctagtttactgagagtttttagcatgaagggcagttgaattttgtcgaaggccttttctgcatctattgagataatcatgtggtttttgtctttggttctgtttatatgatggattatgtttattgatttgggtatgttgaaccagccttgcatcccagggatgaggcccacttgatcgtggtggataacctttttgatgtgctgctggatttggtttgccagtattttactgaagttttttgcatcaatgttcatcaggaatattggtctaaaattctctttttttgttgttgtatctctgccaggctttcgtatcaggatgatgctggcctcataaaatgagtcagggaggattacctctttttctattgattggaatagtttcagaaggaatggtaccagctcctctttgtacctctggtggaatttggctgtgaatctgtctggtcctggactttttttggttagtaggcttttaattattgcctcaatttcagagtgtgttattggtgtattcagggattcaacttcttccaggtttagtcttgggagagtgtatgtgtacaggaatgtatccatttcttctagattttctagtttatctgcatagtggtgtttatagtattctctgatgggagtttgtatcttttcttgccttctgctagcttttgaatgtgtttgctcttgcttctctagttcttttaattgtgatgttagggtgcccattttagatcttccctgctttctcttgtgggcatttagtgctataaatttccctctacacactgctttaaatgtgtcccagagattctggtatgttgtgtctttgttctcattggcttcaaagaacatctttatttctgccttcatttcgttatgtacccagtagtcattcaggaacaggttgttcagtttccatgtagttgagcggttttgagtgagtttcttaaacctgagttgtcgtttgattgcactgtggtctgagagacagtttgttataatttctgttcttttacatttgctgaggagtgctttacttccacctatgtggtcaattttggaataagtgagatgtggtgaaacggggttttggtgtggatgtcctttctgtttgttagttttccttctaacagtcaggaccctgagctgcaggtctgttggagtttgctggacgtccactgcagacactgtttgcctgggtatcaccagtggaggtgctccattaatccaagaagcataatcactacaaaggaaagcagcaagatttgcgagttcttctacagtccccaggcgaccacagggaattctgccaatcatttctttctcaaatgttccagttgggtccagacggctaaaggcacctttggtttttataggccctggttgaatcacattgaatcgcattccatatttaccccattcagctgcaagagaccccttcacttggaacacattctctttcctgctgccctgtgaagaggtgccttccaccat

SEQ ID NO: 128124 - DNA, 1443 bp, Homo sapiens
atggggagaaaccagagcagaaaagctgaaaattctaaaaaccagcacacgtcttctcctccaaaggaacgcaggtccttgccagcaatggaacaaagctggacagagaatgactttgacgagttgagagaagaaggcttcagtagccaatttgatcaagtggaagaaagggtatcagtgattgaagatcaaatgagtgaaatgaagcgaaaagagaactttagagaaaaaagagtaaaaagaaatgaacaaagcctccaagaattatggcactatgtgaaaagaccaaatctacgtcggattggtgtgcctgaaagtgacggggagaatggaaccaagttggaaaacactcttcaggatattatccaggagaacctccccaacctacctggcagagacacaacaaaaaaagagaattttagaccaatatccctgatgaacattgatgcaaaaatcctcaataaaatactggcaaaccaaatccagcagcacatcaaaacgtttatccaccgcgatcaagttggcttcatccctgggatgcaaggctggttcaacatacacaaatcagtaaacgtaatccatcatataaacagaaccaaagacaaaaaccacatgattatctcaatagatgcagaaaaggccttcgacaaaattcaacaacacttcatgctaaaaactctcaataaactaggtattgatggaatgtatctcaaaatagtaagagctatttatgacaaacttacagccaatatcatactgaatgggcaaaaactggacgcattccctttgaaaactggcacaagacagggatgccctctctcaccactcctattcaacacagtgttggaagttctggccagggcaatcaggcaggagaaagaaataaagggtattcaattaggaaaagaggaagtcaaattgtccctctttgcagatgacatgactgtatatttagaaaatcccatcgtctcagcccaaaatctccttaagctgataagcaacttcagcaaagtctcaggataccaaatcaatgtgcaaaaatcacaagcattcctaaacaccaatagcagacaaacaaagagccaaatcatgagtgaactcccattcacagttgctacaaagagaataaaatacctaggaatccaacttacaagggatgtgaaggacctcttcaaggagaactacaaaccactgctcaaggaaataaaagaggatacaaacaaatggaagaacattccatgctcatgggtaggaagaatcaatatcatgaaaatggccatactgctcaaggggatacgttgtaagatccccagtggatgcctgaaaccaaggatagtactgaaactgactgccgtcaatcagaacacatttctgtttatgtctcccatccacaaattcaatgccttttccatcttaacaaagcacttactatgggctgtggct

SEQ ID NO: 128125 - DNA, 459 bp, Homo sapiens
atgcttctctcaatagatgcagaaaaggccttcgacaaaattcagcagcccttcatgctaaaaactctcaataaactaggccatggctatgagcagcaccatctccacaccaccaatgacgtggatgaagaagatttgagcgatgcagcctccaaaggagatgactttgcgctttctgaacagtctcaagatgcacactttttacaaccagaagcctatggactgggtgagggagcagaaacagccacaggtactgcccatcagggtaatatgaaccagatccagtacggcatcactgcagacatacacacagagctgcataaaacaggaagagagctgctaatcacagccccagagggtagtggccaaagtgatgccttggagatccgagaatgccagactgagatcacacggcctggggaattaccgcctatggtcattttggttttcccgggatag

SEQ ID NO: 128126 - DNA, 3045 bp, Homo sapiens; identical to SEQ ID NO: 120951

SEQ ID NO: 128127 - DNA, 1794 bp, Homo sapiens
atgcaatgcttcctatggaacttggatgtggcccgcttccagagccactaccagtgggatgctcacgcttctcattgtttaagtgacagacatgtatatcaactgttcctgatatatggtaactgctcaatcaatgtcatcaacacctccaccaccatcaccatcaacactaccatcatcaccatcaccaccaccaccattaccacaaccactaccaccaccaccaccatcaccaccaacactgtcatcactatcatcaccatcaccaccacgaccaccattagtatcaccatcaacactaccatcaccacaaccatcatcgccacaaccactactgccaccatcatcatcaccaccatcactaccatcaccaccaccaccatcaccaccattaccatcaccatcaccatcagcaataccatcactaccaccaccatcaccacaaccactgccaccaccaccaccatcatcaccaccaccatcactaccatcaccactattaccaccaccaccactatcatcatcaccatcatcacctctatcaccatcaccaccaccaccatcaccaccaccatcactaccaccatcacccccaccatcaccaccaccaccaccacctccacaaccaccatcaccaccatcatcaccactatcatcaccaccattatcatcatcacaaccatcactattaccaccatcactgtcatcattaccactaccatcatcaccatcaccactactaccactatcattaccactatcaatatcaccaccatgactatctttactatcaccactaccaccatcaccatcactaccaccatcatcattccaatcgacttaaaccataggacaatgcttttctttgggatgtggcatgtggctccttgtacctacctagcacttgcaggaaacaccttaatggcatggcccctgatgtctgcgtccagcaaggcctctggtggtgtcagcatgtttgtgtggaggaatgtggaaccttgctctgtggctgtgttctcctggtactctgtccccttcctgacccctccctgcagccgcgtgaggcccagcaacctgccagtcactcagtggcctccaaccagagcaaagaacctgccaagtcggcagctgttgctcacgagtgtccaccaggcccagtccctcagtgccctgtgcaaggaacaggactcatcttctgagaaggatggacgcagccccaacaaatgggacaaggaccacatctggtggcccatgagtggcggtcacgatcttcagcaagcggcaccaggccctggcagggcgcaccagggtcacccctaccaggataactggaccatcagccagatcctgagcgagcggtggtacaccctggggcccaatgagatgcagaagtaccacgacctggccttccagcacatggccggtgaggacatagcgagtgacgaggagcacatggtcatccatgaggaggagggggtgatggtgtcattgctgatgacggctttagcaccactgacactgatctcaagttcaaggatttttggcaaagtctatggtcccaccccgtcctcctcctacacatactcggatgcttcctcctcaaccttggcacccacctccttcttactgggcccaggagccttcaaagcccaggagtctggtgaagaagccgaggacgggctcagggaactggagaccgagaaggcgctgtcctcttcactgcacgcgccctggaccagtgctggccctgatcatgcagctcttccaggcccactgcttcttcctgtccactag

SEQ ID NO: 128128 - DNA, 2499 bp, Homo sapiens
atgcttctctcaatagatgcagaaaaggccttcgacaaaattcagcagcccttcatgctaaaaaccctcaataaactaggccatggctatgagcagcaccatctccacaccaccaatgacgtggatgaagaagatttgagcgatgcagcctccaaaggagatgactttgcgctttctgaacagtctcaagatgcacactttttacaaccagaagcctatggactgggtgagggagcagaaacagccacaggtactgcccatcagggtaatcatgttcgtgtggaggaatgtggaaggtcactctgcggctgtgttcccctggtactccatccccttcctgacccctccctgcagccacacgaggcccagcaacctgccagtcactcagtggcctgcaaccagagaaaacaacctgccaagttgccagctgttgctcatgagcgtccaccaggtgggacagggagtgttgaccctgggcggccccctggagccacctgccctgaaagcccagggcccgcaaccccacacactttgggggtggtggaacctggtaaaagctcacctcccaccatggaggaggagccctgggcccctcaggggagtccctgctggacagcccagtccctcagtgccctgcgcaaggaacaggactcatcttctgagaaggatggacgcagccccaacaaatgggacaaggaccacatctggtggcccatgagtggcgctcatgatcttcagcaagcggcaccaggccctggcggggcgcaccagggtcaccccaaccaggataaccggaccgtcagccagatgctgagcgagcggtggtacaccctggggcccagtgagatgcagaaataccacgacctggccttccaggtgaaggtggcccacttgcaacaaggaccgaaagaagtccagctcagaggccaagcccacaagccaggggctagcaggagtgtaacaagggctcgtgggagcggagaatatcagagacgggcactgccactgcccctggggtgtcctctgaactccagtcagttgcagcccaaacacttcagagctcggataccaaggagcagcctctgtggggcagaatggctgcacacacacatggccagtgaggacacagcgagtgacgaggagcacacggtcatccatgaggaggagggggtgatgatgtcattgctgatgatggctttagcaccaccgacaccgatctcaagttcaaggagtggcttttggcagtctatggtcacaccctgtcctcctcctacacatactcggatgcttcctcctcaaccttggcgcccacctccttcttactgggcccaggagccttcaaagcccaggagtctggtcaacgcagcagagcgggccccctacggccccaacccctggggatgggggcccagggacgccttccaaggtggcctgtttcctcccaatggatcctgccaccttctggtggagaagccgaggacaggctcagggaaccggagaccgagaaggagctgtcctcttcactgcacgtgccctggaccagtgccggccctgatcatgcagctcttccaggcccactgcttcttcctgtccactaggccacagccgccctccaggcccactatgcacacatcttcccctccaagccctgtgggggtcctgaccgcacctcacctggctcagactcttgacgctgccctggctgccccaccactgcctctgcccgagagtcacccctgcctgaccccacctcaacctgctcaggctctggcacaaacctggctgccctgccactgcctctgccccagagttggggccttgacagcctggttggaaggggacaccccagccctgcctcaacacctgggggtctccataactaccacaggcagggctgcaaacagaaaggattttgttcaccgtcgatgctgccctgagttgtcccaaagcgaggccgtgcccccaagcacacactttctgagtgccgagtgtctccagcaggagaggggctctagttcccgggatcccaccctccacagaggacagcagcaccttgagggacagatgtgcaaagggcaagtcagcggttttgcagcaatagcattgcatgtgggttttaggctgatgatgctcaacagtggacaatcctcttcacctgcctgggccccactgcctgcccttccatacagtgcagggtcacagctgagctctctgagacacctcgcaggatctcggcttctgaactatcaagtgtcttccagggctacagtgaattacacactctggcatgggtttgcacgccacgtgctggaagccagcagtcatgcaggccatgctctcccacacttaggaaaacagcgcatgagaaagatctccatcaagttcacacagaatgacctccagcaagacctggaaaatgctcagttccacaaaatacctgtgtccaaatcctttcagtgcacagctctggcatcaggttcctgtgaggacagaccctga

SEQ ID NO: 128129 - DNA, 5099 bp, Homo sapiens
tcaccacactgacttccacaatggttgaactagtttacagtcccaccaacagtgtaaaagtgttcctatttctccacatcctgtccagcacctgttgtttcctgactttttaatgattgccattctaactggtgtgaggtggtatctcattgtggttttgatttgcatttctctgatggccagtgatggtgagcatcttttcatgtgttttttggctgcataaatgtcttcttttgagaagtgtctgttcacatccttcgcccacttgttgatggggttgtttgtttttttcttgtaaatttgtttgagttcattgtagattcttgatattagccctttgtcagatgagtaggttgtgaaaatgttctcccattctgtaggttgcctgttcactctgatggtagtttcttttgctgtgcagaagctctttagtttaattagatcccatttgtcaattttggcttttgttgccaattgcttttggtgttttagacatgaagtccttgcccatgcctatgtcctgaatgttattgcctaggttttcttctagagtttttacggttttaggtctaacatttaagtccttaatccatcttgaattactttttgtataaggtgtaaggaagggatccagtttcagctttctacatatggctagccagttttcccagcaccatttattaaatagggaatccttttccccattgcttgtttttgtcaggtttgtcaaagatcagatggttgtagacgtgtgatattatttccgggggctctattctgttccattggtctatatctctgttttggtaccagtaccattttgttttggttactgtaggcttgtagtatagtttgaagtcaggtagcatgatgtctccagctttgttctttttgtttaggattgtcttggctatgtgggctcttttttggttccatctgaactttaatgtagtttttttccaattctgtgaagaaagtcattggtagcttgatggggatggcattgaatctataaattaccttgggcagtatggccattttcacaatattgattcttcctatccatgagcatggaatgttcttccatttgtttgtgtcctcttttatttcgttgagcagtggtttgtagttctccttgaagaggtccttcacatcccctgtaagctggattcctaggtattttattctctttgaagcaattgtgaatgggagttcactcatgatttggctctctgttttttttattattggtgtataagaatgcttgtgatgttttgcacattgatttttgtatcctgagactttgctgaagttgcttatcagcttaaggagattttggggctgagacgatggggttttctagatatacaatcatgtcatctgcaaacagggacaatttgacttgctcttttcctaattgaataccctttatttctttctcttgcctgattgccctggccagaacttccaatactgtgttgaataggagtggtgagagagggcatccttgtcttgtgccagttttcaaagggaatgcttccaggttttgcccattcagtatgatattggctgtgggtttgtcataaatagctcttattattttgagatatgttccatcagtacctagtttattgagaatttttagcatgaagggctgttgaattttgtcgaaggccttttctgcatctattgagataatcatgtggtttttgtcactggttctgtttatgtgatggattacatttattgatttgcatatgttgaaccagccttgcatcccagggatgaagccaacttggtcatggtgaataagctttttgatgtgctgctggattctgtttaccaataatttttttgaggatttttgcatcaatgttcatcaaggatattggtctaaaattctcttttttggttttgtctgtgcccggctttggtatcaggatgatgctggcctcataaaatgagttagggaggattccctctttttctattgattggaatagtttcagaagagatggtaccagctcctccttgtacctcaggtagaactcggctttgaatccatctggtcctggactttttttggttggtaagctattaattattgcctcaatttcagagcctgttattggtctattcagagattcaacttcatcctggtttagtcttgggagggtgtatgtgtccaggaatttatacatttcttttaggttttctagtttatttgcatagaggtgtttatagtattctctgatggtagtttgtatttctgtgggatttatttcttgacttctgctagcttttgaatgtgtttgctcttgcttctctagttcttttaattgtgatgttagggtgtcaattttggatctttcctgctttctcttgtgggcatttagtgctataaatttccgtctgcacactgctttgaatgtgtcccagagattctggtatgttgtgtctttgttcttgttggtttcaaagaacatctttatttctgcttccatttcgttatgtacccagtagtcattcaggagcaggttgttcagtttccatgtagttgagtggttttgagtgagtttcttaatcctgagttctagtttgattgcactgtggtctgagagacagtttgttataatttctgttcttttacatttgctgaggagtgctttacttccaactatgtggtcaactttggagtatgtgtggtgctcacaacagtccccagtgtgtgatgttccccttcctgtgtccatgtgttctcgttcaattcccaccgaactgctgttgtccttagtatcttctagacgttccagaactgatgtcagatttggctcatcagagtccacagaccttatcggtgaagaagatgaataggattcctgctgcatccagggtacaatgcgcctttccagaacacagcagcgacccgggatagagggatcgctcaaacagcaccagaggctgcattccaacttttcctccatcaacgagtccgttttcattgttagtttctccttaaacacgattggctctggcaggtggggcgcgaaggtgagcccgtcgggagccgctgtgacggccgcaaccacccgcgggacctctcggcggtgctctcccagctccgcctctccctgctgcctcaactcttcatctcctcctggtcctgggccagcctgacgatgtcctcctctcccagtgctgcgtctttggcactgccccctggctgatgtactttcctgcagcttctccatggcctcctgcagggcccagtgggtgtccccacacacagattcacccccagtctctggggctggggccgctgcctctggctttttctgggatgaggccactgggtgagccaggggctggcagcacacgctttgctcctcctgggcactggctccagcggagttgaaaaatgccaccatggcctcccggctctccaggtcccctggaatgttcagcatgggccgaggtgcctcctcctcattgtccagatgtcctcctccatatccttccccagggagagccatgaggctcaactgggctttagctgctgtttctgctggctggtagcttccaggttctcctgctactaagcgaccacgaactgctgcaggtgacacaggtactggtcttgctgctgctgtggactctgagcctcttggctcttcagctccacgtgcaggaagacgctccccttcccagaggctggtgactgcctcccaaccattattagatgggtcagaggttaccgtctctttcagctcaccaagcttcagctcctttacttgccgctccaactgcagtgcactcttgttctcattattcagtgaattgatgttttcactgagttgactgattattgcggagcttgagtgcagggccactgctagttctcggtactggctgtgaggtgcatgcagagaggaggagttggaggaagattgtggggaggggtagagagaacaatcattagggctggtggagggtgtgggttgtctcagctccagatcctccagggtagcagatgatgcatggccttccccgtagatacctgttgctgaatccccaggtgagtggtaaccaccagaagtggctgtgtcagggctactgccattgattttctttttcctgttagctcctgctggaatgccagggctcttcctctgccaatattcttttaaagcatgtaacacaattgcacttttatattttaacaaattattttcccatattgaactgtaagtctcctgaaaggaggaattttgttcttgctcatcatcaactttttcaacatccagtgcaccatttagaagatgtttgtctttctttgtatcagtgctcagctgagtctgcagtgcttcagaggcagctttcattttataaaaatctatgatttctccttccagttgttttttctcttcctcgagcttccttatctcctcctgctgaatcattttaagatgctcgaacttgtcctgcagcagggtcaccccaaccaggataactggaccgtcagccagatgctgagcaagtggtggtacaccctggggcccaatgagaggcagaaataccatgaactggccttccaggtgaaggtggcccacttgcaataaggactgaaagaagttcagctcagaggccaagcccacaagccaggggctagcaggagtgtaacaaaggctcgtgggagtggagcatgtcagagactggcactgccactgcccctggggtgtcctctgaactcctgtcagttgcagcccaaacactccagagctcggataccaaggagcagcttctgtggggcagaatggggtcatccatgaggaatagggtgtgatgatgtcattgctgatgatggctttagcaccactgacaccgatctcaagttcaaggagtgggtgaccgactgagagtggggacaactctggggaggagccagagggcaacaagggctttggtgggaaggtatttgcacctgtcattccttcctcctttactcctgccgccccttgctggatcctgagccccagggtcccccgatccacctgcagcttttggcaaagtctatggtcccaccttgtcctcctcctacc

SEQ ID NO: 128130 - DNA, 637 bp, Homo sapiens
atgtccagagttggttcctgccggtgggtctgtggtcttgctgacttcaagaatggagccacagacctttgcgacaaatctctacataatagagaattaagtgcagaaagacctttgaatgaacagattgctgaagcagaagaagacaagattaaaaaaacatatcctccagaaaacaagccaggtcagagcaactattcttttgttgataacttgaacctgctaaaggcaataacagaaaaggaaaaaattgagaaagaaagacaatctataagaagctccccacttgataataagttgaatgtgggaaggatgttgatttcaaccaagaattcggaaaactgatcgatggttatggactctactaaggagtgggattgggtccataaatttcaagatattccaaatgtcttggttggcactgcatttaatgttgatgatggaaatgggggctttgtagttcattggttaaacaacaaggaatttcattttacatcatctacagaagtatttatgcatcaattacgaaaactttctgataagcaggtagatcatgaaaatgatgatgcagatagagaagatgaggaacattcacaggaggatagagaacggggtttacatatgaaattagaccatg

SEQ ID NO: 128131 - DNA, 553 bp, Homo sapiens
cttcggtcgaacggaccaccgccagcgtgcgggcgccgctgggcgccgtcgtcatcgagctccatgtggagcaccgggtgcgcgctttcgacacgctgcagggcatcgcgctcaagtacggtgtcacgatggaacagattaaaagggccaataaactgtttaccaatgattgtatatttctgaagaaaactttgaacatcccagttatatcagagaagcctttgttgtttaatggacttaactccattgattctccagaaaatgaaactgctgataacagtttttctcaggaagaggagccagtggtggccggggaagacctccctcctcccagtcctcaagaatctgatgttcagcctgtgcagcctgaggaagtgtcagccagagatttcctgcagagacttgacttgcagattaagttatcaacacaggcagccaagaagctaaaagaagagagcagagatgaagaaagtccctatgcaacttccctctatcacagttaggtgatttgggggcataactctaaccaaaattaagatatgtttggaccatt

SEQ ID NO: 128132 - DNA, 495 bp, Homo sapiens
  misc_feature (1)...(495): n = a,t,c or g
ccanatttnccctatatanttgtttccaaacttgtaaaaaataaccataatatgtaaattgtgtattagtgagaggtgaagcccagctggacttcccctgggtcgagtgggcccttggaagaacttttctgtccttaacaagaggattgtaaaatgcaccccatcagtgcctctgtaaaacacacccaatcagcgctctgtagctagcaataggtttgtaaaatgcacccatcagcactctgtaaaatgcacccaatcagcactctgtaaaatgcaccaatcagcaggatttctaaaagtagacaatcacagggaggattgaaaaaaagggcactctgatagggcaaaaacggaacatgggaggggacaaataagggaataaaatctggccaccccagccagcagcggcaacctgttcaggttcgcctgccgctgtggaagctttgtccttttgctcttcataataaaccttgctactgttcaaaaaaaaaaaaa

SEQ ID NO: 128133 - DNA, 1655 bp, Homo sapiens
atgccagtcgggcaaggagcctatgaaagagacttccagtcagagcttgtttgtgcaaaggctcccaagaggtccatgaaggatgactctggtgcacctactgctctgtcacctctgcacaacccagagaaaggtgccttccagcagccagaggccaagcttctgatgcttactctctcctccttagaaatccagatgatcttgaccaacacttctaagagtttgaagcagctcactcagggccagcctgaccaccacactaatgaagggggaggttacaatgaaaaggacatgtacttgaataacttcctccttgaaaaggagggtgcagaaatcaaaggcctgattgtgctgaatccttctctttggtcattattcagactggttcccagcatgccgcagtccagaggaaaaggagggagcgagagtaaagctacgccctggcgcgcagtctccgcgtcacaggaacttcagcacccacagggcggacagcgctcccctctacctggagacttgactcccgcgcgccccaaccctgcttatcccttgaccgtggagtgttatgagatcctgcaggcgcacagtccgggcctgtctgcagcccaatacccaccctcctggctcttcctgtatttactcctgctttgcattcataacaaaagctacagctccagggagcccagcgccgggctgtgacccaagccgagcgtgggaagaatggggttcctcgggaccggcacttgggattctggtgttagtgctcccgattcaagctttccccaaacctgggaggaagccaaggacaaatctcttacattaataggaggatttaagtgcagaaagaccttttgaattgaacagattgcttgaagcagaaggaaggacaaggtttaaaaaaacatatcctccaggaaaacaagccagggtcagagcaactattcttttgtttgataacttgaacctgctaaagggcaataacagaaaaggaaaaaattgagaaagaaagacaatctataagaagctccccacttgataataagttgaatgtggaagatgttgattcaaccaagaatcgaaaactgatcgatgattatgactctactaagagtggattggatcataaatttcaagaaaatgaaactgctgataacagtttttctcaggaagaggagccagtggtggccggggaagacctccctcctcccagtcctcaagaatctgatgttcagcctgtgcagcctgaggaagtgtcagccagagatttcctgcagagacttgacttgcagattaagttatcaacacaggcagccaagaagctaaaagaagagagcagctctctggagaggatgagagaagaaaccagcctttcccccacagtccccaccaaaaggtgggataccagaatcctgctgattggtgcattttacagagtgctgattggtgcgttttacagagtgctgatgggtgcattttacaaacctattgctagctacagagcgctgattggtgtgttttacagagcactgatgggtgcattttacaatcctcttgtaagacagaaaagttctccaaggccccactcgacccaggaagtccagctggcttcacctctcactaatacacaaattacatattatgttatttttacagtttga

SEQ ID NO: 128134 - DNA, 1117 bp, Homo sapiens
  misc_feature (1)...(1117): n = a,t,c or g
ttttaaaacataaataggtttgcttctttaattccatatgtgcatttacactcttctttattagtggataaatattagaaaatcatctctcagacagagtggctgagggcgggcccctccaggggctccggcttggtgtgcagggtgaggctgtccctccagggctcgtacaccagcgtggaggtctcggccctcttgatggtgaacttataggatcggttgggcagcaggtttcggacgtcgaaggtgcaggcagccaccggggataacgccacactgggcgcactcctgctgtgtccgcgggtccagcagcctgaagcgcaactcatactgctccgatgtggctggctggatggtgacgaaccagcgcagccgggcccagtcctggtgagccngccgacgcctttcggtcaaacacgacaggcatcttggtgctcagcatgagccagatgtgcgggatcttggtggcactgacatcagacaccaggcggtgcttgacgtgtagccgccccggcaccatcatggtcaagaagctgtccatgacggccgacacgttcgccagccgccgctccaccagcgcccagtcggccaggaagggccgtgggtctggcgaccggagcagggcatccagctcagcacggccatggtcgagctgttccaacaggtccccgagcagcaggagctggatcttggtctgagctgtgcccaccttcttcatgcgctggaacttccaggggtcgatgagctggaacaaggcgctaggcagcaccagcgggttctggtcgcccagggccaggtgcttgggcaggacctcgatgtagtaggagcacttacgcagcagctgcatgcgggcgtggtggcgcttgagcaggtgcggactcaggtccgaggtcaggaactcacgcagggcattgcggcgctcggtgtaggtcttccacgcctctggttccagcagctgctggtcatctgcctcctcctggtccaggaaggactggggattgcccagcttcatcttgtccaggcccaggcctgccacatgggtgctcattatccgggagctggggggagggctgggtgtcagctgccaggcaggctggcctcccctgggctgtggcat

SEQ ID NO: 128135 - DNA, 316 bp, Homo sapiens
ccacccttcaaagcctctactagcctcctgtggcttggacagagtcttgaggatacacaggatccagaatccacggggtctggagcataaggatgagccccaagagcctcaagaacccaacaaggtgcccctagaagacacagagacagatgaactttgggcatccttggaggcagctgccaagcggaagctctcgggtttggagcagccccaaggagctctccaaacgagacggagaaagaagaagcggcctgggtccaccagcccctgacgcccctgtgcccactttgtaaataaactgctgaacacccaaaaa

SEQ ID NO: 128136 - DNA, 594 bp, Homo sapiens
atgatgaaagagggctgtgaagcaggctgcataggtttggtggtggtaattctgacagtgattgtgggaaacactcatgggcagctggcagaaattgaccttcggcaagggcgtctactgggctgtctgaaggggctggcaggcagtgtgcgtgggttgcagtgccacccttcaaagcctctactagcctcctgtggcttggacagagtcttgaggatacacaggatccagaatccacggggtctggagcataagttgtctcaggcaaggctcctgacttccttcttgccggctcaacttctccgactctaccagctgatgctcttcaccctgccagggacccctgttttcagctacggggatgagattggcctggatgcagctgcccttcctggacagcctatggaggctccagtcatgctgtgggatgagtccagcttccctgacatcccaggggctgtaagtgccaacatgactgtgaagggtgcagagagtttggcagcctacgtggttggagggcatggtccccacaagtctgttttcacttcaataccagctgcaagttcaggggtccccatgaccaccttcaggtag

SEQ ID NO: 128137 - DNA, 477 bp, Homo sapiens
ttctgagtccctagtccttgtggtggaattcggcaccctcatcacatgtgtggattctgggattctcagagtctggcatgacaaggacaaggacacatcctctgacccagtgaggctcccctgccctgatggttgggggaggtgggctgggctcctggaactgagagtgggccctggggtgtgtaggatgcgccaagacccagcacacccccatgtggttgccacaggtgggaaagagaatgctttgaagatatgggacctgcagggctctgaggaacctgtgttcagggccaagaacgtgcggaatgactggctggacttgcgggttcccatctgggaccaggacatacagtttctcccaggatcacagaagcttgtcacctgcacagggtaccaccaggtccgtgtttatgatccagcatccccccagcgccggccagtcctagagaccacctatggagagtacccactaacagg

SEQ ID NO: 128138 - DNA, 452 bp, Homo sapiens
gaagcacttcagcaccgaggatggcatattccagggtcagagacactgccggggcggggagggcatgttccgtggcctcgcccaggccgacgggtaagaccaatcccctcgctaaactcagggccgaagggagagcgttgatgctccctgaggatactggaatgatggcgacaggcaaactcttagtgacacggctttgaatgggtgacagggacctgggtttctgccttatgtagttcataccgtgctgtggcggcgactatccacgttcggtcgtcggggctcctcgcggccaagcaagaggcaaccagaccagattcggaagcaggagagtccgatccgagaaggcaaccaggaggagccggagaagaaatgacccaagacctgctctcagtccgccccaacctccagagaataaaatttctaacgtatacctgcagaattccgagaga

SEQ ID NO: 128139 - DNA, 1246 bp, Homo sapiens
tctgcctccaggctttgtcatggcggctgctgctgcacgctggaaccatgtgtgggtcggcaccgagactgggatcttgaaaggggtaaatcttcagcgaaaacaggcggcgaacttcacggccggaggacagccgcggcgcgaggaggcagtgagcgccctgtgttggggcaccggcggcgagacccagatgctggtgggctgcgcggacaggacggtgaagcacttcagcaccgaggatggcatattccaggggtcagagacactgcccgggcggggagggcatgttccgtggcctcgcccagaccgacggcaccctcatcacatgtgtggattctgggattctcagagtctggcatgacaaggacaaggacacatccttttgaccaactcctggaactgagagtgggccctgggggtgtgtaggatgcgccaagacccaagcacacccccatgtggtttgccacaggttgggaaagagaatgcttttgaagatatgggacctgcagggttctgaggaacctgtgtttcaaggccaagaacgtgcggaatgactggctggacttgcgggttcccatctgggaccaggacatacagtttctcccaggatcacagaagcttgtcacctgcacagggtaccaccaggtccgtgtttatgatccaggcatccccccagcgccggccagtcctagagaccacctatgaagagtacccactaacagccatgaccctcactccgggaggcaactcagtgattgtgggaaacactcatgggcagctggcagaaattgaccttcggcaagggcgtctactgggctgtctgaaggggctggcaggcagtgtgcgtggggttgcagtgccacccttcaaagcctctaacttagcctcctgtgcgcttggacagagtcttgaggatacacaggatccagaatccacggggtctggagcataaggtttatctcaaagtctcaattgaactgccctcctcttgtcaggcagggacaacttgggaggatgagccccagagccctcaaagacccaaacaaggtgcccctaagaagacacagaagacagatgaactttgggcgatccttggaggcagctgccaagcgggaagctcttcggggtttggagcagccccaaggagctctccaaacgagacggagaaagaagaagcggcctgggtccaccagcccctgacgcccctgtgcccactttgtaaataaacttgctgaactacccaaaa

SEQ ID NO: 128140 - DNA, 661 bp, Homo sapiens
gctgcggagaagacgacagaaggggggggtcagtggttccgggtaggagctaggtgaccctcgcgctgctgcagggatctgcagcgactgcagccatgggggccccacctgggtccggcgctacctggggcgatgccttcggtggagccccgacccccctgcagattcccaacctttcccgccagactacgggcttcccccgaaacgcaaaggatcgcgagatggtggcccacacagcaggagatgatggcacgcgcagctgaagggctccaagctgcgggacttactgcgccccacccaccctcatccggcttgctcaagtgcaagcgtgacaagcttcccccaacttccctggcctgcaagcaggaagcggcacgacttggggacttacttgcggagcaccggaacttatgttgattgcgcattgaaggagttttgagcgggagcgaagggttgcttccagcggaaagaagcgggcgggagaagaaggcggcagatgtttgccaaaggccaggcgacccggggaagtggaccccaaggtgggcccgtgttagggggtgcaccccccaccctatggaccaagtcaaataaaagccttcagggctctcaaaaaaaaaaaaaaaaaaaaaaaaaaaaaaagtcgtttcgatgtcgagcgatc

SEQ ID NO: 128141 - DNA, 612 bp, Homo sapiens
ttacctctggaatgtaagttccaggagggcagggacgttgctttgttcactgctgcatctcagcactggaatagtgccaggcatgtggtagtgagaggtgacactgtgctggcagtcctcacagccctcgctcgctctcggggactcctctgcctgggctcccactttggcggcacttgagaagcccttcagcccaccgctgcactgtgggagcccctttctgggctggccaagaccggagccagctcccttagcttgcagggaggtgtggagggagaggcccaagcgggaacccgggctgcgctcgctgcttgcgggccagctggagttccgggtgggcgtgggcttggcgggccccgcactcggagcagccagccggccctgccggccccgggcaatgaggggcttagcacccgggccagcggctgcagagggcgtactgggtcccccagcagtgccagcccaccactgggccttagctgccttcctgcagggcagggctggggacctgcagcccgccatgcgtgagcctcccacccactccatgggctcctgtgcggcccgagcctcccggatgagcggcgccccctgctccacggcgcccagtcccat

SEQ ID NO: 128142 - DNA, 636 bp, Homo sapiens
atgctggcagtcctcagagccctcgcttgctctccgcacctcccctgcctgggctcccactttggtggcatttcaggagcccttcagcccctccactgcactgtgggagcccctttctgggctggccaagctggagcccactccctcagcttgcagggaggtgtggagggagaggcacgagcgggaactggggctgcctgcggcgcttgcgggcagctggagttccggagcagccagccagccctgctggccccgggcagtgggggacttagcacccgggccagtggctgcggagggtgtactgagtcccccagcagtgccggcccaccagcgctgtgcttgatttctcaccgagccttagctgccttcccgtggggcagggctcgggacctgcagcccgccatgcctgaacctcccacctacttcatgggctcctgtgcggcccgagcctccccaacgagcaccaccccctgctccacggcgcccagtcccatctaccacccaagggctgaggaatgcgagcgaacggcgcgggactggcaggcagctccacctgcaaccccagtgcgggatccactaggtgaagccagctgggctcctgagtctggtggggatgtggagagtctttatgtctag

SEQ ID NO: 128143 - DNA, 612 bp, Homo sapiens
tttagaaacttgaattatcgagtgtctacaatggttgcagttcttggggaaagctttatagcaaaggtggaatttaagctgatcattgatctcttcgtcaatgctaagccaactccatttagcaaaggtactagggcagaaacacagcttggaaacctctatccctttgtggattttggaagctacatttggcagcttcctaagaacagccggccggccctgctggctccgggcaatgagggacttatcacccgggccagtggctgcggagggtgtactgggtcccccagcagtgccagcccaccggcgctgcgctcgatttctcaccgagccttagctgccttcctgcggggcagggctcgggacctgcagcccgccatgcctgagtctcccacccactccatgggctcctgtgctgcccaagcctccccgacgagcaccaccccctgctccacagcgcccagtcccatctaccacccaagggccaaggaatgcgagtgcacggcgcagtactggcaggcagctccacctgcagccccggtgcaggatccactcggtgaagccacctgggctcctgagtctggtggggacgtggagagtctttatgtctag

SEQ ID NO: 128144 - DNA, 504 bp, Homo sapiens
atgggctcctgtgcggcccgagcctccccgacgagcaccaccccctgctccacagcgcccagtcccatcgaccacgcaagggctgagaagtgcgggcgcacggcaccgggactggcaggcagctacccctgcagccctgggtatgtgaatgcaccaatcgacagtctgtatctggctactttcatgggcatccgtgtgaagagaccaccaaacaggctttgtgtgagcaataaagcttttatcacctgggtgcaggtgaatgaccagggaaatcacgtgtcccaatcccgcagttccaaagcccttggggaccctactgtcagggtcgtgcacgaggaggtgaagtgtgccacctacaagctgtgccaccccgaggagctggtgctgctcggacactctctgggcatcccctgggctcccctgagcagctgccccagccaggccctgcagctgagcttcctggaggtgtcgtaccgcgttctacgccaccttgcccagccctga

SEQ ID NO: 128145 - DNA, 924 bp, Homo sapiens
atgggcttggtgggcctgcactcggagcagccggccggccctgccggcccaggcagtgagagacttggcacccgggccagcggctgcagagggtgtactgggtcccccagcagtgccggcccaccggcgctgtgctcgatttcttgccgggccttagctgccttcccgctgggcagggctcgggacctgcagcccgccatgcctgagcctcccacccactccatgggctcctgtgcggcccgagcctccccgacgagcaccaccctctgctccacggcgcccagtcccatcgaccacccaagggctgaggagtgccagcgcatggcgcgggactggcaggcagctccacctgcagcccggacatatgtagagtgtgtcggtcagaaggaacacctgagaaaccgctttatcatccttgtgtatgtactggcagtattaagtttatccatcaagaatgtttattctccagatatgccttcacggcttccaattcaagacatatttgctggactggttacaagtattggcactgcaatacgatattggtttcattatacacttgtggcctttgcatggttgggagttgttcctcttacagcatggcaccagttattggatttagggtccaccctaaatccaggatgctcacatcttgtgatccttaaattaacgacatctacaaagaccctttttccaaacaaggccacatttattctggttgtgctcagccaggacaagaccctgatggaagatcccaggatggaagacaaatggaaggaggaccgcttctcccctttcaacagtgaagccctggaaatcacccttggagaaaggcacagaccacagactgcctctgtgatcccgtggttttgttcttccaggcacgtccttaaccttggcaaaataaacttcgaagttgattga

SEQ ID NO: 128146 - DNA, 597 bp, Homo sapiens
ctagatataaagactctccacgtccccaccagactcaggagcccagctggcttcacctagtggatcccacaccagggctgcaggtggagctgcctgccagtcccgcgccgtgcgctcacattccccagcccttgggtggtcgatgggactgggtgcggtggagcagggggtggtgctcgttggggaggctcgggctgcacaggagcccatggagtgggtgggaggctcaggcatggcgggctgcaggtcccgagccctgccccgagggaaggcagctaaggccgttagctccagttggatgtggtcagtgaagagaaccagtggtagaagaacagtatgggagaaactaccacgtgattcaattatctcgtactgggtccctcccactgggagataccttgatttatcactctgaacaaaaggggtcttccctccttggaatcccacactattaagggaatttctgttgagagtatcaattccagacagtgttgctccaatctgctcatcacagactgtcttggctgcagctctatgctgctgggtgggaagccccgccaggcggagcgcaggacccctcaggctcggcccctccat

SEQ ID NO: 128147 - DNA, 516 bp, Homo sapiens
atgaagccacggaccctcgcggtgagtgttacagctcttaaggtggcgcgtctggagtttgttccttctgatgttcagatgtgttctgagtttcttccttctggagtgaagctgcagaccttcgcggtgagtgttacagctcttaaggcagcgcgtctggagttgttcgtttgtcccgttgggctcgtggtctcgctgggttcaggagtgaagctgcagatcttcgaggtgagtgttacagctcataaaagcagcgtggacccaaagaactcaggagcccagctggcttcacctagtggatcccccaccagggctgcaggtggagctgcctgccagtcccgcgccgtgtgctcctactcctcagcccttgagtggttgatgggactgggcgccgtggagcagggggtggtgctcgtcggggaggctcgggccgcacaggagcccttggagtgggtaggaggctcaggcatggcgggctgcaggtcccgagccctgcccccacgggaaggcagctaa

SEQ ID NO: 128148 - DNA, 1026 bp, Homo sapiens
ctagacatgaggctgccgctcaggcccagactcccaaatagttgtatgcaagtaaccccagctgctgaggctgggaggtacttctgaaggtaacagaagaatccatcttcctgcagatttattgaatacggtgtcagcttccttcccatctatttccaacatatgcagacttctgtgctctggtgactcttgagctaggcacagggtgctgattggtgtgtttacaatccctgagctagatatactctccacatccccaccagactcaggagcccagctggcttcacctagtggatcccgcaccagggctgcaagtggagctgcctgccagtcctgcgcggtgcgctcgcattcctcagcccttgggtggtcgatgggactgggcgcagactcaggagcccagctggcttcacctagtggaacccgcaccagggctgcaggtggagctgcctgccagtcccacgccatgcgcttgcattcctcagcccttgggtgatcgatgggactgggcgccatggagcagggggtggtgctctttggggaggctcgggccgcacaggagcccatggagtgggtgggaggctgaggcatggcgggctgcaggtccagagccctgccccacgggaaggcagctaaggctcggtgagaaatcgagcgcagcgccagtgggctggcactgctgggggacccagtacaccctccgcagccactggcccgggtgctaagtctctcattgcccgcggccagcagggctggccggctgctccgagtgcagggcccgccaaacccacgcccacggggaactccagctggcccgcaagcgccgcaggcagctccggttcctgctcgcgcctctccctccacaccttcctgcaagctgagggagtgggctccagccttggccagcccagaaaggggctcccacagtgcagcagcaggccgaagggctccccatcccccgacttccagaagagtggatttctttgcctttcctcgggcaccaaggagagcattcgggtatggcat

SEQ ID NO: 128149 - DNA, 2234 bp, Homo sapiens
ctaagaatcatttgccttgtgtgggaagagattgataagtggaagttttagtggggaagtaggtgagagtggccggatgagaaggagaaaaacggccgtgagggacagaagttggaacgctagctgctttttagctaccttatcagcataagcattgtcctgagtgataggatctgatgccttttgatggcccttgcagtgaatgactccagcttcttttggaagtaaaatgtctttgagaagagtttttattaaaaaagcattaatgatggaggccccttgcatagtgaggaaatttctttcttcccatataacagcatggtggtgcaggatatggaaggcacatttagagtcagtataggcaatgagtttggcttgttgagaggtagtggagcggggcagagcagtagcctcaatgatagatgtggaagatactatagcatagcctgcctttgctggtgagtggcagttaggtctggtggaactgccatcaataaaccaagtgtgttcaaggtgaggaacaggaaagaaggaaatatggggaaatggagtgaatgtcaagtggatcagagagatacagtcatggtggtcaggtgtggtatccggaataatgtggaaggccggattgaagtccaggacaggaacaatggtaacggcgctgcgctcgatttctcgccgggccttagctgccttcccacggggcagggctcgggacctgcagcccaccatgcctgagcctcccacccactccatgggctcctgtgcggcccgagcctccccgacgagcaccaccccctgctccacggcgcccagtcctatgtgtgttttcatgagaattatgccaaggtaggtaacagatgaggaagaaatttgggcttgactgaagtaatgggggctatctatgaagcactgcggcagtacagccaaggtaatttgctgagcctggtgggtgtcagggtcagtccaagtgaaagcgaagagaggctgtgatgaagggtacaaaggaatagtaaagaaagcatgtttgagatccagaacagaataatgggttgtgaagggtattgaggataagagagtatatgggtttggcaccatggggtggataggcaaaacaatttggtagataaggcacagatgctgaactaacctgtaagacttatccagtttttggacaggtaaaatgggagaattgtaaggagagtttataggctttaaaaggccatgctctaacaggcgagtgataacaggttttgatccttttaaagcatgctgtgggatggaatattgggattgagcagggtaagggtgattaggttttaatgagatggtaagggatgcatgttcagttgccaaggagggactagaggtatcccatacttgtgggttaaggtggggagatacaaggggaggatgtgagggaggctttgaaccgaagcttggcatccatgatggcccagggggcttccgaggtgattgggcagcatcagtcttcagtggatggcccaaattgtggagcagcttgcatggcagcctgaatctattgacaagccttctttggttcttgggctcgtacactagaaaatcaatcaaggtctctgcagccttaagatccttgatcaaatcttcaaagttcctattgaaacgtggggtaacaaattcacaggttctgtttggcagcaacaccttctcaaagatttgctgcctaactccacagggtcctttttcaaacttctcgtttccaataactctaaactgtccacttgattcttcattcctaggggcgttagctactttctgacaacaacctgatgaagagtgggcttgtctattcttcatcttttgttggtgcacagcttccaaagagactgcatccaattcttcatcacacagaagtacatataaattctcctgcatagttacaagcttctgaaaataatgagccttattgtcatgccggtaatccctttggtagctttgtgcattcttcagggttttccagagggacagaacaggtaggctagatgcagatatctttattaggcagaattgactcacaggatcacaaggtgaagtcctgtaatagggcgactgcaagctttccaagccaacactcacaggtagaataacaacatcacagtacagagatgtgagtggcatctgcctttgagtaagggactggttagctgcgattttatgggtttcctgacaccgtgatactgatggaagccaattac

SEQ ID NO: 128150 - DNA, 3594 bp, Homo sapiens
tcaatccctcggtgtgaaaagattaggaaaggaaccacgggtgactgcatagaggagcacgccctccaaaactttcctctgacttccaaggcactctacaagccttccctttcttttgccagcctctccccgggcagtcctccaaactgagggttgtgggcggaaggcatcgcgcagggtctccagctctattccccagttccgcacatgtgggcgttctagaccctgcatggacttcgggctctgataccgctctggatttaaagcagggcgagtagcggctggatccctcctccccagctgagctcgcccacaccagcagccccaaccgccccgcacacctgtcgcccctctctccgcattgggtggacaggtgaaggcaggcgcaacgtcaccttgacggccccaggagccaatcagagcacgcgactgccgcagccaggcaaacgcagagcgtactggctcccgcagccgggagacccaacaaacctcagcttcggggccaggcgcaggagggtcacttctcccagcggggcgacaactcggctcaatctgtgcggggccaacacgcccctgaccaaccgccgccgctgccgccgccgcctgggcctcagggtcagtagccgctggccgccgcctgtttcgaagggaccaatcataaggcgggggcgtggtctgaggccccgcccccgggctgccgggaagcacgcgacccgtgggcgctcgcctgtcagcgcgtccagcgctgcgcctccgggcgtctcggagcttcggtggccaagtccctctgttcactgaaaggcgaagtggttcagtcagagcaggtcctccgatctggcctttcagcgacagccagttcgaaagccacagcccgtcctgttgttcccacaggcctgagaggtgaatgaacctcgcctgtaataattgcttctgagcgtcctggaatgttgcggtgcagctgaaggcgcttccctgagttttatcctggtctgttaagagccgctcccaaccccacatccactcgggagctggctgacctggacccactgaatttggggctatcccttgaagcccagcagaagtaccatctcctgtatgaaactttcccaagttccagggtaaacccacagcaagttccgctgcagcctttataactccctccaggcagttactgggtttttttctttctctttttttgaagacagggtgtcgctctgttgcccaggctggagacaggataacaattgctgtaagcagagcatactcctcttgagtcattttcagttccccaatacttttataaaaactaaacataggtgttatatattcatcagagataccagactcaggagcccagctggcttcacctagtggatccggcaccagggctgcaggtggagctgtctgccagtcatgcgccctgcgctcgcattcctcagcccttgggtggtcgatgggactgggcgccgtggagcagggggtggtgctcgttggggaggcttgggccgcacaggagcccatggagtgggtgggaggctcaggcatggcgggctgcaggtcccgagccctgcccctcgggaaggcagctaaggctcggtgagaaatccagcgcagcgccggtgggctggcactgctgggggacccagtacaccctccgcagccactggcccgggtgctaagtcccttattacccggggccagcagggctggccggctgctccgagtgaggggcccgccaagcccacgcccacccggaattccagctggcctgcaagcgctgcacgcagccccggttcccgctcgcgtctctccctccacacctccctgcaagctaagggagtgggctccagccttggccagcccactatttcgaattctttcttccaataggtcagaatgcccagacggaagtttcttattgaaaatctcagctgaacgaaggaacatagcttcaaccgcagaccctttcagcaaagcaatctggtcttcatggtccaaagtctgaaatcctggtagcttttttgtgaattctacaagaacctgtacatgattggttgccatttccgtcaaaatgagaaaattttcttctgcactgaattcttcttttaacctgcatgactttgttgtcgaggtcacttgtcgcaagtcacgaccttcactgtcttcattcacggtctgatctgcatgctgcttcacattttttctcagtcgcttagatttacactgaatttcagttaacaagcctgacatctgcctccttaagagatttttagtgaaatgtaattgcttgaagtgaatacctgtatacatacattcagccaacattcccatctctttgcatttccttagtcgacactcttgacactttcttcgcatgtacatatccatcacacagttgcccccgtttttacacttgtacacagcgtttttggtaatgcttctcctgaagaaacctgtatgttgggaagctcctcggagcaaggtaaaggtggaacgcgtattggagactagagagaggagactattgccataatacaactgagaggctaccaatgcctgaactctgcctctttcttgtgcatattcaacaatgctcatatcagaaaagtcatttgaaaatgaatggaaaggaaattcactgaggaacagagccttgctggtaatacaggataagtagacagggttggcattgccatctggggaatgtgtagcaccaatgggatccctgagctgaatgaaggagacagccagggccagacgtgatggaagagtgtgctcagtaccccaggatggtgtcacagagacctttcccactggtgactgaagaccaaatacaacagcactccaacagatctcagactgtgtcaacagctgtggcaccaagccccacccagccccacagctgtggggccagagccccactccccagtgcccaatccctccacaaccctcccttaatcctttacacccctcacaggtcagtgcattatagtggtatccagaggctctgtctccacaaacaacacacagctcatcccctttgatcctccctgctgacgcgcccatgcggggcttctttgttacaggcatctctgctacctcagtttctccctggtagagagtctcagctggcatacgcctgagttcatatattccaggagagtaccactcttcaggctgctgggggtagaaacccaggttggaataataggatgacgaggaaatctgtggttgaacttggggaaactgaacattgctgtattgcgagtatggttccacttccaggttctgtcccagaggacctgccacttgttctgttaaaacacctttcgcgggcttcatactcatcatttccatgaaaaatcctgacggcgtacagctgcagtgaggactaatttgaattggattttctaacccctgaaactgcattaccattcttagcttattcacagccaccctctgctgacagttctctgtgctgctcccagtggcatcaagctggcctcccccacaccagggatcttgacaactgacctctttggttttccctccttccctgttgcatcgcccactccctcgcctccactccctcat

SEQ ID NO: 128151 - DNA, 1104 bp, Homo sapiens
atgaagccgcggaccctcgcggtgagtgttaaagctcttaaggtggcgcgtctggagtctgttccttctgatattcggatgtgttcggagtttcttccttctggagagaagctgcagaccttcgcggtgagtgttacagctcataaaagcagcgtggacccaaagagtgagcagcagcaagatttattgcaaagaatgaaagaacaaagcttccacactgtggaaggggaccccagcgggttgccactgctggctccgcagcctgcttttattctcttatccggccccacccacatcctgctgattggtagagctgaatggtctgttttgacggcgctgattgcccttgggtggtcgatgggactgggcgccgtggagcagggggcggcgctcatcggagaggctcgggccgcacaggagcccgtgaagcgggtgggaggctcaggcatggcgggctgcaggtcccgagccctgcccggcgggaaggcagctaaggcccggcttcccctgcaggatgtttggcgcatctatagtggcattttaaatctgtcagacattacaaaagatacacctttctcacaaataaaagagattattattcaccaaaactataaagtctcagaagggaatcatgatatcgccttgataaaactccaggctcctttgaattacactgaattccaaaaaccaatatgcctaccttccaaaggtgacacaagcacaatttataccaactgttgggtaaccggatggggcttctcgaaggagaaaggtgaaatccaaaatattctacaaaaggtaaatattcctttggtaacaaatgaagaatgccagaaaagatatcaagattataaaataacccaacggatggtctgtgctggctataaagaagggggaaaagatgcttgtaagggagattcaggtggtcccttagtttgcaaacacaacggaatgtggcgtttggtgggcatcaccagctggggtgaaggctgtgcccgcagggagcaacctggtgtctacaccaaagtcgctgagtacatggactggattttagagacaacacagagcagtgatggaaaagctcagatgcagtcaccagcatga

SEQ ID NO: 128152 - DNA, 2155 bp, Homo sapiens
ttaattgttgtgcagtttcatagatgggtcaggaggtggacaagttggggccagagatgatggcagtccagcagcaactccctgtgctcccttctctttgggcagagattctatttttgacatttgcacaagacaggtagggaaaggggacttgtggtagtggaccataccttgagctagatacagagtgccgattggtgtatttacaatccctgagctagacataaaggttctccaaggccccaccagagcagctagatacagagtgtcgattggtgcattcacaaaccttgagaaaccttgagctaaacacagggtgctgattggtatatttacaatccctgagctagatatactctccacattcccactagactcgggagcccagctggcttcacccagtggatcccacaccggggctgcaggtggagctgcctgccagtcccgcgccgtgcgctcgcattcctcagcccttgggttgtttgttccttcccggtcgatgggactgggcgccgtggagcagggggtggtgctcgtcggggaggctcgggccgcacaggtgcccatggagtgggtgggaggctcaggcatggcgggctgcaggtcccgagccctgccccgcgggaaggcagctaaggcccggcgagaaatcgagcgcagcgccggtgggctggcactgctgcgggacccagtacaccctccgcagccgctggcccgggtgctaagtccccctttgcccggggccagcagggccggctgctccgagtgcgcggcccgccaagcccacgtccacccggaactccagctggccagcaagcgctgcacgcagccccggttcccgctcgtggaaaatgagcttatatatgaagaagtcagcgagtggacaaagccaggcgcaatggatagcaaagatgtggaagtctcctcgattcaaaccactctggctcacatcatagccagcaacagcaagaaacatagcataaggtttgtgacattatctgcaacaaatgccaagacaaatgatgtgcgagatgtcataaaacaagctcaaaatgaaaagagctttttcaaaaggaaaaccatcctttttattgatgagattcatcggttcaataaatctcagcaggtcaacgctgctcttctgagccgctgtcgagtgattgttcttgagaagcttccagtagaggcaatggtgactattttaatgcgagcgatcaactccctgggaatccacgtcctagactctagccgtcccactgaccctctgagccacagcagcaacagcagctcagagcccgccatgttcatagaggataaagcagtagacaccctggcttacctcagtgacggtgacgcccgagctgggttgaacggactgcagctggcggtgctggctaggttaagctctaggaagatgttctgtaagaagagtgggcaatcctattctcccagtagagttctgatcacagagaatgacgtgaaggagggcctacagcgatcccacattttatatgaccgggcaggtgaggagcattacaactgcatctccgccctgcacaagtccatgcggggctcagaccagaacgcctccctctactggctggctcgcatgctcgagggaggagaggacccactctacgtggcacggaggcttgtcaggtttgccagcgaggacataggtctggcagacccatctgcgttaacacaagcggttgctgcctaccaaggctgtcattttataggcatgcctgaatgtgaggtgcttctggcccagtgtgtggtctactttgccagagccccaaagtccattgaggtgtacagcgcctacaacaacgtcaaagcctgcctgaggaaccaccaggggccactgccccccgtgcccctgcacctgaggaacgcgcccactaggctgatgaaggatttgggctatggcaaaggctacaagtacaaccccatgtacagcgagcctgtggatcaggagtacctgcctgaagagttgagggggttgcatgtcgtgcatatgcccacaaggatggccccttcaggtagtcggttctcctcctgccgttgcgtgatccctcctggggtcctcctgccatgtctggaaggctgccggctgttggcctgggacgtcctctgcctttattctgagtga

SEQ ID NO: 128153 - DNA, 966 bp, Homo sapiens
tcagcttgagcccagtagtgaccaccacaaagagtcaacttggtctggtaaatctaagggagcagttgacctggctgtaggtgctgaatagcctagtggatcccgcaccggggctgcaggtgaagctgcctgccagtcctgcgccgtgcgctcacattcctcagcccttgggtggtcaatgggactgggcgccgtggagtagggggtggtgctcgtcggggaggctcgggccgcacaggagcccatggagtgggtgggaggctcaggcatggcgggctgcaggtcccgagccctgccccgtgggaaggcagctaaagcccggcgagaaatcgagcacagcgccggtgggccggcactgctgggggacccggtacaccctccgcagccactggcccgggtgctaagtcccccattgccccgggccagcagggctggctggctgctcttggcattaatggagcaggtgagcgtctgttcatgaaggtggctttctctcttaagacatgctctctctcctgctcctaccttaggctcactctgagcagaggtgggtctgtgcacgtgctgcgcgggaatctgactgtgtgcaagcctcagcccgcgcttctgagagtggtcttccaccaccagagacaggcagactgtggagctcttccggtcccataggctcaggccctttaagaacggggagtcggctctgcaaccagctgcttgggtggtggttctggcacttgctggcttttgaggagcccttgtaacattttctgggtccttgatggctttgactttcccagctaggctgtgcagtctcccagggagggagtggaggaagatcttagccaggtgctgcaggccacaagttatatgcagaagatgcttaacgaagacagtaaaagagggtcccaggagtgggtagaactggatgctgtgtttctcaatatctctgcccctgcaaaattttctcat

SEQ ID NO: 128154 - DNA, 725 bp, Homo sapiens
atgactgtatttgaagataaggcctttggaaggataggagccagaagcgctggtgcaagtcaagccttcatcgacattttgaccacacacgtaatgggtttttcagctggaagtctgacgatccagccagccagtgcttctcagcccccttgcagtaagaagcagccagtgggagctcagatgaggcaggaatctagctcccgtaggcctgacagtacctcaggcagcgattcgcgaagggccatctgcagatttttgagggtccctgaatccaatttaggaaggtatgaagtcaaaactcttcgtaacaatagtaagacgtttgcctttgtcactgtgttgatatttgtactgatgcccttggctgcaagtaaggcaggggctgtcgagttggcagctgagtgtgcagctaagaagaaaaggagaacgggctctgagagggctcgggacctgcagtctgccatgcctgagcctcccacccactccatgggctcctgtgtggcccgagcctccccgacgagctccaccccctgctccacggcgcccagtcccatcgaccacccaagggctgaggaatgcgagcgcatggcgcaggactggcaggcagctccacctgcagccccggtgcgggatccactaggtgaagcccagctggggcttctgagtctgtgactaaacaagaaaaggaggaggaactgctaccttcacaagacatgaaaacccag

SEQ ID NO: 128155 - DNA, 1760 bp, Homo sapiens
cccggccgctccgcgggtggaggaggacgcgggacgctcgggctcccaggcgctgccgctgcgggtcccatggcgcacgcaggtgcctgcggaaaacagcggcgacatcgcgatgtggcggcgctcctggccccgcggtcacggccaccctcaactggccaggccgcggaggccggtgactggctgctgggtgcaatccctagggaggtctcagggctgcggatgggcctgggtctcggccgccacgggggtcgatcgggctactgtgtggacagggtggccaaggaggcagcagcccttgggtggtccatgggactgggcgctgtggagcagggggtggcgctccttggggaggctcgggccgcacaggagcccatggagtgggtgggaggctcaggcatggcgggctgcaggtcccgagccctgccccgcaggaaggcagctaaggctcggcaagaaatcgagcacagccccggtgggccggcactgctgggggacccagtacaccctccgcagccactggcccagggagggatggagagggaggggcaaactggagcacacgtgtctgccttaaaagggactcctggcactgagtggccagcgcatgggttggtgccatacagtattggggaccagacctgcctaatttttaaagtgacttttaaggcagtagttctaaagtgtggtccccagacaactagcagcaccagtatctcctgcccaggaagtgccaatttcctcccagccctgctggctgagaagctctgggtgtgggtccagcagtctgtgctctgcacactcagtccaagaggacagccaaccccagtagaagaggactggtcttcagtcaaacctacggtaggtctgggtcttcctctaatgagcctcggtaccactcagatttgcccacaagtagatcaaagttacgtaatgaagacactttctttggaagaaggaaaaagctctctgaggtacagagaactgggcaagatcctgcatgaagccaccacaccagcagctacacgctgcccggcctataaactgccgaaggaaaggaccgtgtggaaaacgccgcgtgaaaggggtcgcccaatttccaaaggtcggggactttcaacccaaaaggaggagcgaggaaaaccaggcaggcgtggcatcctcgtgctccaaattgtcaagctggaaccccaccccgagaaggctcatcggggccacggacctccctcagcgctgcattcagaatccctcaggaggttgtaaacttcctgatttctggacccatcaccagagcccaacgtcacggggagccagaaagcccacggggacaaacaggaagtccacccctgggaaaaacaggaagtgagggaacagacagaaagtccacaggagctgacaagaagtccacaggggacagacaggaagtgagggagccaacagaaagtccacaggggttagacaggaagcccactgggatggacaggaggtccacagggaacagacagaaagtgaggaggcagataggaagtccactggggctaaacaggaagcccaatgggacagacaagaagtccacaaggaacagacaggaagtgaggcgtagacagtccgcaggggctagacaggaaagagcaggttcttccaccttccttagactgtccgcattgtgtgggctgttggtggatgtgaatagagagcaggtggcaaagcagaaatgggatttgtatagttccaggttcacatcaggaaacagagtttaa

SEQ ID NO: 128156 - DNA, 2968 bp, Homo sapiens
ttatttgagttcattgtagattctggatattagccctttttcacatgagtaggttgcgaaaattttttcccattttgtaggttgcctgttcactctgatggtagtttctttggctgtgcagaagctctttagtttaatcagatcccatttgtcaattttgtcttttgttgccattgcttttggtgttttagacaagaagtccttgcccatgcctatgtcctgaatggtaatgcctaggttttcttctagggtttttatggttttaggtctaacatttaagtctttaatccatcttgaattgatttttgtataaggtataaggaagggatccagtttcagcttcctacatatggctagccagttttcccagcaccatttattaaatagggaatcctttccccattgcttgtttttctcaggtttgtcaaagatcagatagttgtagataagcagcgttatttctgagggctctgttctgttccattgatctatatctctgttttggtaccagtaccatgctgttttggttactgtagccttgtagtatagtttgaagtcaggtagtgtgatgcctccagctttgttcttttgacttaggattgacttggcagtgtgggctcttttttggttccatatgaactttaaagtagttttttccaattctgtgaagaaagtcattggtagcttgatggggatggcactgaatctgtaaattaccttgggcagtatggccattttcacgatattgatttttcctacccatgagcatggaatgttcttccatttgtttgtatcctcttttatttccttgagcagtgatttgtagttctccttgaagaggtccttcacatcccttgtaagttggattcctaggtattttattctctttgaagcagttgtgaatgggagttcactcatgatttggctctctgtttgtctgttgttggtgtataagaatgcttgtgatttttgtacattgattttgtatcctgagattttgctgaagttgcttatcagcttaaggagattttgggctgagacaatggggttttctagatatacaatcatgtcatctctgaaaatttgaagggtccttgctgcagccacactcacatcattggcttgttcatcaacagtcaatattctgagaacactgaagggaaagaagatggttctctgtagaccaccccagaatagctcaaattttttcctctggctcagctgaatgacaagagcaaggttagggctgacataggcaagctcacttgctagggtaggaaaccctctaggacagttccagaagttagcggggtttggtggaagggtattttggcaccagcagagagcatgctgggctgctgcaaggagcaggagctggcaatcaacagcgagtttggatgttggcaacctgccaccaacaggccccagtatgtaatgttcccctccctgtatccgtatgttctcattgttcaactcccacttatgagtgagaacatgtggtgtttggttttctgttcttgtgttattttgctgagaatgttggtttccagcttcatccatgtcctgtaggagaagttcatcacatatatttttggccagattatctacaaaagcagttgtttgtactgattcagtaatagatacaacagcaatgctaacagttgccataatgtctatggctgagcctgtaaagaccataagtgtaaatgtgaatcttttgtgtctgacctgggacagggcactttctaaggtggcaagggcagaagagtcttgccaattgcatgtcaaattggctggtagaagtgcctcagattgtctccttaataccacgacactggaagtttttaaactagacatatcatgaccagtgatacatgaggcaaaccaagcctgtccctgcacccgggtcacaaatgtggcatttccaggtgtaatggaaatgttagttccagactcaggagcccagctggcttcacccagtggatcccgcaccggggctgcaggtggagctgcctgccagccccacgctgtgcgctcgcactcctcagcccttgggtggtcgatgggactgggcgccatggagcagggggtggtgctcgtcggggaggctccggccgcacaggagcccatggagtgggtgggaggctcagacatggcgggctgcaggtcccgagccctgccccgcgggaaggcagctaaggcccagcgagaaatcgagcacagcgccgatgggccggcactgctgggggactcagtacaccctccgcagccactggcccgggtgctaagtcccccattgcccggggccagcagggctggccggctgctccgagtgcggggcccaccaagcccaagcccacccggaactccagctggcccgcaagcgccgcacgcagccccggttcccgctcgtgcctctccctccacacctccctgcaagctgagggagtgggctccagccttggccagcccagaaaggggctcccacagtgcaggggggaggctgaagggctcctcaaatgccaccaaagtgggagcccaggcaggggagaagaattgtggcattcacgatagaagtgggggtgttgagggaagatctgttttgaatggtgatcctactttgaacattttgggtgtagagcagtacgaggccatcaggtatccaggtggagatggcatactgctgagccagcaggaaaaggcaacaggacgaggggcaggatttgccactggaatgtcagcaggccatacctcaggcgttcagctccatggagcaaagacagtagtgatcacgttccttgacaacagtgctagtgtgcggggagcttttagttttccttttctctgctccttgaaccaagaatccagcatcagcatcagcatcagcatcagcatcagcatctgctcagctgtaggccatgattgtctgtactgtttaccagcagctcatgtaatatgcttgatgtaa

SEQ ID NO: 128157 - DNA, 380 bp, Homo sapiens
cgggcactggggaatggtgaactcgccgtgccgcgcctctgccacagtctcccgtgggtccccactgccgggagttttacctacctccccaccctcagccacgagcacctgcaggatgcggtgccatcctcgccggtgcccgctccccttccggaggctctctccaccctcactgacgcctcctcgggaaagcccccgctccttccccgacctcacagcatgccaggtctggggcttccgctggggggcttacctgttttccacccctgctagactgggagctccagggcaaggccgtagctgccttgcggattgttacgttgtccagcttgtctccacacgtgatacccagcaggtgcctaataaacttgtgtagaaag

SEQ ID NO: 128158 - DNA, 1818 bp, Homo sapiens
atgaagagtaaatacaagagcaaacatccaccactctttctacacaagtttattaggcacctgctgggtatcacgtgtggagacaagctggacaacgtaacaatccgcaaggcagctacggccttgccctggagctcccagtctagcaggggtggaaaacaggaggaagaagaccacaaatctaaccagcctagcagccccagatacacagagcacatgtggacaaagctgtggctgcctgcattccatgggatcatcttgtatgcagcactcttactataccggattcctcaggtccctgtggccttgcaggtgccacaggagcgctttctctggccagcggagaagcgaggagaaagactccaaatcagtcagggagaggagtggaaggagccaaaacgtccctgcgaggcctgcgctcaccagcccccttacccaaagtcccgggcccctggcgccaggagcaggctcctggagccggagccagctcggcactggaaccggcgtcctctggtggcagagagagagcgctactggcgattttcggaccgaatcggcacgctcgtcagatccaagcaggcgggactggcctggagcaaaaagaaagagagaggagggcgccgccaccgtgttatgggcgtgcgcaactgcctctacggcaataatatgtcaggacaacgcgatatcccccctgaaatcggggaacagcccgagcaaccacctttggaggccccaggggcagctgcccccggtgctgggcctagcccagccgaagagatggagaccgaaccgcctcacaacgagcccatccccgtcgagaatgatggcgaggcctgtggacccccagaggtctccagacccaactttcaggtcctcaacccggcattcagggaagctggagcccatggaagctacagcccacctcctgaggaagcaatgcccttcgaggctgaacagcccagcttgggaggcttctggcctacactggagcagcctggattccccagtggggtccatgcaggccttgaggccttcggcccagcactcatggagcccggagccttcagtggtgccagaccaggcctgggaggatacagccctccaccagaagaagctatgccctttgagtttgaccagcctgcccagagaggctgcagtcaacttctcttacaggtcccagaccttgctccaggaggcccaggtgctgcaggggtccccggagctcctcccgaggagccccaagccctcaggcctgcaaaggctggctccagaggaggctacagccctccccctgaggagactatgccatttgagcttgatggagaaggatttggggacgacagcccacccccggggctttcccgagttatcgcacaagtcgacggcagcagccagttcgcggcagtcgcggcctcgagccatcagtgcctttctcaccacatccccatgagccccagcgtgggcaggaatggacttttaacaaaaccaccatctacctcaagaagggggaagctaacaaaaagagatgacatgtattactttgttccttttagaagcctaaatgatatgatgcacatgttacccttcattgaagattctaggtggacacacaacttggatatcaacagggagcagaaaacaaacccactagcaggaccaaaaggcagacccatcagcagaacacaggcggcagcttccacaagtaactccaaaactgaaagtcaaatccaggagaagactgaggaagctccattttctttgaggtacatcaacatcaataacagatcaatggacccacttaatggagctcttaattga

SEQ ID NO: 128159 - DNA, 877 bp, Homo sapiens
ctaaggagctggaacgcccagatttgggcactctctgagcaggtcctgggccccctcggcctttgcctcctcggtcttcagaagggcctcctggggcctccatctctctgtgctcagaagtgcctgggccatcatgccaggggcgctttcggggaggtagggatgccatgtccatgccttggagagaagaggagcgttctctgctggctggggaatgaccgtcgtgagggggatgatcagggcggggagtatcacgaaaatgttcatgacctggccctcgtggggtaccccgacctcgacctctgagatctcgtcctcgggccgcttcctcagaagcatcaaaattctcctctggaccaaagtcttcataggaccaggaaaaccatcccttcctctggggggagcacggccatcatgcctcggcggggctcctcttctgaaactttcttctctgcgccctcgaaaacgtgggtcctcgggatcccgggggaaacgttcatctccgggcctgcggccttcccatgcccccggagggcctcgggctgcaccccggccatccccctcgctgaattccctgtgatcagggggaaacggaggcccagggccccctcgcctccacttctcttcatgcggtaaaggtcctcctcgcccctcaaattcacgtaaccggtggccaaagcgcttgtcagggtggaagtcatctggtctgctgaagtcatcggggaagtctgggtgagggccacgcctatcagggggacccctgcagtcctggccaccccgcaaaggccccctctcgggcccatgctcaggcccgccgctctgctcatgccgcctctctgacatcgggcccatgtgatgcctcgtgccaagcttggcg

SEQ ID NO: 128160 - DNA, 546 bp, Homo sapiens
tgatgtccggaaccaaattttggttggtacctgcaattcataggattattcaaccatccctataggtgggaccagatccattgtaaataaccctgcatccaggctgaattgcccgcatatctctctggtctcttggccatattctgttctccaaatacttaattacagatggattgtagtctatggtttttcggttcacagcttttctcattcgttttccatcaaaagtaagctgttgcattgcttgctgttgtgcaaaatcaggtcgcttataaaacagctgtcgaggtgcctggtgctggaaccttggcatatggaaaaaacgaggaggagaaccaatttctgtagccatggtgatgttttccttctaggatacgtctggctttgagcagagctcctaaatggccagcgaagcgttcgccttcagagccagaaatgtctctcctgtttggtctccccaccccgatcctaacaataccgctcctccaaaggagcagccgccatcttcccccgggcgcgtgggtcgacacgggaattggagcgtcg

SEQ ID NO: 128161 - DNA, 549 bp, Homo sapiens
aaaattaaatttttattttgagatcactgtttgtgttcagttgtaagaaacaagagagattctgtgtaccctttacccattcctccatgttgcaaaactagcacaatatcaccgccacggtagacgcagtgaggccataagacatttccgtcagcaaaagggtcacttcttgtgcccctttagaaccacaaccccacccctgccttccaactattaatgctggcaggacttagccagaccgcaaggggcgcctactccgaacaaggaagagggtcaggcgcctgggagggcgactgcaagcggacaggcagcacctgcgaccacggtacttggggacaccacaaaagtccgcagggcaggcaccgcggcacttccgcgagcgccgcaggccctgcccctttcgccgtcgccgaccaattgccgcccgaagaccgagccgcttcagcggagggccggaagtgagccgcagcttttcctttctgccaccgccttgtccaagatggcggacctccaccgccagctgcaggagtacctggcgcaggggaaagc

SEQ ID NO: 128162 - DNA, 2616 bp, Homo sapiens
acagcgactacgcactgtcgtgtagcactttatcacgtctcttccgtcacagtcctgctaattcgttttcaaggtgggctagccaccaatagcgactacgagactcctacgcgctgtcgctccgtggcagcgccgtcccgattagctcgcagctgtaggcatggcttcgcactgcttccgccagcggcgtcagtctcagtcgcctgcgcggtctccgcggcgctggctccgcgtactccccagcggcaaggcgcgaggtcctcacacgggcagcaccttggcgaggccggcgccgcggcccaggcgacccagtgcgaggcgcagcgcggtgccgccgccccagggcagcagcccaaccagcgcggccagcagcgcggccacctgcgcgcccgcgcccagcaccgtgagcagcgtgctgcgaaggcccagcgcggcgaacagcgtggcgcccagcgctgccatgtagagcagcgcgggccgggacggcgcttcttcgcagcgcagcaggcgtccgcacgccgcgccgccccgcagcagcgcgcttcccgccaacggcaagcgccgagcccagtgaccagagcagcgcgaacttgcggcgcgcgcagcagcaacaccggtgcgtagagcgcggctaggccgaaacacagtgcagccagcagcaggcacccgccgcccgccgccagccgctgcccgcgcgtcacgctcgggaggcacgtcaggccggccgctgccgactccgcagggctccgcgcccacgtccagcgcaagcccgcgcggcccagccactcctccgccggccggtccccgggctcctccgccttctccgcggcgagcagcggctccgcggccgccgggccgccagctttcccctgcgccaggtactcctgcagctggcggtggaggtccgccatttccggccctccgctgaagcggttcggtcttcgggcggcaattggtcggcgacggcgaaaggggcagggcctgcggcgctcgcggaagtgccgcggtgcctgctctgcggacttttgtggtgtccccaagtaccgtggtcgcaggtgctgcctgtccgcttgcagtcgccctcccagcgcctgaccctcttccttgttcggagtaggcgcccttgcggtctggctaagtccctcaacctgcttctctattctgttctcagtttcggccacaggcctggcaacatccttgactccttcgcgccccttgtccaagactcggtgctgctgtcccatgtgtttggtgtcactctcgtgctctggacagcgccacgcccaggtggatgtaaggttaacggcttcctgctgtttggcttctcagcctttccatcccctcccttcaaccaggccttcgttccaccgtgccagcaaaattgttcattacaaaatcgccagacgctgtcggctagtgcgaaaattggtactgaggagtgggacattgctataaaaatacctgaaaatgtggaagtgactttggaactgggtaatgagcagaggttggaagagtttggagggctcagaagaagacaggaagatgaggggaaatttggaactcctacggactggttaaatggttgtgaccaaaatgctgatagtaatatggatagtgaaggccagggggaagatggcggctgctcctttggaggagcgggattgagaggatcggggtggggagaccaaacaagagagacatttctggctctgaaggcgaaccttcgctggccatttaggagctctgctcaaagccagacgagtcaggaaggggcagcaggtgccaggtccggcctcaaaggtggcaagaagaaccctttgaaactgcccaaaaagcaggccaagaagatgaataaggctttcaagcagaaacaagaaaaggaacgaaagaaacacaaggagctaaaagcgaaagcctcctggaaggggctccggccacaggtggaatttaaaaatctggcagaaaggagaggtgaagctgccgtgcctgggtgccccgtggtggccggacactcctggcggctgctcagtcttgcacgtggctgtgccaagcgggccaggcagctgctatttccctcagagaagttgctggcggcgctcagggaaggaagcacccgaggaggcggagcggcatctcagccacagagaaaactgcgggtctgcatgagagtcctggattctagtgttgaggatttccacatggatgggctgagtcgggagtggaactgctgtttagggcctgcacccacacgcctgccccctctggcttccagctgtgctgaccctactcccacgggccagaacaatggtgatgccagaggtcccttcagctgtgatagtcaaagatcttgtggttgtttctccttattctctaagacgagtagtattgcctggacgaggaacgccctacacagtgcctcgcaaaggctgactgtcatccctgtgtcatttgaggtttcagaagaggagccccgccgaggcatgagggccgtgctccccccagaggaagggatggttttcctggtcctgaagactttggtccagaggagaattttgatgcttctgaggaagcggcccgaggacgagatctcagaggtcgaggtcgggtacccacgag

SEQ ID NO: 128163 - DNA, 888 bp, Homo sapiens
atgattatctcaatagatacagaaaaggcccttgataaaattctacaccccttcattctaaaaactctcaataaactaggtattgatggaacgtatctcaaaataataagagctctttatgacaaacccacagccaacatcataatgaatgagcaaaagctggaagcattccctttgaaaagcaacacaaagcaaggatgcccttttttaccactcctattcaacatagtattggaagttctggccagggcaatcaagcaagagaaagaaataaagagtattcaaataggaagggaggaagtcaaattgtctctgtttgcagatgatatgattgtatatttagaaaaccccatcatctcagccccaaatctccttaagctgataagcaacttcagcaaagtctcaggatacaaaatcaatgtgcaaaaatcacaagcattcctatacaccagtaatagacaaacagagatccagatgatgagtgaacttccattcacaattgctacaaagggaataaaatacctaggaatactacccacttacaagggatgtgaaggacctcttcaaggagaactccaaacccctgctcaagaattagaaaaaactactttaaatttcatatggaaccaaaaaagagcccatatagccaagacaatgctaagcaaaaagaacaaagctggaggcgtcatgctacctgacttcaaactatactacaaggctgcagtaaccaaaacagcatggctgggggacgatcaggtctttctcatcccacgaggccatatttcagactatcacatggggaaaaaccttggacaatacccggctttccaggacagaggtccctgcggctttccacagtgcattgtgcccctggtttatcgagactag

SEQ ID NO: 128164 - DNA, 1546 bp, Homo sapiens
agggaaacaacagtgggtccaggggaccggcactcagcacaccaaggacctgcaccggcctctgagttccctcagtttttattgattatgattttcattatttcagcaaaaaggaatatactaggagagcagggtgataataaggaggtcaacaaaaaacatgtgagcaaaagaatctatatcataattaagttcaagggaaggtactatgcctggacgtgcacgtaggccagatttatgtctctctccacccaaacatctcagcggagtaaagaataacaaggcagcattactgccaacatgtctcgcctccctccacagggcagcttttctccgagctcagagttgaacaaatgtacgatcgggttttacaccgagacattcagttcccaggggcaagcaggagacagtggccttcctccatgtcaactgcaagaggctttcctctttgactaatacacctcagcacagacgctttacgggtgtcaggctgggggacagtcaggtctttctcatcccacgaggccatatttcagactatcgcatggggagaaactttggacaataccctgctttcaagggcagaggtccctgcggctttccacggtgcattgtgtccctggtttattgagactagagaatggcaatgacttttacaaagtatactgcttgtaaacatttggttaacaaggcacgtcctgcacagccctagatcccttaaaccttgattttatacaacataggtttttgtgtgctccaagttgggtcaaagcggctggggcaaagtggctggggcaaagctacaaatgaacaacatctcagcaaagcaattgtttaaagtacaggtccttttcaaaatagagtctcttatgtcttccctttcgacatagacacagtgacagtctgatctctctttcttttccctacatccaaggacttgaacatttcttgacttgttagcaatccaaatcgttatgtctccgaaacagagttgactcaggggaccgcagggctgggcaggacctttgacttcctatacatccacaggagcaagaaaacctcagccccgctctaccaacacgcacctagtaaaattccgccaattgaatctcacgcacgctaacacgtggggagcgttgcttgcaccacgagtccccatttggctcaaccgccgatgccaagtgtgtggttccggttgcgacggctccccgtgaagtggcttccggatgtgcgaatgaaccaggcagagtttcgctggccaagtagaccccagcaaagctgaagttaactcccacatttgggatgtacttcagaggtgaaacattcatccctcttctttccggatgtctgacaccgggcctttccatggttctccccctgatcctaagagtagctgaggtagagactcactgaaagatctaggcagggatatcccatcatgcacaggctctctccattctctgacctgggaacaactctcagcaggattgcatacctaggcggcctcggaactcagcgggatttgctgagacacaccaaatggctg

SEQ ID NO: 128165 - DNA, 2925 bp, Homo sapiens
atgttgattgaaccagccttgcatcccagggatgaagccgacttgatcgtggaggataagctttttgacgtgctgctggattcggtttgccagtattttattgaggattttcgaattgagtcaggatcctctgctgcaggtctcctggagtttgctggaggtccactccagaccctgtttgcctgggtatcaccagcagatgctgcagaacagcaaagtttgttgcctgttccttcctctggaagcttcatcccagaggggcacctgcagatgccagccatagctctcctgtatgaggtgtctgtcagctcctactgggagggggcatccagtacagcagtgacacacagtaaaggcttgcaaacatttgccaaatgcaaaaaattagtaacatttcaagaaggcatgagatgtccagaacagagctatccaaaggtgcagcaagttttagaaaatggggttagcaagagagtggattctgaggttccttgttttaattcttcaggaaatacgatcaatgagacagaaagagaacaaggatatccaggacttgaactcagctctgcaccaagcagacctaatagacatctacagaactctccaccccaaatcaacagaatatacattcttctcagcaccacattgcattgcacttattccaaaattgaccacacacttggaagtaaagcactcctcagcaaatgtaaaataacagaaattataacagactctcagaccacagtgctatcagaactcaggattaagaaactcactcaaaaaccgctcagctacatggaaactgaacagctcctgaatgactactgggtacataatgaaatgaaggcagaaataaagatgttctttgaaaccaatgagaacaaagacacaacataccagaatctctgggatacatttaaagcagtgtgtagagggaaatttatagcactaaatgcccacaagagaaagcaggaaagatctaaaattgacaccctaatgtcacaattaaaagagctagagaagcaagagcaaacacattcaaaagttagcagaagaccaataacagggctctgaaattgaggcaataattaatagctttaccaacccaaaaagagtcccaggaccagatggattcgacgagccgaatttctaccagaggtacaagcaggagctggtaccattccttctgaaactattccaatcaatagaaaaagatggaatcctccctaactaattttatgaggccagcattatcctgataccaaagcctggcagaggcacaacaaaaaaaaagagaattttagaccaatatccctgatgaacatcgatgcaaaaatcctcaataaaatactggcaaaccgaatccagcagcacatcaagaagcttctccaccatgatcaagtgggcttcatccctgggatgcaaggctggttcaacatatgcaaatcaataaatgtaattcagcatataaacagaaccagtgacaaaaaccatacgattatctcaatagatgcggaaaaggccttcaacaaaattcaacagctgttcatgctaaaaactctcaataaactaggtaccaatgggatgtatctcaaaatagtaagagctatttatgacaaacccacagccaatatcatactgaatgggcaaaaactggaagcattccctttgaaaactggcacaagacagggatgccctctctcaccactcctattcaacatagtattggaagttctggccagggcaatcaggcaggagaaagaaatacagggtattcaattaggaaaagaggaagtcaaattgtccctgtttgcagatgacatgattgtatacttagaaaaccccattgtctcagcccaaaacctccttaagctgataagcaacttcagcaaagtctcaggatacaaaatcaatctgcaaaaatcacaagcattcttatacaccaataacagacaaacagagagtcaaatcatgagtgaactcccattcacaactgcttcaaagagaataaaatacctaggaatccaacttacaagggatgtgaaggacctcttcaaggagaactacaaaccactgctcaatgaaataaaagaggacacaaacaaatggaggaacattccatgctcatgggtaggaagaatcaatatcgtgaaaatggccatactgcccaaggtaacttatagattcaatgccatccccatcaagctaccaatgactttcttcacagaattggaaaaaactattttaaagttcagatggaaccaaaaaagagcccacattgccaagacaatcctaagtcaaaagaacaaagctggaggcatcagactacctgacttcaaactattttacaaggctacagtaacaaaaacagcacggtactggtacgaaaacagagatatagaccaatggaacagaacagagcccctggaaataatgccacacatctacaaccatctgatctttgacaaacctgacaaaaacaagcaatggggaaaggattccctatttaataaatggtgctgggaaaactggctagccatatgtagaaagctgaaactggaccccttccttacatcttatacaaaaattaattcaagatggattgaagacttaaatgttagacctaaaaccatagaaaccctagaagaaaacctaggcaataccattcaggacataggcatgggcgaagactttatgactgaaacaccaaaagcaatggcaacaaaagcccaaattgacaaatgggatctaattaaactaaagagcttgtgcactgcaaaagaaactaccatcagagtgaacaggcaacctacagaatgggagaaactttttatagtctacccatctgacaaaggcctaatatccagaatctacaaagaacttaaacaaatttacaagaaaaaatcaaaccaccccatcgaaaagtag

SEQ ID NO: 128166 - DNA, 3350 bp, Homo sapiens
tgaggaggaagatggcggccggcaagagcggcggtagcgcaagggagattacttttctggaagctttggctagatcagagtctaagagagatggaggttttaaaaataattggagctttgatcatgaagaagaaagtgaaggagatacagataaagatgggacaaatctgctcagtgtggatgaagatgaggattctgaaacctcaaaaggaaaaaagttaaatcgtcgatctgaaattgttgctaatagctctggtgaattcatcttgaagacatatgtaagacgaaacaagtctgaaagttttaaaactttgaaaggcaacccaattggacttaacatgttgagcaacaataagaaattgagtgaaaatatgcaaaatacgtcattatgttctggaactgtagttcatggtagacgttttcatcatgctcatgcacagataccagtagtaaaaacagcagcccaaagcagtctggaccgaaaagaaaggaaagaatacccacctcatgtccaaaaagttgaaattaatcctgtaaggttaagtcggctccaaggtgttgaacgtataatgaagaaaacagaagagtccgaatcacaagtggagcctgaaattaagaggaaagtacaacagaaacggcactgtagtacctatcagcctactcctcctctatctcctgcttcaaaaaaatgtttaacccatttagaggatttgcaaagaaattgcagacaagctattactttgaatgagtctactggaccattattaagaacgtcaattcatcagaattctggaggacagaagtcacaaaacacaggattaacaaccaagaagttttatggcaacaatgtggaaaaggttccaattgatattattgtgaattgtgatgacagtaaacacacttatttacagactaatggaaaagtcattttacctggggcaaaaatacccaaaatcacaaacttgaaagaaaggaaaacaagtttgtcagacctaaatgatccaatcattttgtccagtgatgatgatgatgacaacgacagaactaacagaagagaaagcatatctcctcagcctgctgattcagcatgttcttcccctgcaccatccactggaaaagtagaagcagcactaaatgaaaatacttgcagagcagagcgtgaactacgaagcattccagaagactcagagttaaatacagttacattgccaagaaaagcaagaatgaaagaccagtttggcaattctattatcaacacacctctgaaacgtcgtaaagtgttttctcaagaacctccagatgctttagctttaagctgccaaagttcctttgacagtgtcattttaaactgtcgaagtatacgagtaggaacactcttccggctgttaatagagcctgtaattttttgtttagattttatcaagatacagctagacgaaccagaccatgatcctgtagagattatattaaatacctctgatctaactaaatgtgaatggtgtaatgtccgaaaattacctgtagtgtttcttcaagcaattccagcagtttatcaaaagctgagcatccaactgcaaatgaataaggaggataaagtttggaatgattgtaaaggagtaaataaattaacaaatttagaagaacaatatataattttaatttttcaaaatggccttgatcctccggcaaatatggtatttgaaagtatcattaatgaaattggtataaagaataacatctccaatttttttgcgaaaattccctttgaagaagctaatggcagacttgttgcctgtacaagaacctatgaagagagcatcaaaggaagttgtgggcaaaaggaaaacaaaattaaaactgtatcatttgaatctaaaatacaacttagaagcaaacaagaatttcagttttttgatgaagaagaagaaactggagaaaaccacaccatcttcattggcccagtagaaaagttgatagtatatccaccacctccagctaagggaggcatctctgttaccaatgaggacctgcactgtctaaatgaaggagaatttttaaatgatgttattatagacttttatttgaaatacttggtgcttgaaaaactgaagaaggaagacgctgaccgaattcatatattcagttcttttttctataaacgccttaatcagagagagaggagaaatcatgaaacaactaatctgtcaatacagcaaaaacggcatgggagagtaaaaacatggacccggcacgtagatatttttgagaaggattttatttttgtaccccttaatgaagctgcacactggtttttggctgttgtttgtttccccggtttggaaaaaccaaagtatgaacctaatcctcattaccatgaaaatgctgtcatacagaaatgttcaactgtagaggacagttgtatttcttcttcagccagtgaaatggagagttgttcacaaaactcttctgccaagcctgtaattaagaagatgctaaacaaaaaacattgcatagctgtaattgattccaatcctgggcaggaagaaagtgaccctcgttataagagaaacatatgcagtgtaaaatacagtgtgaaaaaaataaatcatactgcgagtgaaaatgaagaattcaataaaggagaatctacatcccagaaagttgctgataggactaaaagtgagaatggcctacagaatgaaagtttaagttccacacatcatacagatggcttaagcaaaatcagactaaactatagcgatgaatcacctgaagctggtaaaatgcttgaagatgaactcgtcgacttctcagaagatcaggataaccaggatgatagcagtgacgatggattcctcgctgatgacaactgcagttcagaaataggacagtggcatttaaagcctactatctgtaaacaaccttgtatcctacttatggactcactccgaggcccttctcggtcaaatgttgtcaaaattttaagagagtatttagaagtggaatgggaagttaaaaaaggaagcaaaagaagtttttccaaagatgttatgaagggctctaatccaaaagtaccacagcaaaacaacttcagtgactgtggtgtatatgtattgcagtatgtagagagcttttttgagaatccaattctcagttttgaactacctatgaatttggcaaactggtttcctccaccaagaatgagaacaaaaagagaagaaatccgaaacataattctgaagctacaggaagatcagagcaaagagaaaagaaagcataaggacacttactcaacagaagcacctttaggcgaaggaacagaacaatgtgtcaatagtatctcagattga

SEQ ID NO: 128167 - DNA, 1110 bp, Homo sapiens
atggggagttatggaccgagaggaaccgttttcgtgaagcgccgtcgtcatcgtcggcggtctcgttcccccggcccgtctgaacgtgggagcgcagcccgcctgacggctgagcccgaggcccgcaaccctgcggcgtctaccctcctccggcgcggcccctcatcccggcgagcacggcggcggtgtgggccatggattaagaaggaggcggcgtgggaggaggaagatggcggccggcaagagcggcggctcgggcaggacctacgaacccgtaccctcaacaagtctaaaggcggcatcgactcgagaattatatccctaggacagcacagtcaccccacccacgcaaagctttggctagatcagagtctaagagagatggaggttttaaaaataattggagctttgatcatgaagaagaaagtgaaggagatacagataaagagccgggcccgctcgacgcccctccacgaccaaatcgggaccacgagccccagggaaaggactatagcgtcgaagcgtcacccctactacattacaccaaagggcatacgttacgaacaagatacactatcacgaacgccaatcacgactatccggtcgaggcagcgcccgctaggccctcttaccgctagcccgcccccttctttccccacgctcgcgcccccgacgcaagccattaagccgagtttacatctaagggaaggaaaacctactcccactcccggagaaaggagcacacgtccacaccacccggaacctcctcgcaaggaatacgcgctttcctccctttacccacccacctacctactcgcccccactagcacggacctggggaacgcccaccccacccaggagccacaatttaacgttgacgccacccacccccgtcaaaaccgctttatcccggttgccgggaactcccctaagcggtcctcgcaattcccgatagttttcgccccaaaaaaaaacacgacccctccgtacctcgatttcgcagccatattaggcctacaccggcgccccccccgttctcggttcagaactagctacccccccaaggaatttcggtcttccccaccagagagaacggcacccagaaattaa

SEQ ID NO: 128168 - DNA, 297 bp, Homo sapiens
agtgcaaaagtcagtattatgctcttttcaggctggaaccatggagggtgtcgaagagaagaaggttcctgctgtgccagaaacccttaagaaaaagcgaaggaattttgcagatgctattcaatttctccaaactgtgtttcttgctttttagtataccctgctgaaaggtagacaggatgtactggctagtagaagaataacaccaattctataaaatttcttacagaaaaaaaatggtacaacgtatcagacagcatccacagagctgcactgtccaaaagagctggtggccac

SEQ ID NO: 128169 - DNA, 755 bp, Homo sapiens
ctggaaccatggagggtgtagaagagaagaagaaggaggttcctgctgtgccagaaacccttaagaaaaagcgaaggaatttcgcagagctgaagatcaagcgcctgagaaagaagtttgcccaaaagatgcttcgaaaggcaaggaggaagcttatctatgaaaaagcaaagcactatcacaaggaatataggcagatgtacagaactgaaattcgaatggcgaggatggcaagaaaagctggcaacttctatgtacctgcagaacccaaattggcgtttgtcatcagaatcagaggtatcaatggagtgagcccaaaggttcgaaaggtgttgcagcttcttcgccttcgtcaaatcttcaatgtgaaccttttgtgaagctcaacaaggcttcgattaacatgctgaggattgtagaaccatatattgcataggagtacccaaatctgaagtcagtaaatgaactaatctacaagcatggttatggcaaaatcaataagaagtgagttgctctgacagacaacactttgattgctcgacctcttggtaaatatggcatcacctgcatggaggatctgatcatgagatctatactgttggaaaatgcttcaaagaagcaaataacttcctgtggcccttcaaattatcttctgcattaagtggaatgaagaaaaaactacacattttgtagaaggtggagatggtggcaacagggtggaccagatcaacacgcttaatagaagaatgaactaa

SEQ ID NO: 128170 - DNA, 388 bp, Homo sapiens
atggctgaacaagaacagctctggtctgcagctcccagcatgatcaacgcagaaggtcaccaacatcaaagaccaaaggtagataaatcaacgaagatgaggaaaaaccagtgtaaaaaggctgagaattcaaaaaaccagaatgcctcttctcctccaaaggatcacaagaatgagtttgatgaattgacaaaagtaggcttcagaaggtgggtaataacaaactcctccaagctaaaggagcatgttctaacccaatgcaaggaagctaagaaccctgaaaacaggttagaggaattgctaactagaataaccagtttagagaagaacataaatgacctgatggagctgaaaaacacagcacgagaatttcgtgaagcatacacaa

SEQ ID NO: 128171 - DNA, 1145 bp, Homo sapiens
atgacaaggaactacgagtggcttctggaagctgaaagcagtccccagccaatagctttccagaaaatggagccccagccctacaactccaaggaactgaattctgccaacaaccagtgtcttctagagaaacccaagctaagacagagactaaaggacaaggaatatgaccaaggtcacactgctgttcaatgccaaagctgggtctatgtgctgactcctgactccttctgccaacagctcattctactgcccagcacagagaactttcatgaatgtagcagaagtgacactgcaggacatctgaggacaggccatgtggcttccaactggctctcagaacactcaccccaaacaatgccagctgccatgcaatgggacaaaaagatgcagaatacatcatcttggttcccccagaaggccccagaaaaagtcaaaccaatgagcaaactgtggcagactccttcccagaatgacaccctctacaaggctgtaaaagcgctgacattgtcctccccagaaaggaatagcatcaacaccaacaaaaaggatgtccacacagaaacttcatccaaaggtcaccaacatcaaagaccaaaggtagataaatccatgaagatgaggaaaaaccagcacaaaaaggctgaaaattcccaaaaccagaatgcctcttctcctccaaggaatcacaactcttcaccagcaagggaacgaaactggtcggagaatgagtttgacgaattgacagaagtagtcttcagaaggtgggtaataacaaactcctccgagctaaaggagcatgttctaacccaatgcaaggaagctaagaaccttgaaaaaaggttagaggagttgctaactagaataaccggtttagagatcaatcaagcagaagaaaggatatcagagactgaagatcaacttaatgaaataaagcatgaagacaagattagagaaaaaagaatgaaaaggaatgaacaaatcctccaagaaatatgggcctatgtgaaaaagaccaaaactacgtttgattggtgtacctgaaaatgacagggagaatggaaacaagttggaaaacacacttcaggatactattcaggaaaacttccccgaactagcaagataggccaacattcaaattcagg

SEQ ID NO: 128172 - DNA, 665 bp, Homo sapiens; identical to SEQ ID NO: 114790
  misc_feature (1)...(665): n = a,t,c or g

SEQ ID NO: 128173 - DNA, 1308 bp, Homo sapiens; identical to SEQ ID NO: 114791

SEQ ID NO: 128174 - DNA, 555 bp, Homo sapiens
aatttgcttcccggccaagaatttttccccaaaggaggggcgccccccggtttgttcttcaaaaaagatgcccttccttgaataaccctttcgtcccccccccattcttttatcggacacaaaaccccagcgagtggtcccccgcaaaagatcccaccccagccaagtcaagtaaacagtggggcgaccccacccccgtggaggcgtgctcgtttcgtgccccacccagggatttatatcgccgacccgtggggggcccccctgcaagcacgaatccctcgttgtgcctctggttgggaccccccggagaaaccagcccggcggtcatatccagcacagccagcgctgggcccccgtcctgacctgagcggttaccaccccccaccctgtaaactaggcggctgcagcaagcagaccttcgcatcaacacagcagacaccaaaaaccagtggagccccgctctctaccgcccggccccagcactcgctagctttcctgacacctggaactgtgcacctggcaccaagcggaaaataaactccaagcagccagtaa

SEQ ID NO: 128175 - DNA, 2663 bp, Homo sapiens
gcccgctgcagctgctcacgttgcctggcctgggccccaccctgcagaacgtggcccaggcctcgcctggctccagcacaattgtgacagtgcccgcaggggctgcccccgggcctgaggagcacacggccaccattgaggtggctgccatggcagaggaccacgagcggaagtagccgacaggagggcgaggcccctgggacggacagggctggctgtctctcagccgcggcagcagggagcgggcagaggccgcagggctggctcgggcaggtgggtcacgtggtctgcagaaccaaagagaggaatcgccaaaacaaatcacgagaagagagaaggggacagaacagcgagagcaacctggaaaaccggtcttcaggtcccacgtttcctcccccttttttcttgggaaatatatttttccatctgttgcttattaatactgtttacacattgggccttgatcaggagccaggtgggcgggggctagggggagcctgggtgcagcagagacagaggaagcagagccaggtgccgagcgcgaccctgcaggtgctggacgcggtgcagcaggtcacgaggcccccatgtctgcacccagccaggtccctggggacgttactaactcatgacttgggagctaagcccaagtgtgaaacctctggatcctatggatttggtttcttcccacagttttctgtaggtttagtgtggctggcgccccgttctcctccagttgggaacatgcacccggagcttggggtgcagatcctgatgggtgcctgcctcccccgcccccagccggtgctcaggtggcccaggggccgcacagacgaggcgtggtccaggcattgttgcacatgtactgagggtgtttttaagtgaattgcttagtaggcttctaggaagagtcagatttatagcattttcaaccaaaataatggtgagtgcctaggcttcccgagttagctctttgggtggcccctgagcccctgtgagtgcacttgaccgggtgcggaggtcctgggcagcctgtccctgagccggcccctcccaggggtctgagatccatgaggtgtgtccctagggcttcagtcctggggcagaggcataaacagaaccagtcactatggaggtcgaggattcccatgtgggcccttcagcttgggctgcttggccacggaacagcccttggctccctggcccccggcccccatgcagcccctgggctggcccttggtggtctctgtccaagggagagcccctgggtgttcaggaggctgccccgggtgggctgctcagggcagctgccgaaggtggagcccagagcctgtctggaagggctgtctgtggctgtcctgagacctggccttggactcacaaggaagaccaggctgaggcccctccaggccagggtcctggggcaggcatctcagggagcagccagcccaggcctcctgccgtctccaacagggcatgtcccgggaggaccctgagtgccagattcccctggacgctcctgctgattctgtcggcagttgaaggcccgtctgaggccccgcaatgcgagggtcctgtgtcccacttcactgctccgaagggaactggctggctgtccgtccagtgagcggcccagaccccacctctgcgccattgtcaccagggccctgtcctggctgccctcacccatgtcaagctactgaggctgtgtcttgtttgttttctctgttacatttttgtttgctgttgtcacagtcagctggtttcggcgtgatgttgaccttttgatgtacatactccgttttaaactcatttccactctagttgagttctgcagcatgcagcggtatgaccctacgggggtcaggagagccctgcggcccccacccaccagctcagaacctgtcactaatacagctgcctgtgaccctgggacccgcaaccttccagctgcttccctttgtcaaagtcacgagtgcgtctgccttgacagccctcgtcaacagaacttccagtgggttgtgggttcatttcctttctttttaagaacagggttgggaccttttctgcccctgccccttagctactgaggcatagggagaggaagttaatttcagagccatacaaaaataagccacaaccagcttcagaattaattcccaatcccccattccaccagggctgggagcccattcccagtgcttcccaaggccctcggggacatctaccgccaacccagctgcttctggcaggggctccaagccccagcgtggggaagggccctggagaagccctcatcctcatgggaaccacactgcagtgggtggggaaggttgttgtcagcaccgcccccggctcctccaggtcctgctggctcctcgggggcagggttccctggacctcccagttctgcgccttggggccagccagtactcagagaggaggaccttctcaaccacgtacagaacacgggttttcatggctgcctttggtttggttttctgagaagataggattggattggattttgcagagggtgagaacttctctgtgcctgctcagaggcgccctagggaagggccatgtttgagttttgctttgtatgttgttttgcaagtatctgcctggtactttgatttaaaataaaaacaattttcatagtt

SEQ ID NO: 128176 - DNA, 1042 bp, Homo sapiens
catcggggctactggctgcttggagtttattttccgcttggtgccaggtgcacagttccaggtgtcaggaaagctagcgagtgctggggccgggcggtagagagcggggctctcactggtttttggtgtctgctgtgttgatgcgaaggtctgcttgctgcagccgcagcacacggccaacacgctcacacgggctgagtgtgacaccacgggacagagttccacgtacacacagcacacggccaacaacacgctcacacgggctgagtgtgagaccacgggacagagttccacgtacacacagcacacggccaacaacacgctcacacgggctgagtgtgagaccacgggagagagttccacgtcctcctcacccagcgtccctgccagtgggttccatggccccccagtgccagcctgccgtctgctgccctctgccgtctgccatcacctgaaccctgcaggaaaacgtacacactgtccccagcgtcacgaagcagaccctatcacctcctccactcaaggtgtgagcttttggctgagacacccgccggttcacagcagccccattcccagcagccccagactgaaaacagctccaatgcgtatcaccaggcggctgaataaacaaaccgtggaacgtctgtacgacacaacactactcagacaaaaccaaaaccgaacacgtccgacccacacagaagcatggaggaatctcagaaacagttcagtgaaagaggccaaacacagacgagtattaaatgtgcggttccgtttctatgaagctcaggaacagacgaattctaaaaaccagacaaaagatctgaagagtcacctcaccagagacagagagaaggcaaagcagcagcttgtgaaagggtgcttcccatcacacatcattaggaaatctgcaaacccaaacaagaccaccaagggccagcccaggggctgcatgggggccgggggccagggagccaagggctgttccgtggccaagcagcccaagctgaagggcccacatgggaatcctcgacctccatag

SEQ ID NO: 128177 - DNA, 583 bp, Homo sapiens
tttggaacctcgggccacacagctcaggcacacaccatcggggctactggcctgcttggaagtttaattttccggcttggttgcccaggtgcacaggttccaggtgtcaggaaaagcttagcgagtgctggggccgggccggtaggagagcggggctctcactgggtttttggtgtcttcctgtgtggatgcgaaaggtctgctttgctgcagccgccctaagttaacagggtggggggtgggaggtggggaggggggcgagggatgcggagtggggagaggggcggggaggggctctggtggactagcgcctccgcaggccgtggggctcggtggtaaccgctcaggtcaggacgggggcccagcgctgtgctgtggtggactgatccgccgtgcttgctcctcgcgggatgccgaggcagtccaaaagggggcatgctgcgtgaaggcctgggcagtttcccgattgtctgcgggtggcagatacttggtgcttgagtggatcgtgctgttccgaaaaagaagtggcccccgaatgtgccgggtatcctttgtgaaacctgggggtgcgaatgtcctcccc

SEQ ID NO: 128178 - DNA, 2330 bp, Homo sapiens
aattcatagttccttcctgtggagaagggtctgaaatgggaatcagtggtagaaggggctggtctcctgggcagggcttacatccactgagtcctaagattcctttcctgatctgcacctacgcctggtctgtatggtggaatttgtcagctggaactcagaaacaacaacttgaaaaaaataataataattagaacatatttgcataagatagctatttactctggaaaccaacaacttttgagatttcccttgccctgtggacgcccagctcctgtcatccttccttaggtcctgcagtacagtcttcccctgaatgccaccggggacccagggggactccacccccctaaagcaagcacacacatacttcacagttgatgagttgctgggtcttttgagtcccagctcataaaaccctccctttactccaccaagcccgacgacccattgacttgaggaaggggatttctacaagtctcaggattttagaaagtctgtaaagccatccatgcttccagaaagcaccgatctgttgtagttgcaaaaacaactctgtaatttgttggagggtctcaaactgacagcccagccgagacttgggtgggaagcccctggatctgttctccctgacttgcgggggggagcagccactaaggactttatcaggaagcccacatggaggctcccccaggcttggggccacctggtgaagggcccttttgctcctggcagcctgaggcacagctgcctgtattgtcctcatctgttctgactgaaggatggaggtgctgaataaattaggcctcaggcctctaccaccagagagctggagaatgggttccacgtcatttcaagggactggaattttttatgttcagggagcattgggaatcttcttctttccagggaggaatttagccctgcaaggttaggacttgaagagggaaggtatttaataactgggcgaggatgggtgtggtggctcacacctgtaatcccagcattttgggaggctgaggtggccagatcccaaggtcagaagatcgagaccatcctggctaacatggtgaaaccccatctctactaaaaatacaaaaaaaaattagccgggggtgtgtggcgggtacctgtagtcctagctacttgggaggctgaggcaggagaatggcgtgaacctgggaggtggagtttgcagtgagctgagatcgtgccactgcactccagcctggccgacagagcaagactcttgtctcaaaaaaatatagaattaaactaaattaaaaaataaatggaaccacccagcccatcccctacccacctgtcctgcattttttttctccttatcactgtctcaccactagaggccagctccaccagggcaagggtttttccctgcctgccacttgtatgccgagtgtccagaacaaagcctagcacaaggaaaagaaaaaagccatccaggaggaggaggagagagaccaggccttgcaggccaaggcgagcctgaccatcccgctggtgccccgaaacggaagatgaccgcaagctggcggctctgctgaagttccacaccctggactcctacgaggacaagcagaaactcaagcggaccgagatcatcaagccgttctggtttcccttttgcccccggatccgcctccagcaagcaaggtcagcggcgtcctgaagaagctggcacagagccgcagaaccgcgcttgccacctcccccatcaccgtcggggacctgggcatcgtgcggcggaggtctcgggacgtcccggcagagcccccagcatgcggccgacacccccaagtcttgggaaccgggggtaccagaggaggctgcccaggaccggcccatgtccccccggagactgtcctccggaaaacaaactgagaccccccaagtgcagccaacccgaggggccaggaagggagccgtcaggacaagcccccttttcgccagcaggctcctcccaggaggcagctgacaccccccgacacgcggccacccctgcagtctcggctcctcccttcgtggcgggactactccgactcggagagtgacttgagcgatccccatcctggagactggacccgctctagaggcccggacacacccaggaggcccctcacagactgcagacccccggctcgcccaccagccctgggagagctcagatgccgcatccttccccagaccgcgccttcctgcaaccgtggagttatttatttggtcctggtgagggtgtttgtgccttgtgagactccggtacattaaagacctgtctcttcttccctgtcaaaaaaaaaaaaaaaaaaacc

SEQ ID NO: 128179 - DNA, 780 bp, Homo sapiens
attgtctccacccgcaatcatggtgagcctagagagatagcgcgaacgataaagacaatagtgtcagcacactcgcagaagcggactcgcagcaactacacggttctgaagcaaaaacacctggatgattgcctgcgacatgtatctgtaagaagatttgaatcatttaatctgttttcagtaacagaaggcaaagaaagggaaactgaagaggagcaaacagaacagctttccaggtctcaagaaaacagtcccctcgcagttggtccagtattgcccaagtttttaaatatcctggaagccaatggtgtaccaaaaggtaccggcatgaccccgtccaccccgcaccccggaccaccaccccgaccccggccccgcgccccacccgcgccaacaccacccgccgccgcgctcacccgacgccgagcccgcccaaccaccccgacacgacgccgcccaccaacgcaaccacccgacccacacccaaaacgacccccaccacacagcaagccacacccaccccagcaaccacccacaccacccacggcaacccccaccgaacaacaacgccacaccgccccacccacgccccgcccacccacaacacaccccccaagcacccccaaacacccagcacacccacaccgcgccgccacccacaaagaacacaaaaccacccacccctcaacgcacaacacaagacaaaggacgacaaaaaaaaccaagacggcaaccacaccacagcgagccaaacaagaaaagcccaaaagcacacattga

SEQ ID NO: 128180 - DNA, 1128 bp, Homo sapiens
atggcagcagaccacatacacaccacgcttcacacaccgcgacacgtacccacagcacggagaccaaacagggacacaaccacgtgtagcacccccgaacatacatatagatgcgccaatatattaccaacaacaaccaaaacgacaaacaagacaaaacacacagcgaccacaacgagtaaaaccaccccaactcacaaacaccccacacacacgcgagctgcagaccccccaacacacacccaccaagacaaccacaaagcaaccaccacaccaatacgacgaccacaccacacaagcacacccaacaaacacatatacaactcaatcacaacctaccagcaaacgcacaataacacacacagacacaatcatacgaaacacgacaacgaaacacacagccctacacaagcaacctcacacaagcaaacaaacaagatcaacaacacaccaacacaacacacaacaatcacagacccatacactgcactagcaagtccagcactcacagctaagcgaacacagagcgcatacaatgaacacatcgcagcgatcacgcatctcagcgtcgaacgatctcgagcgacagaacatgagctcagccagcgccgcaaacacgagcatcacacagaccgagcacacaccgacaacaacgaacacactatcagggtcgtccgaggagcgcagtacaccagcaacaaggagcacaaggaacaattgtcacgcgcgggcaaaggctcagacgcacaccgccagggccccacgacaaaagcacaccccccaaaaagagacaaaaacgccctaagtgggaaaaaacaccacaacacagttaaacacattcaatatggggacaaagccggccagggtacctcagcacccccagaggcctcacccacagctgcccagagtcctctacatccttcccgcctgcccccacctcaggcatgtccatcccccacctgccgccagagaggacaagagcccatcagaggaatccgccccacgacgtccccagagtctgtgtcagggctttgctgcttccccacagtgacgggctctgagtatgagacgatgctgacggagatcatgtcatgggctatgagcgagagcgggtcgtggccgccctga

SEQ ID NO: 128181 - DNA, 944 bp, Homo sapiens
cccacgcgtccgcgctaagatggcggcggcgtgagttgcatgttgtgtgaggatcccggggccgccgcgtcgctcgggccccgccattggccggtcaccatcacggtcaaaaccgctgcagcagcagaccttcaagatccgcatggagcctgacgagacggtgaaggtgctaaaggagaagatagaagctgagaagggtccgtgatgccttccccgtggctggacagaaactcatctatgccggcaagatcttgagtgacgatgtccctatcagggactatcgcatcgatgagaagaactttgtggtcgtcatggtgaccaagaccaaagccggccagggtacctcagcacccccagaggccttcacccacagcttgccccagagtcctcttacatccttccccgcctgcccccacctcagggcattgttccccatcccccaccttgccgccagagaggggacaagagcccatcagaggaatccgcccccacgacgtccccagagtctgtgtcaggctctgttccctcttcaggtagcagcgggcgagaggaagacgcggcctccacgctagtgacgggctctgagtatgagacgatgctgacggagatcatgtccatgggctatgagcgagagcgggtcgtggccgccctgagagccagctacaacaacccccaccgagccgtggagtatctgctcacgggaattcctgggagccccgagccggaacacggttctttccaggagagccaggtatcggagcagccggccacggaagcagcaggagagaaccccctgggagttcctgcgggaccagccccagttccagaacatgcggcaggtgatttcagcagaaccctgcgctgctgcccgccctgctccagcagctgggccaggagaaccctcagcttttacagcaaatcagccggcaccaggagcagttcat

SEQ ID NO: 128182 - DNA, 428 bp, Homo sapiens
ggaattccttgattccctgccccgcaagcccagcaccggttttgccgccttgtctcgaagggtcaaccatgccatctcctgcctcgggacggagagcgccctggaaaaggcggaggggccggtgaggagcagggcttccctcgcttcggggctttgagcttccctgtgaccgtcatttccttgtagcgtataattgggttggccattaataattgctcgataactgcataatggtgaaacctggtaccactcaaatgcaactttcttgctcgttttcacaagtcgatgttatcgaaatgaagcacttttctctgaattggtgtgggttttggaatgatttttgcagagatagtcacgaccttagtcacacaagagcgatggcaagattttcacccaagccatctgacttggaacccatggattaacca

SEQ ID NO: 128183 - DNA, 1455 bp, Homo sapiens
atggaaaaaatcacctggatacgtaaaacaaaaagggaggtacctgcagcttctcagaacagccctcagaaaagtaatggcctcactctcaactcagctgacaaacctggtaactgcaggctacagccttctgctaaacaagaaaacaaatccctggcaatgagcagctgtcaggaactcgggacactttcccagcccaattcacagaaggaaggccagaagcttaacccagtagtgtctgagtacctgcttggcaaagccttctacggccaaaatgaaaaccctgaatccactaccaggtgctctaggcctagttgtctgctgacttcagccacccaactgaaggcccaatccatgccttcaaaggtgcctgtccctgcatggatcggctggcttcttgtgggccacaaaccacgcacaccttctcagcaagctactgaacgatgggctcccccaagacaaggaaatcaaccaagaaaggaggggcactggatccagaaacgagacaagagaaggggagagggaattccaaggctgaaggggaagcagagccagggaaaagggatgcgcccaggagaaacgtggaaccgttgcgagtacctggggctacgaatgcaaattccccccgagacgcccctgagcctccgacctccagaccccaattcggttcgaacggtccctcagcccgaaacacggttggatcacaaccggccgatgtcccggcccatcttcccagttcccctggctcgccgcacggaactcccaggggctgcgccggcgggcgagccgagggctccccatcgccccgaccccgccgccttcgggtctccggcagggggtccccggcgcagctgcccccgacctaccagctcctcggctaccatcggggtgcgggatgcggagtccgcgcgccgccgccggcccccggctgtgccccgcggcccggcccgcagcgccgcgcttccgcagctcccccacgtgctagcccaggcggagagccgtcatctctccggtgcccgggagaggggccgggcgggacggtacagcaaccggaggaaccttgattccctgccccgcaagcccagcaccggttttgccgccttgtctcgaagggtcaaccaggccatctcctgcctcgggacggagagcgccctggaaaaggcggaggggccgaccttagtcacacaagagcgatggcaagattttcacccaagccatctgacttggaacccatggattaaccaactgccactggaggcaaatccagagaccaagggagcagtttatacagaaacagatgccggcattaacccacagggagttattgttacagactgaagaatagaaaaagaaaaagccaaatagagccttattccacccagcttagcttccatagaacattgtgaatgaaagagtagattcttgaaaaaaatctgggggtaaccaagttttcat

SEQ ID NO: 128184 - DNA, 393 bp, Homo sapiens
tgagccccagctgggggtggaagctgagccagggacagtcacagaggaacaagatcaagatgcgctttaactgagaagcccccaaggcagaggctgagaatcagaagacatttcagcagacatctacaaatctgaaggacaaaacatggttcaagcatctgggcacaggcgcaaagatccaggaaatatggtgcgaggaagatgagaggaagatggcgcgagagttcctggccgagttcatgagcacatatgtcatgatggagtggctgaccgggatgctccagctgtgtctcttcgccatcgtggaccaggagaacaacccagcactgccaggaacacacgcactggtgataggcatcctcgtggtcatcatcagggtgtaccatggcatga

SEQ ID NO: 128185 - DNA, 440 bp, Homo sapiens
gggttctgggccagggtttttaaggggattgtggcgggtgaggttctggagaattggggttgtcaattgctcaggtcaaggaagattaaatcatcatgatgtgaaaactgcattcttctgtgagtcggctccttgctgggaccttcagatcaagtatttttctcaactatcatatgtatgttcatcatgacatatgtgctcatgaactcagccaggaactctcgctccatcttcctctcatcttcctcgcaccatatttcctggatctttgctatcacggaccaggagaccattttggagccacgggtggaccgcctgtgcccagatgcttgaaccatgttttgtccttcagatttgtagatgtctgctgaaatgtcttctgattctcagcctctgccttgggggcttctcagttaaagcgcatcttgatcttgttcctc

SEQ ID NO: 128186 - DNA, 389 bp, Homo sapiens
  misc_feature (1)...(389): n = a,t,c or g
gaagctgagccagggacagtcacagaggaacaagatcaagatgcgctttaactgagaagcccccaaggcagaggctgagaatcaaaagacatttcagcagacatctacaaatctgaaggacaaaacatggttcaagcatctgggcacaggcgaacatacatatgatagttgagaaagacacatattctgatcatgaagaaataaacacaagttaaatatgactaagcagaaagatggaaggaccaggaatggtgatgctaacttggaaccacgatgcaggctctaaactcctctacaatcatcctcccttgtgagaaaaatacgtaagtcacttttaaaataaatagaaacctgaacacnnnnnnnnnnnnngggggcggcctttttaa

SEQ ID NO: 128187 - DNA, 775 bp, Homo sapiens
acagacatagactactgagctctactttccagcctgctctctcccaccctactttttcccagaggcttgttggcaccgtggattgcactttcagctccccacctgtccgtctgcaaagtggcctcattggtgtgccatttttactggtccagtcccaactacaaggggcatggcttggccatctaccccagttcctctccatgtccccatggctctcaagtgtctccaattccagctgtcccagctgccccgggcaagaggaggcgtgtgtgggcgaggctgctgggttacctattaactcagctgggagttgaagagccgatgggcagcaggcagacttgagtctcctttctgtccatgggctcgggccactgtctcaggtccacccgtggctccaaaatggtctcctggtccgtgatagcaaagatccaggaaatatggtgcgaggaagatgagaggaagatggtgcgagagttcttggccgagttcatgagcacatatgtcatgatggtgagtgggtgggcagcacgaagtgggtggggctccaccagggctgtccatgaaccccctccccatgctgaccccatgggtcacattgtccattccttgcctctgagctgggagcctggggaagcagtgaggaaagtaaggagtgggggctttctcatcaagtctttttggacagaaagggctcataatatgtgggggtcaaatgaaaccatgcactggggtatccggggcacggctggaaatggggagaagggaaacccagagt

SEQ ID NO: 128188 - DNA, 789 bp, Homo sapiens
tttgaagatgctgtgattcgaactgtcagtgggataagggggcagatcaagagagcactctgagctccagaaggagctttccaggatagctttgaggataagctgcggatgagcgatatggtcttcatgcgaactttggtatcttgtttccatcccagccttctataacccagtaacatctttgttgaaaccagtgggtgagaaagacacctggtcaggaatgtggaccacgggccaactcaggctcgcccatggtgtcagactaaagacaacgaaggactctctgtataagaacatacatatgatagttgagacagacacatattctgatcatgaagaaataaacacaagttaaatatgactaagcagaaagatggaaggaccaggaatggtgatgctaacttggaaccacgatgcaggctctaaactcctctacaatcatcctcccttgtgagaaaaatacataagatctaaggcacatgagatgatatgctttgtgtttgagtttctcctttatgttacgcatactgataaaattgttgatgccagttgatctgaaggtcccagcaaggagccgactcacagaagaatgaagttttcacatcatgatgatttaatcttccttgacctgagcaattgacaaccccccaattctccagaacctcacccgccacaatccccttaaaaaccctggccccagaacccctcaagcagacagatgtgaagcttgaggattccttcatctctttgcccaatggcattgtgattattaaactctttttctgctgc

SEQ ID NO: 128189 - DNA, 618 bp, Homo sapiens
ggcacgagggcagacttgagtctcctttctgtccatgggctcgggccactgtatcaggtccacccgtggctccaaaatggtctcctggtccgtgatagcaaagatccaggaaatatgatgcgaggaagatgagaggaagatggcgcgagagtcccctggccgagtccatgagcacatatgtcatgatgaaccatacatatgatagttgaggaaagacacatattctgatcatgaagaaataaacacaagttaaatatgactaagcagaaagatgggaagggccccaggaatggtgatgctaacttgggaacccacgatgcaggctctaaactcctctacaatcatcctcccttgtgagaaaaatacttgatctgaaggtcccagcaaggagccgactcacagaagaatgaagttttcacatcatgatgatttaatcttccttgacctgagcaattgacaaccccaattctccagaacctcacccgccacaatccccttaaaaaccctggcccagaacccctcaagcagacagatgtgaagcttgaggattccttcatctctttgcccaatggcattgtgattattaaactctttttctgctgcaaaaaaaaaaaaaaa

SEQ ID NO: 128190 - DNA, 384 bp, Homo sapiens
aatcactggacttgaagctttaaatgtttagcacacatctagcaaacgtctgtagccttctgtacaccaggcatatggtactgggtgagagtcttggggaataaaacagaatcagacattgcccatgaggagcccacagactagccagacggggtgggtgtctgtgttcttggtttggttgaagttgagttgacccctttatccgctgttgatttttgcttaggctaggtgtctgcctgtatcccagtgttcaggctggctagacggcggaagaagttcctatttgactgtcacttcccagatctgcttctcaccaagagagattctggtcttaatcgactatacagggtattgcagctcatggtgtagctctctcctcgtgcc

SEQ ID NO: 128191 - DNA, 505 bp, Homo sapiens
cctggcgctctacgtgctgttcctcgccgacgaggagttcgacgtggtagtgtgcgaccaggccatttgcatcccactgtccttgtgttcggagccaggccacaccgtcctcagcagtgtcatgtgttaaaaacgccaagctgaatatatcatgcccctattaaaacttgtacatggctccccattggtttttggagaaaagttcaagctttttaccttggtgtctgcctgtatcccagtgttcaggctggctagacggcggaagaagatcctattttactgtcacttcccagatctgcttctcaccaagagagattcttttcttaaacgactatacagggccccaattgactggatagaggaatacaccacaggcatggcagactgcatcttagtcaacagccagttcacagctgctgtttttaaggaaacattcaagtccctgtctcacatagaccctgatgtcctctatccatctctaaatgtcaccagctttgactcagtt

SEQ ID NO: 128192 - DNA, 1709 bp, Homo sapiens
gcggggtgcagttgcggctccagggccatggcggaggagcagggccgggaacgggactcggttcccaagccgtcggtgctgttcctccacccagacctgggcgtgggcggcgctgagcggctggtgttggacgcggcgctggcgctgcaggcgcgggggtgtagcgtgaagatctggacagcgcactacgacccgggccactgtttcgccgagagccgcgagctaccggtgcgctgtgccggggactggctcccgcgaggcctgggctggggcggccgcggcgccgccgtcttgcgcctacgtgcgcatggttttcctggcgctctacgtgctgttcctcgccgacgaggagttcgacgtggtagtgtgcgaccaggtgtctgcctgtatcccagtgttcaggctggctagacggcggaagaagatcctatttctactgtcacttcgcagatctgcttctcaccaagagagattcttttcttaaacgactatacagggccccaattgactggatagaggaatacaccacaggcatggcagactgcatcttagtcaacagccagttcacagctgctgtttttaaggaaacattcaagtccctgtctcacataggaccctgatgtcctctatccattctctaaatgtcaccagctttgacttcagttgttcctgaaaagctgggatgacctagtccccaaggggaaaaaattcctggctgctctccatcaacagatacggaaagggaaggaaaaatctggactttgggcactgggaaggccctagtacagctgcgtggaagattgacatcccaagattgggagagggttcatctgatcgtggcaggtggttatgacgagagagtcctggagaatgtggaacattatcaggaattgaagaaaatggtccaacagtccgaccttggccagtatgtgaccttcttgaggtctttctcagacaaacagaaaatctccctcctccacagctggcacgtgtgtgcttttacacaccaaggcaatgaggcactttgggcattgtccctctgggaaggccatgttacatggcagtgccccagttcatttgctgtttaattcgggttggaccctttgggagttccatttgaccacagtgttcacagggtttctgtgttgagcctgacccggtgcacttctcagaagcaatagaaaagttcatccgtgaaccttccttaaaagccaccatgggcctgggctgggaagagccagagtgaagggaaaaattttcccctggaagcattttacaggaacagctctaccgatatgtttaccaaactgctggataaacatacacgcaaggttgaatcatctttcctttccccttggatcaggaacccaagaaaacagatgcaggaagcaggtgggaacgctggtgagcaggatgttgcttctgccatgcttctactgctcagcggccccagcggggatgtggtgggaggaatgagggggctcttcagctatctgggggctcatctcaataatatacagcaggtcttcagacaagggacacagtatgggctgcctaaaatagctctcccagaagctttcaatcaaggccagaaagcagcagtttccacagcagcagtcgagagggttttgggagagccacaccacactgctgttttgtttagagcaggggtgttcaatcttttggctttcctggaccacaatggatga

SEQ ID NO: 128193 - DNA, 648 bp, Homo sapiens
atggagagcaaggaagagcagggtggtgtggcggaccaccagaaagccacacggggaatccccaccccccagccaagggaggtagtgagtgagcgtgctacccagcgtggaaaccgtgctttttccacgaaactgtgcaacccaaaaacaaacagaaagcaacaacaacagtatcaacaacaacagaaaggccgcacaaaaaccctacccaagggtcagcatcctcaaagatcgaaactagacaaactcacagagatgagaaagcatcaacaaaaaaacaccaaaaatccaaaaggccagagtccctgttctcctccaaatgattgcaacgtttctccagcaagggtgcataattggacaggggatgagatggaagaattgacagaagtaggtttcaaaaaatgggtaagaaaaaactgtgctgagctcaaggagcatgttctaacccaatgcaaagaagctaagaaccttgataaaaggttagaggagctgctaactagaaaaaccagtttagaaaggaacataaatgatctgatggagctaaaaacacagcatgagaactttgtaaagcatacacaagtatcaatagctgaatcgaccaagcagaagaaaggatatcagagtttgaagaccatcttgctgaaataa

SEQ ID NO: 128194 - DNA, 1649 bp, Homo sapiens
  misc_feature (1)...(1649): n = a,t,c or g
atgccggtcaaaggaggcaccaagtgcatcaaatacctgctgttcggatttaacttcatcttctgggtgagtgagcgcgactgccgcgcgctcctctcagggcccacctgttcgcgggccccggacactggccgcggccgcgagtgccggcagctggcactgcccgcaccgggcaggcaccgggcgggaagagagagcgccctgcggctgccagctggctccaaggccgggtccagagccgggcgggacggccgcgacgggcgcattcgggttggggtcagcgggactttatttggatccaccacaggtcttttcaaccaaagccttgcagaaacaggctttaccccatacacacagaagagcaacgacttccttgttaagagtctgaaaatctggcacacctacttcaagaatttccatcaggaggccaggctgtacatacgaacctccccaggttctaactggaactggttttgcacacttggcatagagtccccagagcagccaggcgtatatgaggggcagagaccaagggtggtcacaaagtcctttgcaagtctcacccttaagcgcgtggggactgtgttgttgctggcagccagaattaatgctgatgtcctgtatgtcttgcagcttgccgggattgctgtccttgccattggactatggctccgattcgactctcagaccaagagcatcttcgagcaagaaactaataataataattccagcttctacacaggagtctatattctgatcggagccggcgccctcatgatgctggtgggcttcctgggctgctgcggggctgtgcaggagtcccagtgcatgctgggactgttcttcggcttcctcttggtgatattcgccattgaaatagctgcggccatctggggatattcccacaaggatgaggtgattaaggaagtccaggagttttacaaggacacctacaacaagctgaaaaccaaggatgagccccagcgggaaacgctgaaagccatccactatgcggtatgtcgccttggcaaagacaccctcctgcgctttctccggattgtgtctgcacacaggttgaactgctgtggtttggctgggggcgtggaacagtttatctcagacatctgccccaagaaggacgtactcgaaaccttcaccgtgaagtcctgtcctgatgccatcaaagaggtcttcgacaataaattccacatcatcggcgcagtgggcatcggcattgccgtggtcatgccttccttcagatcaaaccaccctgatcctcatgtttcttcctatctcctagatatttggcatgatcttcagtatgatcttgtgctgtgctatccgcaggaaccgcgagatggtctagagtcagcttacatccctgagcaggaaagtttacccatgaagattggggggannnnnnnnnnnnnnnnnnnnnnnnnnnnnnnnnnnnnnnnnnnnnnnnntgccactaattttagtattcattctgcattgctagataaaagctgaagttactttatgtttgtcttttaatgcttcattcaatattgacatttgtagttgagcggggggtttggtttgctttggtttatattttttcagttgtttgtttttgcttgttatattaagcagaaatcctgcaatga

SEQ ID NO: 128195 - DNA, 1402 bp, Homo sapiens
cataaagagagtgagggttggcctccgcgggtatacaagctgtatcgtataaaaggggggcccataattaaggtgagacatggtcataattttttattatgtatcaaattgtcttcaattataagttaccactttgattaaagttgataggcatttgtatctatttaaagacaaaaaaattctttttatgtacaatatcttgtctagagtctagcaaaatataggtacctttcattgcaggatttctgcttaatataacaagcaaaaaacaaacaactgaaaaaatataaaccaaagcaaaccaaaccccccggctcaactaccaattgtcaattattgaatgaaagcattaaaaagacaaacattaaagtaactttcagctttttatcttagcaattgccagaatgaattactaaaattttagtgggcaaaaaaaacaaacaacaaacaacaaaccaaaacaaaaccaaccaaaccaaaaaatccccacgaatcttacatagggtaaaactttcctggctcaggggatgatagctgactctagaccatctcggcggttcctgcggatagcacagccacaagatcatacgtgagatcatgccaaatatcatggcccacggacatgcgcttgccccactagcgccgatgatgtggaatttattgtcgaagacctctttgatggcatcaagaacaggacttcacggtgaagagtttcgaagtacgtccttcttggggcagatgtctgagataaactgttccacgccccccagccaaaccacagcagttcaacgcatagtggattggcttttaagcgttttcccgcttggggctcatccttggttttcagcttgttgtaggtgtccgttgtaaaactccgtggacttccttaatcacctcatccttgtgggaatatcccccaaatggccgcagctatttcaatggcgaatatcaccaagaggaagcccgaagaacagtcccaagcatgcaactgggacttcctgcacaggccccgcagcagccccaggaagccccaccagcatcatgacgggcgcccggctcccgatcagaaatatagactcctgtcgaagaagctggaattattaatactagtttcctgcccgaagatgctcttggtctgagagtcgaatcggagccatagtccaatggcaaggacagcaatcccggcaagccagaagatgaagttaaatccgaacagcaggtatttgatgcacttggtgcctcctttgaccggcatggtgagggctaacttagcctgggccgaacgggtgcgggactggggggctgccgcagctgggactggcgggacctggtgctggatacagatgcaggcggctgtaggctggtctccggctgcacttttaaaaagtgccactccacgaaa

SEQ ID NO: 128196 - DNA, 1335 bp, Homo sapiens
tcagcactgagccgccgcagcagcacagggctgggggctcccggagctgcggccagccggggttcggccagagccgcggaggctgcccggtggtaggtgcgactcttcaccctccggggagcggcggccgacgacccaacccacccgcagcgctgccgtcgcccggctggtcccccgcgcgggcacaaaaacaggcggcagttcgccaggtctcttttcccaaacctgaaccgccaagccgaaggttcttccaaagtccggttccccgggcttcacacccgccgggcaggcgcgaaccagccccaggcaaccattttcctcttcactgtatctgagtcgttgtccatctgactcgatgtcacctgattttcccagctgtgacctccagcgacgggactccgaggactgattccagcgtctcgattctctccgcctctccgcccgttttggctgagcggtttgcagccgtcggggcagaaggggtgggatgtggcagccaccagcccagcccagagaagaaaagaggacgaaattaacgcgaaaggacaccggagtctgaaagcgactccctcggatcctcggaatccgaggcaaaccctgctgcccggacacatccagagctggccgacgggtgcgcgggcgggcggcggcaccatgcagggaagctgccaggggccgtgggcagcgccgctttctgccgcccacctggcgctgtgagactggcgctgccaccatgttccccagccctgctctcacgcccacgcccttctcagtcaaagacatcctaaacattactgtgcggccgcgctcgtaggtcaagccgctcttaccaagcgtctctctgcctctctgttccccccagagctgtgcgcgctgcagaaggcggtggagttgcgtgatactgtcggctgtgcggggtaattgatatgcaggttctagagcccacagggattgcacgcagtagcaactcagggagtgtccaacagctgcatgggtatcacgagccgagtccacaacactcaaagcgtccactgacgtcgacgggggtgagaaggggctccacaacaggacgaggaggcacactggtattttgcattcactcctgcggagactaggaacttttctgtcccacgcgcgtttgttcttgcgcacgggagagtttgtggcggcattatgcagcgtgcaatgagtgatcctgcagcctggtgtcttagcttgggagtggtagttgctcagtgagtccatggtgctgaatgagtggctatgaattggcttcccatggggctcctgttcagggaggaatttactgatctgatgctgagagatctggttcat

SEQ ID NO: 128197 - DNA, 452 bp, Homo sapiens
  misc_feature (1)...(452): n = a,t,c or g
tnnnnnnnnnnnnnnnnnnnnnnnnnnnnnnnnnnnnnnnnnnnnnnnnnnnnnnnnnnnnnnnnnnnnnnnnnnnnnnnnnnnnnnnnntgcccagccggaaaaccattggtacttgccccaggtaggaggaggagcagagaacagaaggtttctgtggagctgcgttaatcaccaaggagaggcagatggctccaagcccacagagtgtgaccnnnnnnnnnnnnnnnnnnnnnnnnnnnnnnnnnnnnnnnnnnnnnnnnnnnnnnnnnnnnnnnnnnnnnnnnngaaagattgctgcctgttccttcccctggaagcttcatcccagaggggcacccgccagatgccagccagagctctccgagatgccctgcccagagaggaggaatctagagaggcagactggatacagcagctttgcnnnnnnnnnnnnnnnnnnnnnnnnattg

SEQ ID NO: 128198 - DNA, 647 bp, Homo sapiens
gcttactctactccttacgctactgacaatgaagaaattaatgttacctcaactgacagtgaagtggagattgtaacagttggagaaagctatcggtctcgttcaacccttggacactccagatctcattggagccagggttcaagttctcatgcaagtcggccacaggagccacggaaccgcagtaggatttctactgttatacagcccttgaggcagaatgcagcagaagttgtggaccttaccgttgatgaagatgaacctactgtagtaccaaccacttctgcaagaatggaatcacaagctactagcgcttccattaacaattcaaatccatctacctctgagcaggcctctgatactgcttcagctgtcaccagtagccaaccttccacagtgtcagagacttcagctactcttacaagcaatagtaccactggcacttctataggagatgactcaaggaggactacatctagtgctgtaacggaaactggccctcctgcaatgccaaggttaccttcctgctgtccccagcactcaccatgtggagggtcgtcacagaaccaccatgcattaggacatcctcatacaagttgctttcagcagcatggtcaccattttcaacatcatcaccaccatgtatt

SEQ ID NO: 128199 - DNA, 2905 bp, Homo sapiens
gttaaatcacctaaattattggaataagcatatcggtgttggatttttttaaaatgcagtaatattttggtaacacgtctgttcgatattgcagtttagctttgtgaacgctttctttaccaaatgttattagagagcttgtatttttaaagtttttttatttattaattataaacacattagcttacattaaaaatataaccctttatctaatttgttttgaaatgctaagttgacattttgtattttgtagaacctactgtagtaccaaccacttctgcaagaatggaatcacaagctactagcgcttccattaacaattcaaatccatctacctctgagcaggcctctgatactgcttcagctgtcaccagtagccaaccttccacagtgtcagagacttcagctactcttacaagcaatagtaccactggcacttctataggagatgataagactattccagcaaacgaaacgcttatttggtgcaacgacttggaatgcccccaggggaggaattggttaggcggcggcggcggcgaagcggcggcggcggctgtaggggagcagcggcagtggcggcgacggcgaggaggtgttcggtttgcgcagcgtagaaacgcccgcagcttcagagaaggagttcttgtgggaccaaattaggcattctgaacccacgccggcttagctgggccgagtccaggcgctgccgcacgtacagttttggtggcggggacagacactgttcttgactctaggggcctattacgccgacgtctgaggcgcagatcgctggctctcgacgcattactctttacgccttacatttctgtcttccttcctggggcagtgattcccggaccctggaagagaagaggggggctaatgattaaggctttccttaaagtttcccatgtctcaatggactcctgaatataacgagctctacaccttaaaagtggatatgaagagtgagattccttctgatgcaccaaagacacaggagagtctgaaagggatccttttgcatccagagcccattggggcagccaaaagttttcctgcaggagttgagatgattaatagtaaagtggggaatgaattctctcacctgtgtgatgattctcaaaagcaagagaaggaaatgaatggtaaccagcaagaacaagaaaaaagtctcgttgtgaggaaaaaacgcaaaagccagcaggctggcccttcgtatgtgcagaattgtgttaaagaaaaccagggaatattaggactgaggcaacacctagggacaccaagtgatgaagataatgattcctcttttagtgattgtctttcttctccttcatctagtctgcattttggagattctgatactgtgacttcagatgaggataaagaagtctctgtaagacattcccagaccattttgaatgctaaaagtagaagccatagtgcacggtctcataagtggcctcggactgagacagaatctgtatcgggattgttaatgaaaagaccctgtttacatggcagttcgttacggagacttccatgcagaaagagatttgtaaaaaataattcctcacagaggacacagaaacaaaaagagaggatattaatgcagaggaagaaacgagaagtgttagctcgaagaaaatatgccttgctacctagttctagtagttccagtgagaatgacctcagcagtgaatcctcttctagctcatcaactgaaggagaagaagatttgtttgtttctgccagtgaaaaccaccaaaacaatccagctgttccctcagttacctatggtcaaccatggtccaaaaatattaaagaaaaaactctagaaataaacagctcacaagctttaaccgcttatgaatgcctacacagtgcccatgtcattaacctcatttcgccattttatcatcattttccgtcatcacaagaaagatcatacctttccactctgagcaccctttctaacaagaagactggctcagtatggttcactaggtcgcccaaggtcacacagttcttccctgggggagccatcacaggaactctgagtcaaaggcctgaaagggaaatcctccgaccccttgcgcttcccgggaaaggcaacactccaccctacttctgctcgccctccatgggctgcacccactgtccaaccagtcccaatgagatgaaccagggcatctctgaagatacggcagcagccccagtcagggacatatacataaaacccccatctccctgggacagagcacctgggggaaggggcggctgtgggcacagcttcagcagacttaaaagtccctacctgagagctctgaagagtgcagcagatttcccagcacagcattcgagctctgataagggacaggctgcctcctcaagtgggtccctgacccccgtgtatcctgtctgggtgacacctcccagtaggggccgacagacacctcatagaggagagctctggctggcatctgacgggtgcccctctgggaggaagcttccagaggaaggaacaggcagcaatctttgctgttctgcagcctccgctggtgatacccaggcaaacagggatcacaactcctcaccagcacgggaacaaacctggacagagaacaagtttgacaaactgacagaagcaggtttaagaaggtgggtgataaactcctccgagctaaaggaacctgtgctaacccaatgcaaggaagctaaaaaccttgaaaaaagattagacgaatcgccaactagaataaccagttcagagaagaacataaatgatctaatggagctgaaaaacacagcacaagaacttcatgaagaacacacaagtatcaatagccaaatcaagcagaataaaggatatcagagattgaagatcaactcaatgaaataa

SEQ ID NO: 128200 - DNA, 739 bp, Homo sapiens
ctgaaccggggcgagcagagagctgtcagatactatagccatatgaagttgaacatggcagaagaagaggactatatgtctggattccttcattaatgtccaagaagatatcagaccaggattgccaatgctaaggcaaatccgagaagcccgtcgaaaagaagaaaagcaacaggaagccaatttgaaaaacaggcagaagagtttaaaagaagaagaacaagaaagacgtgacattgggttgaagaatgcactaggctgtgaaaacaaagggtttgccttgctccaaaagatgggctataaaagtggtcaggcacttggcaagagtgggaaaagtggcattggtcatgaggcatcattaaaacggaaagcagaggaaaaattggaaagctacagaaaaaagattcacatgaaaaaccaagctgaagaaaaagctgcagaacagtttcgaatgcgacttaaaaataagcaagatgaaatgaagctagaaggagatctcagaagaagccagcgagcctgtcaacaactggatgtccagaaaaatattcaggttcccagggaagcatggtactggttgaggcttgaagaggagactgaagaagatgaagaagaaaaagaacaggatgaagatgaatataagagtgaagatttaagcataaagaagacctatcttcaaattgtccaggaccaacttctgcagatcatgactaagattattcccaataaagtggaaacttga

SEQ ID NO: 128201 - DNA, 1863 bp, Homo sapiens; identical to SEQ ID NO: 117889

SEQ ID NO: 128202 - DNA, 1206 bp, Homo sapiens; identical to SEQ ID NO: 127397

SEQ ID NO: 128203 - DNA, 1119 bp, Homo sapiens; identical to SEQ ID NO: 117891

SEQ ID NO: 128204 - DNA, 1410 bp, Homo sapiens; identical to SEQ ID NO: 118421

SEQ ID NO: 128205 - DNA, 1734 bp, Homo sapiens; identical to SEQ ID NO: 122732

SEQ ID NO: 128206 - DNA, 906 bp, Homo sapiens
atggggaaaaaacagaacagaaaaactggaaactctgaaaaccagatcgtctctcctcctccaaaggaacacagctcctcaccagcaatggaacaaagctggacagagaatgattttgatgagttgagagaagaaggcttcagatggtcaaactactctgagctacaggaggaaattcaaaccaatggcaaagaagttaaaaactttgaaaaaaacttaaacgaatggatacctagaataaccgatgcagagaagtccttaaaggagccgatggagctgaaagccaaggctcgagaactacgtgaagaatgcagaagcctcaggagcagatgtgatcaactggaagaaagggtatcagtgatggaagacgaaatgaatgaaatgaatgaaggggagaatggaaccaagttggaaaacactctgcgggatattatccaggagaacttccccaatctagcaaggcaggccaacattcagattcaggaaatacagagaacgccacaaagatactcctctagaacagcaactccaagacacataattgtcagattcaccaaagttgaaatgaaggaaaaaatgttaagggcagccagagagaaagaacaggttacccacaaagggaagcccatcagactaacagcggatctcttggcagaaactctacaagccagaagacagtgggggccaatattcaacattcttaaagaaaagaattttcaacccagaatttcatatccagccaaactaagcttcataagtgaaggagaaataaaatcctttacagacaagcaaatgctgagagattttgtcaccaccaggcctgccctaaaagagctcctgaaggaagcactaaacatggaaaggcacaactggtaccagctgctgcaaaaacatgccaaaatgtaa

SEQ ID NO: 128207 - DNA, 729 bp, Homo sapiens
aggaacacagctcctcaccagcaacggaacaaagctggatggagaatgactttgatgagttgagagaagaaggcttcagacgatcaaactactctgagctaaaggaggaagttcgaacccatggtaaagaagttaaaaaccttgaaaaaaaattagatgaatggctaactagaataaccaatgcagagaagtccttaaaggacctgatggagctgaaaaccacagcaagagaaatatgtgacgaatgcacaagtctcagtagccgatgtgatcaacttccacgaccagatggattcacagccgaattctacgagaggtacaaggaggagatggtaccattccttctgaaactattccaatcaatagaaaaagagggaatcctccctaactcactttatgaggccagcatcatcctgataccaaagcctggcagagacacaacaaaaaaagagaattttagaccaatatccctgatgaacattgatgcaaaaatcctcaataaaatactggcaaaccgaatccagcagcacatcaaaaagcttatccaccataatcaagtgggcttcatccctgggatgcaaggctggttcaacatatgcaaatcaataaacataatccagcatataaacagaaacaacggcaaaaaccacatgattacctcaatagatgcagaaaaggcctttgacaaaattcaacaacgcttcatgctaaaaactctcaataaattag

SEQ ID NO: 128208 - DNA, 909 bp, Homo sapiens
atgaaggcagaaataaagatgttctttgaaaccaacgagaacaaagacacaacataccagaatctctgggacacattcaaagcagtgtgtagagggaagtttatagcagtaaatgtccacaagagaaagcaggaaagatctaaaattgacaccctaacatcacaattaaaagaactagagaagcaagagcaaacacattcaaaagctagcagaaggcaagaaataactaagatcagagcagaactgaaggaaatagagacacaaaatacccttcaaaaaatcaatgcatccaggagctggttttttgaaaggaccaacaaaattgatagacctctagcaagactaataaagaagaaaagagagaagaatcaaatagatgcaataaaaaatgataaaggggatatcaccactgatcccacagaaatacaaactaccatcagagaatactataaacacctctacgcaaataaactagaaaatctagaagaaatggataaattcctcgacacatacaccctcccaagactaaaccaggaagaagttgaatctctgaatagaccaataacaggcgctgaaattgaggcaataattaatagcttaccaaccaaaaaaagtccaggaccagatggattcacagccgaattctaccagaggtacaaggaggagctggaatgcagctcctcaccagcaatggaacaaagctggacggagaatgactttgacgacttgagagaagaaggcttcagacgatcaaacttctctgagctaaaggaggaagttcaaacgcatcgcaaagaagctaaaaaccttgaaaaaagattagaaaaatggctaactagcaataaccaatgtagagaagtccttaaattacctgagagagctgaaaaccatggcacgagaactatgtga

SEQ ID NO: 128209 - DNA, 972 bp, Homo sapiens
atgggcttagaaatcccattgattaatacaaagagtaaacctggcttcactttggaatgcagctccgcaccagcaatggaacaaagctggatggagaatgactttgatgagttgagagaagaaggcttcagacgatcaaacatctccaagctaaaggaggaagttcaaacctattgcaaagaagtgtgtagagggaaatttaaagcactaaatgcccacaagagaaagcaggaaacatctaaaattgacaccctaacatcacaattaaaagaactagagaagcaagaggaaacacattcaaaagctagcagaaggcaagaaataactaagatcagagcagaactgaaggagatagagacacaaaaaacccttcaaaaaatcaatgaatccaggagctggttttttgaaaagatcaacaaaattcatagaccgcttgcaagactaataaagaagaaaacagagaagaatcaaataaatgcaataaaaaatgataaatgggatatcaccaacaatctcacagaaatacaagctaccatcagagaatactataagcacctctatgcaaataaactagaaaatctagaagaaatggataaattcctggacacatacaccctcccaagactaaaccaggaagaagttgaacccgtgaatagaccaataacaggctctgaaattgaggcaatcactaatagcctaccaacaaataaaagtccaggatcagatggattcacagtcgaattctaccagaggcacaaggaggagctggtaccattccttctgaaactattccaatcaatagaaaaagagggaatcctccctaactcattttatgaggccaacatcatcctgataccaaagccttgcagagacacaacaaaaaaagagaattttagaccaatatccctgatgaacatcgatgcacaaatcctcaataaaatactggcaaacggaatccagcagcacatctaa

SEQ ID NO: 128210 - DNA, 690 bp, Homo sapiens
atggagagtctgagatcctctgtggacctgggccctggactgacccttcagaagctgggcaaggtggtggtggagctcctgccacatgatctcagtccacaactcactgtccacaaactccaggtggagacactggtgtgtttgcctctcatcgggttattgcctaactgggaggcatcccccagtaggggcagactgacacctcacacggccgcgtacccctctgagataaaacttccagaggaacgatcaaacagcaacatttgctgttcagcaatattcgctgttctgcagcctctgctgctgatacccaggcaaacaggatctggagtggacctccagcaaactccaacagacctgcagctgagggtcctgactgttagaaggaaaactaacaaacagaaaggacatccacaccaaaaccccatctgtatgccaccatcatcaaagaccaaagaacacagctcctcaccagcaatggagcaaagctggatggagaatgactttcatgagttgagagaagaaggcttcagacgatcaaacttctccaagctaaaggaggaagttcgcacccatcgcaaagaagttgaaaaccttgaaaaaagattagacgaatggctaactagaataaccaaagtagagaaggccttaaatgacctgatggagctaaaaaccatggcacgagaatga

SEQ ID NO: 128211 - DNA, 714 bp, Homo sapiens
atggctataattcaaagagataatacggccttggccaatcttccttttatgaatgaggagataagtgctaaggattttagtacagtgctcctggctgtcatatttctaaaaaaatcaagtcagcagctggtggcaaataaaccagtgctctctctttcactacctgtaacttgggtcctggaaccaatgtcctatgggtaccaaggaatggctgaattgagactttcaagggactatgagtctatgcagatgtgtacttttagagggagtttaagcaatgaacaatgcctagaccaagagttgcattcaccatttgcaaggaaagagaaagaacccaagaagagaaacaagcaggcaagcagagaagaatcagaaaaagagaagaaaagggagccggagaggcatttgacaacaactgagcggtgtgattttcccgtaagaaaagtgaagatacagaggacagctatagaaaggcttaacaaacggcacaccaggagattatatcctgcacctggcttggaaggtcctacgcccacggagcctcgctcattgctagcacagcagtctgagatcaaactgcaaggcagcagtgaggctggggaacgcagctcctcaccagcaacggaacaaagctggacagagaatgactttgacaagttgagagaagaaggcttcagaagatcaaactactctgagctaaaggaagaagtttga

SEQ ID NO: 128212 - DNA, 834 bp, Homo sapiens
  misc_feature (1)...(834): n = a,t,c or g
atgggaaaaagacagagcagaaaaactggaaactctaaaaatcagagtgcctctcctcctccaaaggaatgcagctcctcaccagcaatggaacaaagctggatggagaatgactttgatgagttcagagaagaaggcttcagacgatcaaactactctgagctacaggaggaaattcgaaccaacggcaaagaagttaaaagctttgaaaaaaaattagacgaatggataactagaataaccaatgcagagaagtccttaaaggacctgatggagctgaaaaccaaggctcgagagctacatgatgaatgcacaagccntcagagctggttttttgaaaagatcaacaaaattgatagactgctagcaagactaataaagaagaaaagagagaagaatcaaatagatgtaatgaaaaatgataaaggggatatcaccaccgatcccacagaaatacaaactaccatcagagaatactataaacacctctatgcaaataaactagaaaatctagaagaaatgcataaattcctcgacacatacatcctcccaagactaaaccaggaagaagttgaatctctgaatagaccaataacaggctctgaaaatgaggcaataatcaatagcttaccaaccaaaaaaagtccaggaccagatggattcacagccgaattcaacaagagagggcaagatgagctagtggatgattacaaaccaagagatactgtaggaaaattagaagaaaaaaatcaaaaaccaactttagagaagaaaaaatttgaccgaggaggagagaccgaggcaagttttagaacgggagtgaaagcttactga

SEQ ID NO: 128213 - DNA, 747 bp, Homo sapiens
atgagagaaaagacatcactacagattcgtccgggaattattaggattatagggggatattatgaacaactttatgtcactaaaaatgatagtacagagcgggggtccccagcctccaggccacagactgataccagtccatggcctgttaggaaccggaccgcacagcaggaggaagagtgtaacttgagcaaagagattctgcagctgagtcacaccctgaagaagctgacagctatatccagtctgctgactgctctctccagagctgagcagtatggcaaaagcaaagtccctgaatgtgtcattagaagtgatggggattacctttccctgacagtcaatccaggcagtttcagtcgtgttgatatcactctaagctccaggggtgggcatgtgaccgaagcctggccaatcacagatgtttcttccagtggccacagagattggttcagggattggcacaggatcaaattcaagccagaatgcagctcctcaccagcaatggaacaaagctggatggagaatgactttgatgagttgagagaagaaggcttcagaagatcaaacttctccaagctaaaggaggcagttcgaacccatggcaaagaagttaaaaaccttgaaaaaagattagacaaatggctaactagaataatcaatgaaaagaagtccttaaaggacctgatgcagctgaaaaccatggcacaagaactacgtgacaaatgcacaagcttcagtagctga

SEQ ID NO: 128214 - DNA, 1479 bp, Homo sapiens; identical to SEQ ID NO: 117895

SEQ ID NO: 128215 - DNA, 813 bp, Homo sapiens
atggggaaaaaacagagcagaaaaactggaaactctaaaaagcagagcacctctcttcttccaaaggatcgcagttcctcaccagcaatggaacacagctggacggagaatgactttgatgagttgagagaagaaggcttcagaagatcaaactacgagctacaggaggaaattcaaaccaaaggcaaagaagttaaaaactttgaaaaaaatttagacgaatgtacaactagaataaccaatacagagaagggcttaaaggagctgatggagctgaaagccaaggctcgagaactacaaatacaaactaccatcagagaatactacaaacacctctatgcaaataaactagaaaatctagaagaaatggataaattcctccacacatatactctcccaagactaaaccaggaagaagttgaatctctgaatagaccaataacaggagctgaaattgtggcaataatcaatagcttatcaaccaaagagtccaggaccagatggattcacagccgaattctaccagagggcttgcgtttcaagaaagcccatgtaacacatcctgaactgaaagccaccttttgcctaccaatacttggtgtaaagaagaatccctcatccccactgtatacaactttgggtgttattaccaaaggtactgtcattgaagtaaatgtgagcgaattgggccttgtgacacaaggaggcaaagttatttggggtatacattcaaaagaaatgaaagcagagactcaaacaggtatctgtacaccaacattcattgaagcattattcacaatagccaaaaggtag

SEQ ID NO: 128216 - DNA, 651 bp, Homo sapiens
aaacaggtgtccctaagggcaagaatactgtgaatgctgttgttcctctgggtctagatgcccagtgtggctgccatactctaggctgctgcttggaatgcctgcaaggaatccagagatatggcctgtcctcaagtctcccagcagtgggtaccagtaccagctctgatgggggtggcaggaaagtgacacagactgaacgcagctcctcaccagcaatggaacaaagctggaaggagaatgactttgacgtgttgagagaagaaggcttcagaagatcaaactactctgagctaaaggagaaagttcgaaccaatggcaaagaagttaaaaaccttgaaaaaaaagtagacgaatggctaactagaataaccaatgcagagaagtccttaaaggagctgagaccaagtctacgtctgattggtgtacctgaaagtgatggggagaatggaaccaagttggaaaacactctgcaggatattatccaggagaacttccccaatctagcaaggcaggccaacattcagattcaggaaatacagagaacgccacaaagatgctcctcgagaagagcaactccaacacacgtaattgtcagattcaccaaagttgaaatgaaggacaaaatgttaagggcagccagagagaaag

SEQ ID NO: 128217 - DNA, 1069 bp, Homo sapiens
tgtagatgggcactggggtacagtgagcggtcctggcaaagaaggagaggagagcggctggatgagcattcagagagcccttcggaaacgacctttttccaaatccaaaagaaaaacaggctcaggcagagaccgggcgttgagtaagagctccccagttcgtgcctgggaaattaacagggaatggcacatcaatcgcgggctagcccccaacctccccggagtccgcagctccggctttctcttctctgctaagtgctgcgagactgtggaccatactttaagaaatgctcccctagatcctcaactggttagatcaagatcacatggcttgcctggcactgtgcctctaaggagccactacatcctggccaagataatcagccccatgaatttcaagtgggcagagctgaagctacaagctcctaaatgcactggactctccaacaccctgtgctgcatcctgaacatgatggaacgcagttcctcaccagcaacggaacaaagctggacggagaatgactttgatgagttgagagaagaaggcttcagacgatcaaactactccgagctacaggaggaaattcaaaccaaaggcaaagaagttaaaaactttgaaaaaaatttagacgaatgtataactagaataaccaatacagagaagtgcttaaaggagctgatggagctgaaagccaaggctcgagaactacctgaagaatgcagaagcctcaggagccgatgcaatcaactggaagaaagggtatcagtgatggaagatgaaatgaatgaaataaagcgagaagggaagtttagagacaaaagaataaaaagaaacaaacaaggcctccaagaaatatgggactatgtgaaaagaccaaatctatgtctgattggtgcacctgaaagtgacggggagaatggaaccaagttagaaaacactctccaggatattatccaggagaacttccccaatctagcaaggcaggccaacattcagattcaggaaatacagagaatgccacaaagatactcctcgagaagagcaactccaagacacataattgtctga

SEQ ID NO: 128218 - DNA, 2065 bp, Homo sapiens
gaagcttcattcttctggatcatctggaaagggacaagaggtggccggttggtacgaactcataaacaacctttttcagcacaacctggttgaatgtggagtcggttcgtctggccagaaaactgcacagcttgaccaacagcctcaggtagatatcctggctcttgggctccttgcgccgaacctttcggtccttgttgtggcagatgtcagctcccatgatggcgtctcctgctcggccagaacatgctgcaccttctctgatctccctgccagcgtcttgataattaatatagaaaatgatacatttttctcatcaaatgcaccaatgcatttttcactggaatatgaacctggtttgcaaaatggggctagtctggggcaaattcgcgactgccgcctgggttccaaagaccaggctgactcaggaggaatattactcaaggtaaaaacctgtgaacaatttctggttaagggcttttcagagaaagtaactttgttcctttttaggccaatgccttacactactggtgtggatcctcctgaacactctacctttctcttgatgatcacggagtctgaactagctatcagagatgccgagaaagcagggcgactaccgcacccggatatggaaattcgaggacgggttgagcaacgtgttggttatacaattgaacaaattaatcatatgcgtgatgtgtttggtacgcgattgcgacgtgctgaagacgtatttccaccggtgatcggggttgctgcccataaaggtggcgtttacaaaacctcagtttctgttcatcttgctcaggatctggctctgaaggggctacgtgttttgctcgtggaaggtaacgacccccagggaacagcctcaatgtatcacggatgggtaccagatcttcatattcatgcagaagacactctcctgcctttctatcttggggaaaaggacgatgtcacttatgcaataaagcccacttgctggccggggcttgacattattccttcctgtctggctctgcaccgtattgaaactgagttaatgggcaaatttgatgaaggtaaactgcccaccgatccacacctgatgctccgactggccattgattctgttgctcatccctatgatgtcatagttattgacagcgcgcctaacctggacctgcatctgagggtcctctctcttagaaggaaaactaacaaacagaaaggacatccacaccaaaaacccttctgtacatcaccatcatcaaaggccaaaatagataaaaccacaaagatggggaaaaaaccgaacagaaaaactggaaactctaaaaatcagagcgcctctcctcctccaaaggaacgcagctcctcaccagcaatggaacaaagctggacggagaatgactttgacgagctgagagaagaaggcttcagacgatcaaattactctgagctacgggaggacattcaaaccaaaggcaaagaagttgaaaactttgaaaaaaatttagaagaatgtataactagaataaccaatacagagaagtgcttaaaggagctgaggacactacaccacacctattccaaaactgaccacatacttggaagtaaagctctcctcagcaaatgtaaaagaacacaaattataacaaactatctctcagaccacagtgcaatcaaactagaactcaggattaagaatctcactcaaaacttctcaactacatggaaactgaacaacctactcctgaatgactactgggtacataacgaaatgaaggcatccttgatgaacattgatgcaaaaatcctcaataaaatactggcaaaccgaatccagcagcacatcaaaaagcttatccaccatgatcaagtgggcttcatccctgggatgcaagcctggttcaatatacgcaaatcaataaatctaatccagcatataaacagagccaaagacaaaaaccacatgattatctcaatagatgcagaaaaggcctttgacaaaattcaacaacctttcatgctaaaaactctcaataaattaagtactgatgggacatatatttcaaaataa

SEQ ID NO: 128219 - DNA, 1639 bp, Homo sapiens
atggacacctttcttcaggctgaaagaaaggactatatggaggcctacgagttgattgagcaggaagaacagggggtgaaggagctcaacagacccctcactgctccaagtgccttgcatcccagggatgaagcccacttgatcatggtggataagctgtttgatgtgctgctggattcggtttgccagtattttattgaggatttttgcatcgatgttcatcacattaattcaagatggattaaagacttaaatgttagacctaaaaccataaaaaccctagaagaaaacctaggcaataccattcaggacataggcatgggcaaggacttcctgtctaaaacaccaaaagcaatggcaacaaaagccaaaattgacaaatgggatctaattaaactaaataacttctgcacagcaaaagaaactaccatcagactgcccgttccaaacccttgcggaccagtagctgaaacaccgctatcccgtgtgtttgtcttgcgggaagcccgaaagacgctgaagccacatcaatctacatgtttatcaaaaggtcgcgacaactcaatcgacagctggaaaaccgcggcccgtgtcttaaagacagcgataagttcgacgccaacgatcccgatcctgaaagatcagacgcaagaatggtcggtttctgcaacctttacatctgacggaaaaatccgtttattctacactgactattccggtaaacattacggcaaacaaagcctgacaacagcgcaggtaaatgtgtcaaaatctgatgacacactcaaaatcaacggagtggaagatcacaaaacgatttttgacggagacggaaaaacatatcagaacgttcagcagtttatcgatgaaggcaattatacatccggcgacaaccatacgctgagagaccctcactacgttgaagacaaaggccataaataccttgtattcgaagccaacacgggaacagaaaacggataccaaggcgaagaatctttatttaacaaagcgtactacggcggcggcacgaacttcttccgtaaagaaagccagaagcttcagcagagcgctaaaaaacgcgatgctgagttagcgaacggcgccctcggtatcatagagttaaataatgattacacattgaaaaaagtaatgaagccgctgatcacttcaaacacggtaactgatgaaatcgagcgcgcgaatgttttcaaaatgaacggcaaatggtacttgggagagttgggctggaggagggagtggagcagtggggacaggaagtccctcgctagactcagcaaaacagggacccttggcttggctgctctgacctacaaatgcacacgagaccagtggacggtatattgccgggtcatccgagaaaagaacctctgccaggacatgcggtggtaccagcgctgctgccagacctgcagggacttctatgcaaacaagatgtcgccagccaccgccgagctcgtgacacgcagtcccaagggtcgctcaaagctcagactcaggtctgaaagccacccacccgcaagcctaccagccttgtggccacacccccacccggctgccacaagaatccaactgcatagaacatgagcgtggacttggaaaaaaaaaaaaaaaaaaaaaa

SEQ ID NO: 128220 - DNA, 622 bp, Homo sapiens
atgactcttggctatggtcagagaggagctaataaagatttaagaactggtttcgacccagacttgtgcaccatggacaattttgctgagggagatttcactgtggcggattatgccttgttagaagattgccctcacgtggatgattgtgtctttgctgctgaatttatgagcaatgattatgttcgtgtgactcagctttactgtgatggggtgaatgattcattccttattggaggcttattgagaattggttgtaaaatagaaaatgaacgcagctcctcaccagcaatggaacaaagctggacggagaatgactttgacgagttgagagaggaaggcttcagaagatcaaactactccgagctaaaggaggaagttcgttaccaatggcaaagaagttagaaactttgaaaaaaaattagatgaatggataactagaataaccaatgcagagaagtccttaaaggacctgatggagctgaaaaccacggcacgagaactatgtgacaaatgcacaaacctcagtaaccgatgcgatcaactggaagaaagggtatcagcgatggaagatgaaatgaatgaaatgaagcatgaagataagtttagagaaaaagaataa

SEQ ID NO: 128221 - DNA, 930 bp, Homo sapiens
atggggaaaaaacagaacagaaaaactgaaaattctaaaaatcagagaacctcttcttctccaaaggaacgcagctcctcaccagcagcggaacaaagctggatggagaatgactttgatgagttgagagaagaaggcttcagacgatcaaacttctccgagctaaaggaggaagttcgaacccatggcaaagaagtcaaaaaccttgaaaaaagattagacaaatggctaactagaataactaatacacagaagtccttaaaggacctgatggagctgaaaaccacggcacgagaactacatgatgaatgcacaagcctcactaaccaattcgatcaactggaagaaaggatcaacaacattgacagaccactagcaagactaataaagaagaaaagagagaagaatcaaatagatgcaataaaaaatgataaaggggatatcaccactgatcccacagaaatacaaactaccatcagagaatactataaacacctctatgcaaataaactagaaaatctagaagaaatggataaattcctggacacatacaccctcccaagactaaaccaggaagaagttgaatctctgaatagaccaataacaggctctgaaattgaggcaataattaatagcttaccaaccaaaaaaagtccaggaccagacagattcacagccaaattctaccagaggtacaaggaggagctggtaccattccttctgaaactattccaatcaatagaaaaagagggaatcttctctaactcattttatgaggccagcatcatcctgataccaaagcctggcagagacacaacagaaaaagagaattttagaccaatatccctgatgaacatcgatgcaaaaatcatcaataaaatactggcaaaccgaatccagcaaacacatcaaaaagcttatccaccatga

SEQ ID NO: 128222 - DNA, 366 bp, Homo sapiens
atggacacctttcttcaggctgaaagaaaggactatatggaggcctacgagttgattgagcaggaagaacagggggaaagggagccagtggctgttaacaatatattaagtacggaagcactaatggcaaacgccaagtccacgctcatgttctatgcagttggattcttgtggcagccgggtggggggcgtggccacaaggctgcctctaaccctggtgttaccagagatgttgtaggttctctttcatccttgacctttttgcgtggggaacgcagctcctcaccagcaatggaacaaagctggacggataatgactttgatgagttggagagaagaaggcttcagatgatcaaacttctctga

SEQ ID NO: 128223 - DNA, 1029 bp, Homo sapiens
atgggaaagaagcaaagaggagggggaagacattaccggaggaggaaggaactgtgcgtgagggtccttgcttcacagaaaggaagctccatttggaatctgtccaacagagtggaatcttggcactgggaaggagagaaagatggtgaagacagagataatgatgatggggatgacagcgatggtggggatgacaatggggaagaggatgatggtgacaacagcaacgctgatgtaaacactgacaattgtgatgatggtgaagacagggatgatgcttcctttcactcgaacacaccagaaacacgagatgtaggtacgcgtgagcaaagaccaaaggtagataaaaccacaaagatagggaaaaaacagagcagaaaagctgaaaattctaaaaatcagagcacctctccccctccaaaggaacgcagctcctcaccagcaacagaacaaagctggacagagaatgactttgacgagttgagagaagaaggcttcagacgatcaaacttctccaagctaaaggaggaagttcgaacccacagcaaagaagttaaaaacattgcaaaaagattagacgaatggctaactagaataaccaatgcagagaagtccttaaaggacctgatggagctgaaaaccacggcacgagaactacgtgacgaatgcacaagcctcagtagccgatttgatcaactggaagaaagggtatcagtgatggaagatcaaatgaatgaaatgaagcgagaagagaagtttagaggaaaaagaataaaaagaaatgaaaaaagcctccaagaaatatgggactatgtgaaaagaccaaatctacgtctgattggtgtacctgaaacgggccccaacttccctatctaccacgagaccacaccatgtaaactcaacacgaagaaccaaaaaggacccactgatgaccaacacgtgcatattgggtacttccagaagtatgaattcagtgatgcaaaggacaggcgggctgcagcagcaaagagtttttgtaaagaaggctga

SEQ ID NO: 128224 - DNA, 3906 bp, Homo sapiens
atggggaaaaaacagagcagaaaaactggaaactctaaaaatcagagcgcctctcctcctccaaaggaacgcagctcctcaccagcaatggaacaaagctggatggagaatgactttgatgacttgagagaagaaggcttcagacaatcaaactactctgagctaaaggaggaagttcgaacccatggcaaagaagttaaaaaccttgaaaaaaaattagacgaatggctaactagaataaccaatgcagagaagtccttaaaggacctgatggagctgaaaaccacagcccgagaactacatgatgaatgcacaagcctcaaaagggtatcagtgacggaagatcaaatgaatgaaatgaagcgagaagagaagtttagagaaaaaagaataaaaagaaatgaacaaagcctccaagaaatatgggactatgtgaaaagaccaaatctacacctgattggtgtacctgaaagtgacagggagaatggaaccaagttggaaaacactctgcaggatattatccaagagaacttccccaatctagtaaggcaggccaacattcaaattcaggaaatacagagaacgccacaaagatactcctcgagaagagcaactccaagacacataattgtcagattcaccaaagttgaaatgaaggaaaaaatgttaagggcagccagagagaaaggtcgggttacccacaaagggaagcccatcagactaacagctgatctcttggcagaaactctacaagccagaagagagtgggggccaatattcaacattcttaaagaaaagaattttcaacccagaatttcatatccagccaaactaagcttcatagacagatcaacgagacagaaagttaacaaggatacccaggaattgaactcagctctgcaccaagcggacctaatagacatctacagaactctccaccccaaatcaacagaatatacattcttttcagcaccacaccacacctattccaaaattgaccacatagttggaagtaaagcactcctcagcaaatgtaaaagaacagaaattataacaaactgtctctcagaccacagcgcaatcaaactagaactcaggattaagaaactcactcgaaaccactcaactacatggaaactgaacaacctgcttctgaatgactactgggtacataatgaaatgaaggcagaaataaagatgttctttgaaaccaacgagaacaaagacaaaacataccagaatctctgggacacattcaaaacagtgtgtagagggaaatttatagcactaaatgcccacaagagaaagcaggaaagatctaaaattgacaccctaacatcacaattaaaaggacttgagaagcaagagcaaacacattcaaaagctagcagaaggcaagaaataactaagatcagagcagaactgaaggaaatagagacacaaaaaacccttcaaaaaatcaacgaatccaggagctggttttttgaaaagatcaacaaaattgatagaccgctagcaagactaataaagaataaaagagaggagaatcaaatagacgcaataaaaaatgataaaggggatatcaccactgatcccacagaaatacaaactgccatcagcgaatactataaacacctctacgcaaataaactggaaaatctagaagaaatggataaattcctcgacacctacaccctcccaagactaaaccaggaagaagttgaatctctgaatagaccaataacaggctctgaaattgaggcaataattaatagcttaccaaccaaaaaaagtccaggaccagatggattcatggccgaattctaccagagggacaaggaggagctggtaccattccttctgaaactgttccaatcaatagaaaaagagggaatcctccctaactcattttatgaggccagcatcatgctgataccaaagcctggcagagacacaacaaaaaaagagaattttagaccaatatccctgatgaacatcgatgcaaaaatcctcaataaaatactggcaaaccgaatccagcagcacatcaaaaagcttatccaccatgatcaagtgggcttcatccctgggatgcaaggctggttcaacttacgcaaatcactaaacgtaatccagcatataaacagaaccaatgacaaaaaccacatgattatctcaatagatgcagaaaaggcctttgacaaaattcaacagcccttcatgctaaaaactctcaataaattaggtattgatgggatgtatctcaaaataataagagctatctatgacagacccacagccaatatcatactgaatgggcaaaaactggaagcattccctttgaaaactggcacaagacagggatgccctctctcaccactcctattcaatatagtgttggaagttctggccagggcaatcaggcaggagaaggaaataaagggtattcaattaggaaaagaggaagtcaaattgtccctgtttgcagatgacatgactgtatatttagaaaacgccatcgtctcagccccaaatctccttaagctgataggcaacttcagcaaagtctcaggatacaaaatcaatgtgcaaaaatcacaagcattcttatacactaataacagacaaacagagagccaaatcatgagtgaactcccattcagaattgcttcaaagagaataaaatacctaggaatccaacttacaagggatgtgaaggacctcttcaagcagaactacaaaccactgctcaatgaaataaaagaggatacaaacaaatggaagaacattccatgctcatgggtaggaagaatcaatatcgtgaaaatggccatactgcccaaggtaatttatagatacaatgccatccccatcaagctaccaatgactttcttcacagaattggaaaaaactactttaaagttcatatggaaccaaaaaagagcctacatcaccaagtcaatcctaagccaaaaggacaaagctggaggcatcacgctacctgacttcaaactacactacaaggctacacagggtactccaacagacctgcagctgagggtcctctctgttagaaggaaaactaacacaaaggacatccacaccaaaaacccatctgtacaacaccatcatcaaagaccaaaagtagataaaaccacaaagatggggaaaaaacagaacagaaaaactggaaactctaaaaagcagagcgcctctcctcctccaaaggaacgcagttcctcaccagcaatggaacaaagctggatggagaatgactttgatgagttgagagaagaaggcttcagacgatcaaattactctgagctacgggaggacattcaaaccaaaggcaaagaagttgaaaactttgaaaaaaatttagaagaatgtataactagaataaccaatacagagaagtgcttaaaggagctgatggagctgaaaaccaaggctcgagaactacatgaagaatgcagaagcctcaggaggcgatgcgatcaactggaagaaagggtatcagtgatggaagatgaaatgaatgaaatgaagatcaacaaaattgatagaccactagcaagactagtaaagaagaaaagagagaagaatcaaatagatgcaataaaaaatgataaaggggatatcaccaccgatcccacagaaatacaaactaccatcagaaaatactacaaacacctctatgcaaataaactagaaaatctagaagaaatggataaattcctcgacacatacaccctcccaagactaaaccaggaagaagttgactctctgaatagaccaataacaggctctgaaattgtggcaatagtcaatagcttaccaaccaaaaagagtccaggaccagatggattcacagccaaattctaccagaggtacaaggaggaactg

SEQ ID NO: 128225 - DNA, 2738 bp, Homo sapiens
atgaatgaaatgaagcaagaacagaagtttagagaaaaacgagtaaaaaatgaacaaagcctccaagaaatatgggactatgtgaaaagaccaaatctacatctgattggtgtacctgaaagtgacggtgagaatggaatcaagttggaaaacactcttcaggatattatccaggagaacttcaagaacctagcgaggcaggccaacattcaaattcaggaactacagagaatgctgcaaagatattcctcgagaagagcaattctaagagacataattatgagattcaccaaaattgaaataaaggaaaacaatgtcaagggcagacagagagaaagctcagagaagtttgatcatctgaagccttcttctctcaactcgtcaaagtcattctccatccagctttgttccattgctgttgaggagctgcgttcctttggagggggagagcgtagaccatcagctgcaggattgtttgagtttgctggaggtccactccagaccctgtttgccttggtatcagcaacgaaagctgtggaacaacgaatattgctgaacagcaaatgttgctgcctgatcattcctctggaagcttcatctcagagggcctcgctgtcaccttgcagtttgatctcagactgctatgctagcaatgagtgtggctccatgggtgtaggaccctctgagccaggtgcaggatataatctcctggtgtgccctttgctaagaccattggaaaagtgcagtattatggtgggagtgacccgattttcaagggacatggatgaagctgcaaaccatcattctcagcaaaataacagaagaacagaaaaccaaacaccacatgttctcactcggatggccctatatttgtcactgagagcagaagggttgagaacttagatcctgacaggaggcccacctttattggagaaatggctctgcaacttaggccacagaacttcttaccacttggaagcaaaatagttgctttaatggtaaccaaatgccctccttcaagacagtatttcaagaaggaggagtatacgtatattatacaaacatatccaatccctttagaagataattatcaatatcatgcagggaagctggaacacacacacaaaatcgagtactatctagaagatcaagccacaaatctcaagagaagcaagacttttgttggaaaacaaaacaaaatcttgagacatgaaggatctgtaatggacacctgtcgattgtgtctgttcagcagctcctctcccacctgtcttccagtacaacaccttatttcattggagagaaaggttctacctcttctccttaaggttttagtggacagccaaaccagtcttcagtctacagggggcagactgacacctcacacggccgggtacccctctgagacgaaacttccagaggaacgatcagacagcaacatttgctgttcagcaatattcgctgttctgcagcctctgctgctgatacccaggcaaacagagtctggagtagacctccagcaaactccaacagacctgcagctgaggggtcctgtctgttagaagaaaaactaacaaacagaaaggacatccacaccaaaaacccatctgtacatcacccttcatcaaaggcccaaaagtagataaaacccacaaagatggggaaaaaacagagcagaaaaactggaaactctgaaaagcagagcacctctcctcctccaaaggaacgcagctcctcaccagcaatggaacaaagctggatggagaatgactttgacgagttgacaggagcaggttttagaaggttggtaattacagacttctcagagctaaaggaggatgttcaaacccatcacaaggaagctaaaaaccttgaaaaaagattagacaaatgtagaacgaatggctaactagaatggatgaatggctaactagaataaccaatgcagagaagtccttaaaggacctgatggagctgaaaaccaaggcacgagaactacatgacgaatgcacaagcctcaggagccgattcgatcaactggaagaaagggtatcagtgatggaagatcaaaagaaaaatgaatgaaatgaagcgagaagggaagtttagagaaaaaagagtaaaaagaaacgagcaaagcctccaagaaatatgggactatgtgaaaagaccaaatctacgtctgattggtgtacctgaaagtgatggggagaatggaaccaagttggaaaacactctgcaggatattatccaggagaacttccccaatctagcaaggcaggccaacgttcagattcaggaaatacagagaacgccacaaagatactcctcgagaagagcaactccaagacacataattgtcagattcaccaaagttgaaatgaaggaaaaaatgttaagggcagccagagagaaaggtcaggttaccctcaaagggaagcacatcagactaacagtggatctctcagcagaaaccctacaagccagaagagagtgggggccaatattcaacattcttaaagaaaagaattttcaacccagaatttcatatccaggcaaactaagcttcataagtgaaggagaaataaaatactttacagacaagcaaatgctgagagattttgtcaccaccaggcctgccctaaaagagctcctaaaggaagtgctaaacatggaaaggaacaaccggtaccagccgctgcaaaatcatgccaaaatgtaaagaccatcaaggctag

SEQ ID NO: 128226 - DNA, 898 bp, Homo sapiens
atgctgaggcggccgcgtagggccctgtgcagctttcgcctcgccttgccgcccgctccagccgcttcggctacttccgccgctggcttcggctacttccggccgccgccggcgttcgccacctcctacctaatcaagcctccggcagccctccccgccccgccgggctccgccccctcacccgcccgcccgcccgcgagcttgcccctccccccgagcctggctccgaagcgcctcggctatctccggatactggacgaaggcgaagcaggcggccgcttcggctgcttccgaaaacacccgaacgcgcggcagacggatcatctggcattacttccgggagcagatgatctggcgttactgccccctggcggcccaacggaacgctcctgatcactgccgccacggccagccacccggtgttggcgatccctgcccatctatgctccccacggtgcccgagcttcttaacgacagtgacatgttcagggccccagcatcatgcagccaggggcagggtcccgtttcactgcatgaatgtggcaagagcttccgctaccgctcagacctgcggcgccactttcccggcacacagcgctcaagccccacgcatgtccgcgctgcggcaagggttcaagcacagcttcaacctagccaaccacctgcgctcgcacaccgggggcggccctaccgctgctctgcctgccccaaggggttccgcgactccaccgcctgctgcaccaccaggttaaaacaattacaacataaccagatttggggggtgcttggtcagcaatattgtggggagttactccagaccaccctggccatgcacccggggtccccgaaggcccctggggtctccgagcccggcccccgggagcgtgtgcctttgtga

SEQ ID NO: 128227 - DNA, 551 bp, Homo sapiens
ccagcaccgcccgccgctgccgcccccagggtcccgtttcactgcagtgaatgtggcaagagcttccgctaccgctcagacctgcggcgccactttgcccggcacacagcgctcaagccccacgcatgtccgcgctgcggcaagggtttcaagcacagcttcaacctagccaaccacctgcgctcgcacaccggggagcggccctaccgctgctctgcctgccccaaggggttccgcgactccaccggcctgctgcaccaccaggtcgtccacactggtgagaaaccctactgctgcctggtctgcgagctccgcttctcctcacgctccagcctgggccgccacctcaagcgccagcaccgtggggttctcccctctcccctgcagcccggccctggcctgcccgccttgagtgcgccctgctccgtctgctgcaatgtggggccctgctcggtgtgcgggggctcaggggccggcggcggagagggccccgagggggcaggcgcgggtctgggcagctgggggctggcagaggcggcagctgcggccgc

SEQ ID NO: 128228 - DNA, 3789 bp, Homo sapiens
ttaatttgatataggtaaggctcttcggtgatccaagagcagcccctttgggatttctgggcaatatggcacaacatcgtttctggcattttggtgtactgaagaatttatctccaacacaccactggagtcagacagctccctttcaaatggactttcaattagtctcccttcctggggtgaggccttccaccactcagtgctatcagctgagaagcccagcatttccagttgagaattatcttcgttctttgggaacgaagctttgggagatatttgccatgcaacatctcctgttgtccctgtttctggagaagatctcttctccttctccactgctgtaatctgcatttcagtctctgttaatggtgagaaagtccagggatcagggctgctttgttgattgtcacagaatgggtttgacttattctcattctctgctggctctgagctgtctaggtagtcataaatattttcagacttaggatcagcaccgacacgttcatcatcagaacatgagcttgttgaaatgaccctggcatcctctggctgcacagttgcagaaatgtcatgttcatttttctcttggccatcagtggtaattagttcagattcttggtgattctgttcactccagttgccttggttttcttcttgatacccagaactgggttgctggccccaggaggacagtgcaactgaagagtcatttaactcaggacttgatgcacttgaatgagtatactcactagaaatagtatctctgtcaaaatttccagacgaaccggctcctggaaggctattttcagaccccttaacgtcaagatttttggttatctcagaacgtgtgctgctgacatgcacatcactgtctatagggacgtccccaaagtcaagacttcggggaactctgtgaggtggccctccacccacgttctctggctctagaaagttacattcttcagttttctcaagatccttttcaggtacagatacatattttgtgaaattcatcccatctgaagtctcagtagtttcacctgaatttctttgactcatgaggtgtttttcatgggtatcttttggctgcaggttatctgcggacatccctgtttgcacatcacgggagtctagattgtaagacccctcctcatactctaaaacttcctctggttcctcggtttgaggactgaaagtgacagcaagagagctgattttgcctgatttaatgcagatttcctgatgttcagatgcaaccagagaagacagttcctggtcactctgccctttttcagaaatccctgaggcattctccacaccagaggcgatcacctcctcttcatcaaggtgccccctgtcagtggctccctgggcttccttctcactttcactttgtccatcgccatgacctttccatggatctgggtgtggaaaataccctggattctcaagcctagtcgccaaggatgctgcatcactttgcagggtttccctctctgtgtcctgcttgtcaagatgagatataagtgctttggcaatacatgtgcacaaacatgagatgctgctgtgcaaaagtgtgagttgtcggtttgtttcattgtacagttgcatcatgctggggtcgtcgtaactggactggctgctttccccgacgtcatcctccatggagatattcttaccatctgtgtgctctgtcttgagttcattttcatccaggttgtgagtggtatttatttcagaactgttatctgtatgaggtgaagcccacatgtctaggttcccaggacctgaactgattcgatttcgagatgactgttgcagtgactgttgcagtgactgaggaggaatgtcagtctcctctgccatggagttaccatcttttgactcaaaaccttcctctttagcaaatggcttgtgttcagtttccttttcgtctccagcaaatgttggtgatgtgtaagagtctgaggtggaataattggtatctaagggggaaggcaccgaatcttctcctaggttggatgcactgtaatcagaacatttgtaagataagaaggaatcttcccaaggaactaggacatctgaccctcctttcttcatattctcctcaaaaaggttccaggaatctaccttttcatataccttgcccctagttttaggatccactaaaccattctgatcttcttttggtggcttagaattagtccatgtgtgatccagatcagaactgggatttccaggtgcaaagatgtgatccctggagtcattgtttttcttgccccagatttctggagctgcttcattgtttatctcactgggtgaattgtccagtagttctgaagaagaaaaggcaaacccactttttgccatggcccactcattcgggtccctaacagaaggtgtcttgctgcttgttgggtgcaaatcccaggtattttttaaagcttcatcatgatcttctttaccaaatgcactccaggctgggaatggcgccacagctgctggttcaccatcatctgtaggatttccccagggctcgggcatggctgtgggagagcgaccagaatgccacaaagaagcaaagtcttctatcaggtggtttgttccttggggagatgtatttggcaaaggtgacttctccatgggcaggttctggaacggcaagctttcctcatttttgtcttgaatatcattgctacccagttcaggctgaccaaattcagactcccagggacctgactttgtaaattcgaggctctttggttgaaatacagaatctgaggctctcctatcaatggagcttggcttatgctctttccatgattcagggctctggaaaacagattcctgttcactggaactccacgcatctgcaatatttttggagtcaatttccaaaccaccccaccagctgctgcaccgtgcatgggtctgaggtggccccatgtgacctgtgtcagttgctttttgggtcatatcttctgtatagagtgaggctggttcttcagtggatggcgagctttctactaaactattcatgggtgttggtgggatcctctttccagtattttttagcctttctggggaaggggattcatctcccacaaaatctgtcaggctcaaatttctttcagagttatctctgggactgtcttgtctctggacaaactcctcatcatgttccacaaggctatctttgccagcccctgacaaaagtgaactggatgaataattagacatgttcgttcccatgccatcaagtccttcaggcccagcggggagctgtccttctgacaggtcgctgttggggaagaagtcatctgctggggagtagtctgcagaatgagaagattgctgggactgcccagaagccatgggtgctgggtcaaaattgaagaggtcgaagtgctcaccgtgttctccagaccatgcatgttcctccgccaccgccccttcagggatggggctgtaggagtcaagccctgggagaagggtgtggtgaggcccagcaccttctcccacggggctgtcgtcactgaggaaaacagagctctccttggatgagcggctgctcctaatggtagccagtccgccctgccctgaagctgggtgttctctttctatagcaactgcccaggaagtaagagcctgaccagaggaaaacgtcaccatcctcttcacaccccatcccaataggtacacctcagtagatacagaggtctgcagacctgccctcttggcaacaaagaaagtgtagtcatagagaccattgtccaacaccaggaccat

SEQ ID NO: 128229 - DNA, 3957 bp, Homo sapiens
atggttttaaagccatgtggctgggtaagatcatcaaggagaaagtggaaagagagaagagaaaggggacaggaaacaaagttgggtgtgaatatttggaggcttaataaggaagagcaaccagcaaaggcaactgaagggcagtcggtgaatccggagaaaaacaagagcctcacagaccttgagattcaactcagcagaattacagagtacgggtatgatggctttttgaagtggctgaattgtctatttcacagcaatattaccagtgacttgaaagcatttacagacaagtttggttttgatgtcctcatcctgttctccagctatctgtcagaggagcagcagccgagacgacagattgctgtgtactcagaaaacatggagctgtgcagtcagatttgctgtgagctggaagagtgtcagaacccttgcctagaactggagccctttgactgtggctgtgatgagatcctggtgtaccaacaagaggacccttcagtgacttgtgatcaggtggttctcgttgtcaaggaagtcatcaacaggaggtgtccagagatggtctccaatagccggacatcctcaacagaagccgtggcaggcagtgcccccctctcccaggggtcttctgggattatggaattgtatggttctgacatagagccacaacccagctctgtgaatttcatagagaaccctccagatctcaatgattctaaccaggctcaggtggatgccaatgtagaccttgttagcccagacagcggactggctaccattaggagcagccgctcatccaaggagagctctgttttcctcagtgacgacagccccgtgggagaaggtgctgggcctcaccacacccttctcccagggcttgactcctacagccccatccctgaaggggcggtggcggaggaacatgcatggtctggagaacacggtgagcacttcgacctcttcaattttgacccagcacccatggcttctgggcagtcccagcaatcttctcattctgcagactactccccagcagatgacttcttccccaacagcgacctgtcagaaggacagctccccgctgggcctgaaggacttgatggcatgggaacgaacatgtctaattattcatccagttcacttttgtcaggggctggcaaagatagccttgtggaacatgatgaggagtttgtccagagacaagacagtcccagagataactctgaaagaaatttgagcctgacagattttgtgggagatgaatccccttccccagaaaggctaaaaaatactggaaagaggatcccaccaacacccatgaatagtttagtagaaagctcgccatccactgaagaaccagcctcactctatacagaagatatgacccaaaaagcaactgacacaggtcacatggggccacctcagacccatgcacggtgcagcagctggtggggtggtttggaaattgactccaaaaatattgcagatgcgtggagttccagtgaacaggaatctgttttccagagccctgaatcatggaaagagcataagccaagctccattgataggagagcctcagattctgtatttcaaccaaagagcctcgaatttacaaagtcaggtccctgggagtctgaatttggtcagcctgaactgggtagcaatgatattcaagacaaaaatgaggaaagcttgccgttccagaacctgcccatggagaagtcacctttgccaaatacatctccccaaggaacaaaccacctgatagaagactttgcttctttgtggcattctggtcgctctcccacagccatgcccgagccctggggaaatcctacagatgatggtgaaccagcagctgtggcgccattcccagcctggagtgcatttggtaaagaagatcatgatgaagctttaaaaaatacctgggatttgcacccaacaagcagcaagacaccttctgttagggacccgaatgagtgggccatggcaaaaagtgggtttgccttttcttcttcagaactactggacaattcacccagtgagataaacaatgaagcagctccagaaatctggggcaagaaaaacaatgactccagggatcacatctttgcacctggaaatcccagttctgatctggatcacacatggactaattctaagccaccaaaagaagatcagaatggtttagtggatcctaaaactaggggcaaggtatatgaaaaggtagattcctggaacctttttgaggagaatatgaagaaaggagggtcagatgtcctagttccttgggaagattccttcttatcttacaaatgttctgattacagtgcatccaacctaggagaagattcggtgccttcccccttagataccaattattccacctcagactcttacacatcaccaacatttgctggagacgaaaaggaaactgaacacaagccatttgctaaagaggaaggttttgagtcaaaagatggtaactccatggcagaggagactgacattcctcctcagtcactgcaacagtcactgcaacagtcatctcgaaatcgaatcagttcaggtcctgggaacctagacatgtgggcttcacctcatacagataacagttctgaaataaataccactcacaacctggatgaaaatgaactcaagacagagcacacagatggtaagaatatctccatggaggatgacgtcggggaaagcagccagtccagttacgacgaccccagcatgatgcaactgtacaatgaaacaaaccgacaactcacacttttgcacagcagcaccaactcccggcagacggcccctgacagtctcgacttgtggaacagagtgattttggaggatactcagtccactgcaacgatctcagatatggacaatgatttggactgggatgactgcagtgggggtgcggcaatccccagtgatggtcaaacagaaggatacatggctgaaggttccgagccggaaacccgatttacagtgagacagctggaaccctggggcttggagtatcaggaagcaaatcaggtagattgggagctccctgcctctgatgagcataccaaggacagtgctcccagtgaacatcacacattgaatgagaaaagtgggcagctaattgcaaacagtatttgggattctgtcatgagagataaagacatgtcatcattcatgttaccaggctcctcacatatcacagattcagagcaaagggaattgcctcctgaaatccccagccattcagcaaatgttaaagacactcattccccagatgcgccagcagcctctggaaccagtgaatcagaggcacttatatctcatcttgacaagcaggacacagagagggaaaccctgcaaagtgatgcagcatccttggcgactaggcttgagaatccagggtattttccacacccacccactccctacttagcttacaaacttactcagagcactcaaaacaattgggaagcctggcgacagcacgagactgtgtctcaaaaacaacaacaacaacaacaaaaactcaacaataagaaaatgggcaaaagacctggacaggtacctcacaaagaagatatacaggtgacagaatggcccaaatccaaaaccctgacaccaaatgctggtgagaatgcaaagcgacaggaactcgcattcattgctggtgggaatgcaaaatggtccagccactttggaagagtttggcagtttcttacaaaattaagcatactcttaccttacaatctagccatcatactccttggtaattacccaaatgcactgaaaatgtatgcccacacaaaaggcttcacatgtatgtttatagcagcttcattcataattgccaaaacttggaagcagccaagacgtccttcagtaggtgaatggaaaataacctgtgacttgtccagacaatggaatattattcagcattaa

SEQ ID NO: 128230 - DNA, 933 bp, Homo sapiens
tctgccagccctacccacggccccggccccgcaccgggacacatggaagctgccagccccccagccaaggatcagctgagccctagggctgatgcttgcctacgttgctgagaatggcactgaaggcccagccaacaaaggttaaccccaggacactcctggacagtgatcctgatgtctgttgtgagctgcacactcaagggtgttgataaccagccccagtcgggcgccatggcgtctgccgagcccctgacggcgctgtcccgctggtacctgtatgccatccacggctacttctgcgaggtgatgttcacagcggcctgggagttcgtggtgaacttgaactggaagttccctggggtcacaagcctgcgggccctcttcatctacggcaccaccatcctcatcgtggagcgcatgtacctgcggctgcgcggccgctgcccgctgctcctgcgctgcctcatctacacgctctggacctacctgtgggagttcaccaccggcttcatcctgcgccagttcaacgcctgcccctgggactactcccagttcgactttgacttcatgggcctcatcaccctggagtacgccgtgccctggttctgcggggccctcatcatggagcagttcatcatccgcaacaccctccgcctccgcttcgacaaggacgctgagcccggggagcccagcggcgccctagccctggccaacggcactgtcaagactgactgagcaggaagcggtgtggggggcctgggggatctctcatgggaactcatgggacaaagagaccaagctggtgaggttgccccatccatgcagcaaaagcccttgcttccggccaagccttcagccctatagggcacacagagccccctaacgtccgcgggggccggtgttggggggccgtggtcaggtgttgggggatgg

SEQ ID NO: 128231 - DNA, 455 bp, Homo sapiens
agtctgctgaggttggagctgctgagacgacgctcacagagctgagacgtacagtccagtccttggagatcgacctggactccatgagaaatctgaaggccagcttggagaacagcctgagggatcctgctgcaccttgagtcagagctggcacagacccgggcagagggacagcgccaggcccaggagtatgaggccctgctgaacatcaaggtcaagctggaggctgagatcgccacctaccgccgcctgctggaagatggcgaggactttaatcttggtgatgccttggacagcagcaactccatgcaaaccatccaaaagaccaccacccgccggatagtggatggcaaagtggtgtctgagaccaatgacaccaaagttctgaggcattaagccagcagaagcagggtaccctttggggagcaggaggccaataaaaagttcagagttca

SEQ ID NO: 128232 - DNA, 1044 bp, Homo sapiens
ggcaaagacttcttcccaaatgccaagtccacaagaaggaatgtgtggcaaagcttgcacaccagccctctctcaggctgacagcctttgccctttgctcaggttggcttcagaggtggagggatattcacttcctgcttgtgcagagccttatgttcagtcagagtgtctctctcatctgtcagtgtggtctctccagcatgcactctcctccctggctagcatgagcttcaccacttgctccgccttcaccaactactggtccccgggttctgtccaggtgcccagctatggcacccagcctgtcagccacgcagccagcgtctatgcaggcctggggggctctggttcccggatctccgtgtcccacttcaccaatggccgggggtctggcaggaatgggaggcatccagaacgagaaggagaccatgcaaagcctgagagaccgcctggcctcctacctggacagggtgaggggcctggagaccgagaattggaagctggagagcaaaatccaggagcacctaaatgtcactcggctgtagctggagacagagatcgaggctctcaagaaggagctgctcttcatgaagaagaacaacgaagaggaagcaaaaggcctacaagcccagattgccagctctgggttgaccgtggaggtagatgcccccaaatctcagaccttgccaagaacatggcagactcccgggcccaatatgacaagcttgctcggaagaaccgagaggagctggacaagtactggtctcagcaaatcgaggagagcaccagagtggttaccacacagtccgccaaggttggagctgctgagatgacgctcacagagctgagacatagagtccagtccttagagatcgacctggactccacgagaaatctgaaggccagcttggagaacagcctgagggaggtggaggcccgctatgccctgcagatggagccatcattgttattttcaaagattatctttgggagagtttgggagatatcatacttacatgtctttgagggcaagcaagttgttgt

SEQ ID NO: 128233 - DNA, 2040 bp, Homo sapiens
atgcctgttccccagctcccgccgcccgtatcccgcttggccgccaccgccgccgcctcagtcacagagccaggcccaaacccggaagccgtccgcagtgcctcggccgagccggaagtgaaggagggctttccctctcaaaaccacagtgtgggacactccaaccttatcccatcaggaggctctgtggctccaagctctgggcgcagccattacggatacgcctcggaggatgggacctgctcgaagctgcgagtgcggcctcggctggcggcggcaccagccgccccctttgcctttgtggccgaccttgcttcatgctgccaaggattgagtttctttgaggggatactgctcgttcgggggccctacagaaggctgagggccacagttgtaagggatcttgtggctgtcaggatggcagaggagcaggagttcacccagctctgcaagttgcctgcacagccctcacacccacactgcgtgaacaacacctaccgcagcgcacagcactcccaggctctgctccgagggctgctggctctccgggacagcggaatcctcttcgatgttgtgctggtggtggagggcagacacatcgaggcccatcgcatcctgctggctgcgtcctgcgattacttcagcatgagcttcaccactcgctctaccttctccaccaactactggtccctgggctctgtccttgcgaccacctacggcgcccggctggtcagcagcacagccagagtctatgcaggcgccgggggctctggttcccggatctctgtgtcccgctccaccagcttccagggcggcttggagtccgggggcctggccgcggggatggccgggggtctggcaggaatgggaggcatccagaacgagaaggagaccatgcaaagcctgaacgaccgcctggcctcttacctggacagagtgaggagcctggagaccgagaaccggaggctggagagcaaaatccgggagcacttggagaagaagggaccccaagtcagagactggagccattacttcaagatcatcgaggacctgagggctcagatcttcgcaaatactgtggacaatgcccgcatcgttctgcagattgacaatgcccgtcttgctgctgatgactttagagtcaagtatgagacagagctggccatgcgccagtctgtggagaacgacatccatgggctccgcaaggtcattgatgacaccaatatcacacgactgcagctggagacagagatcgaggctctcaagtaggagctgctcttcatgaagaagacccccgaagaggaagtaaaaggcctacaagcccagattgccagctctgggtttgaccgtggaggtaagatgcccccaaatctcaggacctcgccaagatcatggcagacatccggggcccaatatgacgagctggctcggaaagaaccgagaggagctagacaagtactggtctcagcagattgaggagagcaccacagtggtcaccacacagtctgctgaggttggagctgctgagacgcacgctcacagagctgagacgtacagtccaggtctttggagattcgacctggacttccatgagaaatctgaaggccaagcttggagaacagccttgagggaggtggaggcccgctacgcccttacagatggagcagctccaacgggatcctgctgcaccttgagtcacagctgggacagacaccgcgcacagaggcacagcgccaggcccaggaagtatgaggccctgcttgaacatcaaggtcaagcttggaagctgagatctgccaccttacccggccgccttcttggaagattggcgaggactttaatctttggtgattcctttggacgaacgcaactccatgcaaaccatccaaaagaccaccacccgccggataagttggattgggcaaagtggtgtcttgagaccaattgacaccaaagttcttgaggcattaagccagcaagaagccagtggtacccttttggggaagcaggaggccaataaaaagtttcagagtttcaaaa

SEQ ID NO: 128234 - DNA, 594 bp, Homo sapiens
cgggacccagaaaaataagagtgtcgatggtgggtgtgtattagcctggtggtaaaatggtcgataaaaacatcaacacgataggctttgttgacatagttggaaaactgctctctcatttttaaaactttatttccacttccccagctttgaagatttctatgttaggaaaagccaaactaaatatactggctatggtgttgtaacaatgctggtttctggaatggtgccatgtcctccccctccctctcctccaactcctttaaaaatatgactatttttgaaatgcagcccgaggagggagcaatcaagggttcagaacaataagcgcccttcacacattcaagttcccagacaccaggtgaacgagcgagctccttgtcgggggcggggccggctgtcctcaccgaattcgcagcgccatcttcctcccgggaccgggccggcttcccttctggccagcgagggagactcccaagcaaaaggcgggtgggggtggcgttcgcttcccacggtggaaagaaccggaggcaaacactgtctggcttagcccgcagcctggaacacaatgtcaggagaccttggggctggaga

SEQ ID NO: 128235 - DNA, 1435 bp, Homo sapiens
atgacccatggccaccagaagctggagagaaccatgaaacagattctcccccagaggtccaagaaggcagaagccctgcccacaccacgatttcagacttctggcctccagaactgtgaaaaatacatttctgttggccactcagtttgtgataatttgtgttttaataaaggtactagagctgttcggagactggaatcatgcttagaagacctgcggctgcttttaactccacagaggattccatcccaggatatccagaggacaagaggctggccaactgcaggattagcctatgctcccgtgctggatataggctacacgcaagagaaagcttggctcagaccccctgggcagacacttgcactgagaagtgaaaggtgggaagaaataaagtgcgtgtgctgttgggagttgagagatgttttacaaagtcatcatgggtatgatctccctagatctgctcacccccttgcagaatctgaaatctacagtggacttggaagtgagcaaagagctgttcccagacaccaggtgaacgagcgagctccttgtcgggggcggggccggctgtcctcaccgaattcgcagcgccatcttcctcccgggaccgggccggcttcccttctgccagcgagggagactcgcaggcaaaggcgggtggggggggcgttcgcttcccacggtggaaagaaccggaggcaaacactgtctggcttagcccgcagcctggaacacaatgtcaggagacctggggctggagagctggaaaagtcccgggcagcctcaggataaacccgaaatccagaagtgctgtcttggggaaattattcccaagtgcccaagggacaggctcgttttcttggaaaatcctgcgatgtggggacgcatccacagaggaagttgacctgtgccctgtagagaccagttctcgccttccgaccggttctgtgtgcgcacgctcggggcggtgatggtcccttttaagaagagggttgttttcgaagtcgggccaacaagtcactggccatggactcgcggggaaggccatgtcctttctcctctcaagccctttccccgttcccggtttacatctcaaggggaaagcgcacgcggggtctcccagcaccgtcaccaccgctagtgctgtcacgccatgcgctcgcagcggcgccctttcgaccaaaggggcagaaacctgagacttcctgccgctggcttggggatgcgggggtgcagcccgggcccgggccaccggcggcggacgcgcgtggcggggcggggcagaggttgagaaccgctgactgcgaagtccgggtgcggggaagggaagggagcgaggtgcgggggaggcagaggggccggcagcccctaggcggctactccttgtcgtccacgaggtcggcgagctcctggagcactcgcaggcggccgc

SEQ ID NO: 128236 - DNA, 1417 bp, Homo sapiens
atgggcactcagtgtgatttattggcaaaatctttggaggattgtcctgtggatgaagttgaagatgcatttcagggcctgggaaaagaagatgaggaaattgaacaattcagtgataagacattcgggtcaggtgcaattgatgatgactggcgggaagcacatgagtgcctggctgaactggaagtaaagcaaccagtggcagttattgaacaaacaggcaatggagagagggatgaaatggacttgttggatgaccatgaggagaatctggcagaaaggctcagtaagatggtgattgaaaatgaactagaagatccagctattatgagggcagtgcagaccaggccagttttacaaccccaaccaggaagtctgaattccagtatctgggatggatctgaagttctgaggcgaatccgaggaccactgcttgctcaggaaatgcctacagtgtctgtattagaatatgctttgcctcagaggcccccccagggtccagaagatgatcgggacctttctgaacgagcattaccaaggcggtcaacttcacctatcattggcagtcctcctgttagagctgtccccataggcaccccacctaaacagatggctgtacccagcttcacccaacagattctgtgtccgaagcctgtccatgttcggcccccaatgccacctcgttatcctgctccctatggtgagaggatgtctccaaaccagctctgcagtgtcccgaactcttccctcctgggtcacccttttcctcctagtgttcctcctgttctcagccccctccagagagcacagcttcttggaggagcacagctacagcctggacggatgtctcccagccagtttgcacgggtccctggatttgttggtagtccacttgctgccatgaatcccaaatctcaggccccaatgtttagaccggacacaactcacctccatccacagcaccgtcgactcttgcatcagagacagcaacagaatagaagtcagcatcggaatctcaatggtgcgggagatagaggaagtcaccggagcagtcatcaagatcatctccgaaaggatcccatatgccaatctcatgttgcagcgggaaaaggattgggtctctaaaatccagatgatgcaactgcaaagcactgatccctacctggatgatttttattaccagaattactttgaaaaactggagaaactgtcagctgctgaagaaatacaaggtgatggccctaagaaggagcgcaccaagcttatcacccctcaggtggccaaactggagcacgcctataagccagagacaatcatatgtcaggcactttgccgagcacttcacatcaattatctgacaaaagcctttcaacaagcctttgaagtatctgctagtatcattaccatttacagataa

SEQ ID NO: 128237 - DNA, 560 bp, Homo sapiens
tcaacacagcctctgcaggttccaaccaggagatgaagccaggcactggtgtggcaagagcaccgaggcacgcttcctgagaggcacagtcacatccgtggctgtcgcggccatcgggctgccgctgccaccgctgtggaagctctcggaggccctgagacgggagaacatggtgagagcgtcagggaagttggggggtgtagcaggggtattggcgggggtgcacatcatctggtggtgatggtggctgtaggggatgttggtctcctggaaaaaggcgctgagggctgtctcgaactgccagtgggccgcctgcagcagttgcttcgcctggtcggccgcgcagcccgccgtcagcacgaactggttgatcatgacctggtgcttgagctcgtccatgttcacggacatggcgccgccgcgctgcccgctccggcctccctccgccgcccgcgcctccgcctcacgcgtccaccattagcgagccggctccggctaatacaaatatttactgtgcggctctgactcaccgcgccacgaaatcgtcgacccgggaattc

SEQ ID NO: 128238 - DNA, 1695 bp, Homo sapiens
ctaataccagggtccacagagcactgtgagaaaccctgggtaggagctggcaggataagacatgccctggtggccggttctgccctggatcaaagactcttcaccttcttctctggagatgaatcctgacaacacctcagggctgaggcagaagtcggtggaggccgagccgtgctcattgtggatggtgcaccgatacacaccgcagtctacgggggaggcctgcacgatggccaaggccgccggcccctcatcccctgcgctcctgcccacctcgcccactgggcgctgatccttggcccatgtcaagactgagtcactaagaatgttgaaaaactggcaccacagcttcaggctaccggaggcatcaggaaactgctccacccgaatcttccggatcacctgtggggctttcagcaggtctttggctttcctgggcttggccagtgtctcctgcttgccttcatccagggccacctctgtgtccagaccgccggccttggggctggggcccaggtctcctgccgccagctcctcctctgcccgaggcacctccagcatgctcgcctttctgcccttagggagaaatctcttcctccgggcccctagagccagttcctcaggtgtagctgccgggagacctgtcagagcctcccctgggaacttctcctcttgggagggctcctgggctatgctctctgctgagggcccctgtccaggggctgcctgcccacccgcctcccccagtcgaccagccatgctgctctcctgagaggcccccaggaggccaggcccctcaggggaaacctctccttcaccctcactggctccttctgaggccagcccagggtcctcctcgtctaccacaatggcagggacagtgagggagctgggaccaggaccccaggagcctcgggcagcagcaagggcctggcggccagcctgcacctcacggtccaggaggccggtgaggcggcgggaggtacaggggctcagcagcagggtctgtgcactctgcaccaggtggttgttctccacacgctccaggatgcgcctcgatgtccggggactaagcccagccacttccacagtgggtgtcagagtggctgagggcaccagacctccggtggctgcccccacctgggactctccccctgctccacttgtctctgtgctggacagcttcagcagcagaagcaggtagttcttcagggaatctatgaggccagggtcacagctccggggacctggggtccgcccctccacatctggtacctgggcgcaggccccctcactgctggtggccatggtttctggtgggtgactctgagtgggggtccccagccccaggtgcagtgttggggcagaactcatcaggacctgatcctcagagggcaggaaggtggctgtgctcccgtgctgagaagtcggggtgctacacggccccgcctttgggctagctgtcagcccagttccaggaagagaaggcatcgtgggtacctcctggctcaggccagctagaggacagccaccctgatccatacacggcactccccctggccgctcctccttggggcactggaacgggctgtcctcctgcttggcctcgactgggcctgatgactgtggccctcggcatctctctcctcccacctgctccacactcccctcatggggcggctgtgctgggagcat

SEQ ID NO: 128239 - DNA, 643 bp, Homo sapiens
atgactaacctatctattaaaagcgtaattaccattcaatcagggactgaacagtgcatcaaacccaggacatttggaaatcacaaggggctagcaggctgggtttctgaccacgtgtctgttgactgtgactttgggtcaccaccctgtggggttttgtctttacgactaagccgattccctctgcctcgctggggaatcaaacttcccagtgacaacgacagcggccagcacgggacgtccaccagcccggcagggcttgacgctgtctcagacccggggaagggaggagtcgccagggccgccgaagccgaactggcagaggaaaagcagaggaaggcggcgcgcgaactcgccagcaaaggagggctgcgctgctcccggagcggagcgcctcgcagcccggaccgcgggactcaccgcgctggcggcggcggcgccagacgacgcggggccgggcacgtcctgcctcctcaggcgggacttgaggctcttcatggctaactcttgcctggcccccgcgcgaaccttaaaggctgcggagtgccagcgcgcaaggagtagacggcagcggctgcagcagaggcggcgcgggctgtaccagccccaccggcctgccacctgcgggccccgggcagcagac

SEQ ID NO: 128240 - DNA, 1040 bp, Homo sapiens
tcagaaactcaaaagcagcccaagggcaggtcctgcaaagggctgctgcgcattgactggcagccactcctgggccaggtatgtgctggtggtgagcagcagaggccgcgtgacagagccagcggctccgtcccctagctgacactccccggaggagcaatcggccgtgctctgctgcaggcctcctgtttcctcagtcattctggtctcaggaactgagtcagggagcatttctgctgcctccttcatcaccatgcctgcactgcctacctggtacagccgcagcctctcgccatcagagaagtcccaggacacggccttctgtccaggagagaagggagacgcatggtctctgtgctcataggtgtgagtggagggctggttcacctgcacatggaccctgagctcataggtttgtgtcaagggctggttcacctgcacatggaccctgagctcataggtgtatatcaagggctggtacacctgcacgtggaccctattctcgtagatgagtgtcagaggctggttcacctgcactgtggtctctgcaccgtgctccttgagctcgtaggcgtgtgtcacaggctggttcacctgcgcacagtccctgagctcataggtgtgcatcgagggctgcttcacccgaacatacatcaagggaggatgcagaacaggctccatgaatgcaaggactttgtcctgttcaccaggaacaacctccatcccgaaagtcagtcgtgacttcacctcacattccgccagaaaccgactgcagattgttaccaaagaatccttgtgcaaacaaacaccagccaactgcgactggaggtagagccgttcctccagaggttcagcatgttcctccacgcagcggcatgactctcggatctcaccagcctcttgcccttcagtttcaaatgcaggccacggacgctgcacgactcggtctctctccacagggccagggctcccctccaggacctcgaagcaccctactgttggggtgcttgtctctgtttcagttgtccctcttaaggtaa

SEQ ID NO: 128241 - DNA, 1657 bp, Homo sapiens
atgatcatctatgtagaaaatcctaaacaatctaccagcaaatgtgtaagagcttatacatttagcaaagttgctggacataaggcgattgaaaaacggctggaaaaactggcggttgatccacatcgcgaccgtgcgcagatgctgaaagtcgaaaacgtccagcaggcgtggcagcaatggatcaacaaactgccgcccgcacgtcgtgaggatgaagacgtgaaagagatccgttggatgatagaagagttgcgcgttagttacttcgctcaacaacttgatcacacgggcgtggaccgtggtcagccgggagcgtccacgtggtcagccagcctgatgtgttcggtgactcagccaaagcttaaaacacggaagccggggtttcttctggggctgggggagcgcaactgcttttccgtctatggtgctggccgaagctggggccggggccttggcagctgtggattttggctgcccccgcggacccggatccgagctgctgatgtctgcttggcccgctggggctggcgagctcaccgtgtgcgggtgctggcaggcaagaactctcgggcagaatccatgctgtggtccttccataaagcggctatagaagcggcacgcaccaatatcattcaggcgcaaacccgcgtcgaagcggcacaagccactgaacggcgcattgccgcagatatcgatgacagcgaactgaaagccccgcgtgacggacgcgtgcagtatcgggttgccaagccaggcgaagtgctggcggcaggcggtcgggtgctgaatatggtcgatctcagcgacgtctatatgactttcttcctgccaaccgaacaggcgggcacgctgaaactgggcggtgaagcccggctgatcctcgatgccgcgccagatctgcgtattcctgcaaccatcagttttgtcgccagtgtcgcccagttcacgccaaaaaccgtcgaaaccagcgatgaacggctgaaactgatgttccgcgtcaaagcgcgtatcccaccggaattactccagcagcatctggaatatgtcaaaaccggtttgccgggcgtagcgtggtcattcctgtattccatcaaccagacaatctgcttgcggttggatagcattgaagccaaattgcaagccctggaggctacttgtaaatccttagaagaaaagctggatctggtcacgaacaagcagcacagccccatccaggttcccatggttgccggctcccctctcaggacaacccagatgtgcaacaaagtgcgatggtgaacccgtgagcaactgtggtacctccacctgtcccacaacctacaactcagcagtaccaagggctggacgctggtgccaccacacgggtcccgcgaagcctgctgcgaagtgaaggaagccagacacaaaagtctccatcctgcgggagtcactcacaggacaattctggaggacgcaaagctgtaggagcgaggagagacaggtggtggttgggggccgggaaggggcctgactgcagaggggcaaaatgtgggctgcctctgtcggggcagaagtgccccactctagacccttaccaagtcgtcggctgtacatcgaaaacgggtgagccttatgtgtgtacgtgataccgcaataaacctgacttgtaaaagca

SEQ ID NO: 128242 - DNA, 1010 bp, Homo sapiens
ctggactgcaaactcagcttgtgcctctctccagccctgtggcctcgctggacaatttttctaatctctttggagctgatcttcatgttgaaaaaggacaagtcccatcttcagatcaacacctgtcccagcgctgccattttcccaaggctcctccttggagtgtttgtaaggcacttttgccacgaagtaacccagccaccagcctcagtggaacctccaagcctaattctggaggagactttaactcggtgacaaaaagccagccccactgtgagttgaactctttcgtgttgaccgggcactctcctgtgctctggatgatgtcggaacacgacctggccgatgtggttcagattgcagtggaagacctgagccctgaccacccaggtacagagctgtgggacagtagttgttttggagaatcatgtagtgacagatgaagacgaacctgctttgaaacgccagcgactagaaatcaattgccaggatccatctataaagtcattcctgtattccatcaaccagacaatctgcttgcggttggatagcattgaagccaaattgcaagccctggaggctacttgtaaatccttagaagaaaagctggatctggtcacgaacaagcagcacagccccatccaggtccccatggtggccggctcccctctcggggcaacccagacgtgcaacaaagtgcgatgcgtcgtcccccagactacagtaatactcaacaatgatcggcagaacgccattgtagccaagatggaagaccccttgagcaacagggcaccggattccctgggaaaatgtcattagcaagtcagtagcacggcaccaaccccacctttccctgccactgtgcggagtcccatgagaataagtcaacgtccctaagccagggcacagtccagcacacgcttcatctctgtggtcacagggttgagcctggcaggcaccgccccagctctctgaggtcggggagggcaggctgggcgatgctgaatgcc

SEQ ID NO: 128243 - DNA, 1713 bp, Homo sapiens; identical to SEQ ID NO: 120519

SEQ ID NO: 128244 - DNA, 457 bp, Homo sapiens; identical to SEQ ID NO: 120296

SEQ ID NO: 128245 - DNA, 838 bp, Homo sapiens
atgccatacccgaatgctctccttggtgcccgaggaaaggcaaagaaatccactcttctggaagtcgggggatggggagcccttcggcctgctgctgcactgtgggagcccctttctgggctggccaaggctggagcccactccctcagcttgcaggaaggtgtggagggagaggcgcgagcaggaaccggagctgcctgcggcgcttgcgggccagctggagttccccgtgggcgtgggtttggcgggccctgcactcggagcagccggccagccctgctggccgcgggcaatgagagacttagcacccgggccagtggctgcggagggtgtactgggtcccccagcagtgccagcccactggcgctgcgctcgatttctcaccgagccttagctgccttcccgtggggcagggctctggacctgcagcccgccatgcctcagcctcccacccactccatgggctcctgtgcggcccgagcctccccaaagagcaccaccccctgctccatggcgcccagtcccatcgatcacccaagggctgaggaatgcaagcgcatggcgtgggactggcaggcagctccacctgcagccctggtgcgggttccactaggtgaagccagctgggctcctgagtctgcgcccagtcccatcgaccacccaagggctgaggaatgcgagcgcaccgcgcaggactggcaggcagctccacttgcagccctggtgcgggatccactaggtgaagccagctgggctcctgagtctggtggggatgtggagagtatatctagctcagggattgtaaacacaccaatcagcaccctgtgcctagctcaag

SEQ ID NO: 128246 - DNA, 669 bp, Homo sapiens
atgatgaatgaggggtctggtatctccttgtctggatgtgatctgggtacagccctgcagctgctttcacaggctattgttgagtgcctgaagcttttccagatgctcaatagatctaccattctgggatctggaggacaacagccctcttctcacagctctaccaagctgcgccccgactcaggagcccagctggcttcacctagtggatcctgcactggggctgcaggtggagctgcctgccagtcccgcaccgtgtgctcgcactcctcagcccttgggtggtcgatgggactgggagccgtggagcagggggtggtgctcgttggggaggctcaggccgcacaggagcccatggagggggtgggaggctcaggcatggcgggctgcaggtcccgagccctgccccacgggaaggcagctaaggcccggcgagcaatcgagcacagcaccggtgggctggcactgctgggggacccagtacactctccgcagccactggcccgggtgctaagtccctcattgcccagggccagcagggctggctggctgctccgagtgcgggcccaccaagcccacacccacccggaactccagctggcccacaagcgccgcacgcagccccggttcccgctcgcgcctctccctccacacctccctgcaagctga

SEQ ID NO: 128247 - DNA, 621 bp, Homo sapiens
atgtgcatagaaaaatccaaaggattctacaaaaaagctactagaaccactgacttcatcgagatgcagtcttgtgtccggaattggtgggttcttggtctcactgacttcaagaatgaagcggtggaccctcgcgactcaggagcccagctggcttcacctagtggatcctgcactggggctgcaggtggagctgcctgccagtcctgtgccgggcgctcgcattcctcagcccttgcgtggtcgatgggactgggcgccgtggagcagggggtggtgctcgtcggggaggctcaggccgcacaggagcccatggattgggtaggaggctcaggcatggcgggctgcaggtcccgagccctgccccgtgggaaggcagccaaggcccagcgagaaatcgagcgcagcgccggtgggccagcactgctgggggactcagtacaccctccgcagccactggcccaggtgctaagtcccccattgcccggggccagcagggctggctggctgctcttggcattaatggagcaggtgagcgtctgttcatgaaggtggctttctctcttaagacatgctctctctcctgctcctaccttaggctcactctgagcagaggtgggt

SEQ ID NO: 128248 - DNA, 3594 bp, Homo sapiens; identical to SEQ ID NO: 116845

SEQ ID NO: 128249 - DNA, 1616 bp, Homo sapiens
atgcccgccgccgcgccgcccgcgtccgcgtgctccgccacaccatcgtccgcccgccgcaggggctcggacagccgctgccggggaccggagccggcacgggcccgcgagccgtgttggaacagggcctggacagcaaatgaggaagacttattgcagaaattcagagcctagtgacctggaccagggtggaggcagcagaggaggacccaggaggcagtccaaatgtgtccggaattggtgggttcttggtctcactgacttcaagaatgaagccgcggaccctcacgactcaggagcccagctggcttcacccagtggattccgcactagggctgcaggtggagctgcctgccagtcccgcgccatgcgctcgtactcctcagcccttgggtggtcgatgggactgggcgccgtggagcagggggtggtgctcgtcggggaggctcaggccgcacaggagcccatggagtgggtgggaggctcaggcatggtgggctgcaggtcccgagccccacccgcgggaaggcagctaaggccggacaagaaattgagcacagcgccagtgggccggcaccgctggagacccagcacaccctccgcagccactggcctgggtgctaagtccctcattgcccggggccagcagggccggctggctgctccgaacaaaacagacttcaaagcaagagcagttaaaaaagacaaagagggacattatataatgataaaaggccttgtccaaaaggaaagtatcacaatcataaatatatatgcacctaacactggagctcccaaatttacaaaacaattaccactagacctaagaaataagacagacagcaacacaataatagtggggtatttcagtactccactgacagcactaaacaggtcatcaagacagaaagtcaacaaagaaacaatggatttaaactataccctggaacaaatggacttaacagatatttacagaacattctacccaacaaccgctgaatatatattctattcatcagagcatggaactttctccaagacagaccgtatgataggacacaaaacaagtcttaataaatttaagaaaattgaaattataccaagtactctccctgaccacagtggaataaaactagaaatcaactccaaaaagaaccttcaaaaccagacaaatacatggaaattaaataacctgctcctgagtgatcattgggtcaacaatgaaatcaagatggaaattttaaaattcttcaaaccaaatgataatagtgacacaacctatcaaaacctctgggatacagcaaaggcagtgctaacaggaaagttcatagccttaaatgcctatatcaaaaagtctgaaagagctcaagtggacaatctaaggtcacacctcaaggaactagagaaatgagaacaaaccaaacccaagcccagcagaagaaaagaaataatgaagatcagagcagaactaaatgaaattaaaacaaaaaaatacaaaagataaataaatcacaaagctggttctgtgaaaagataaacaaaattggtagaccattagcaagattaagcaagaaaggaagagagaagatccaaataagctcgattagaaaaaaaaa

SEQ ID NO: 128250 - DNA, 1686 bp, Homo sapiens
tgtttgaatcagcaacactgtataattgggagaaaatgtcatatgttctacaggtctttcaatctcaagaaaatcctcgatcatgtaacttctatctttaataataaaagaatacacaaagccatcaattccagaagccagcacgccctccttctgatataccaaggttactggactgataaaatttcttctgtcttccaatggcgattcctcttctatcttattaagtacagtcacttgcaaggtgtctccattaatcattaaaagatgaccctcttcacagccaatgtacaagtcacttgttggagtccagcaatgcatagtcgggtgaagcaaaggatatagatcatctttcggccggaaagtctctgcctctttgcctaccagcccggcaatggctgacagtggcagcacgggaccatagatgagatctttcggcaacgactgggggaaaacgacatccgtttcattaaaaaatgacccatcttctagaggtaatttcaccgaccttgctctgaaacaatgctcctggttacttctttcaatggtccacacgctcactgtacttggacttgataagcacagctggcgccagttcatggggttaaaagacatttggttcacatccattccaggctgtgatttcttacacaaaatgatactcgattcccagttccaaagggccagttcaaattctgggagagaggagtaactagccaggtaggtgccacagtaactgaatgaaagtaaagtgtagtccaggagaatgttgcctttcaatttggtccttctggtcaatcctggaaagctgtatacgtagatgagaggttttagcttccggtcagaaaaagccacaacttcacaggggatgttagttgccatgacgcccacaattccattactacactgcagtacagtctttttcttggtttcaatattaataaatattacataattcccacaagggtagcaaatggtgttgtcgttgacaaaatgaacattctgcttagggaatccttgcacccatctttccgccgccgcggggctgcgggccgcgacgccgctgctgtgtacacccgtatcccggagaccgtaagccccgcgcccattggctctgcgctttggcccgctcccttcaaactcaggagcccagctggcttcacccagtggatcctgcacagggctgcaggtggagctgcctgccaattcctgcactgtgcgttggcaggtctcagcccttgggtggtcgatgggaccaggcgccctggagcggggggcagtgctgatcagggaggctcgggtggcacaggagcccacggcggagtggggaggtttaggcatggcggggctgcaggtccggagccctgccccatgggggaggtggctaaggccccagcgagaaatcgagcgcagcgccagtgggctggcactgctgggggaccctgtgcgtcctccacagctgctgacctgggtgctaagccccttactgcccggggtggtggggccagccggccgctccgagtgcagggccgccgagcccacgcccacccagaactcgcgctggcccgcaagcaccgtgggcagccccggttcccgcccacgcctctccctccacacctccccgcaagctgagggagcccgctccggcctggcatccaaggctccaagacatatcagaagtcccat

SEQ ID NO: 128251 - DNA, 1498 bp, Homo sapiens
atgggagttacctgtttaaatagaactgggtcaaagagaaattctgtgacaaatgccgtggtgataatgggtgcttttgttgagaaagagctcggagactcaaggtcggtgaaattacctctagaagatgggtcattttttaatgaaacggatgtcgttttcccccagtcgttgccgaaagatctcatctatggtcccgtgctgccactgtcagccattgccgggctggatatcatttacaaggtaaaaactgttttcaataatgagtttgacgctgcatataaacaaaaagagtttgaaattgcacgcgtgaaggaaagaaatgttcgaattcgagaaattattttagatctggaattggaagaagcagtctggcaaccagaatttgaagactgtgagaagccagagagaacgcttgttgtgcaagatgaggaggcactacctaccttccccaatcccaaatgcagtcattctaatgttgggtgggaagctgcctctggagccacctggaatgtcaggtctctgtctcagtattcctctctgattctggctctttcccaggatgccagtacaagactccgagctctgatggacatgatgggaggagttctggaagtcaagaaggaagatattttgagaatggtgattcctcaacctgctttcatggcaaaacctgatgctgtgtggactgaagaagaaaagaaaacaattcaaagattatgagaaaaaagtaaaggagttaaatgaagaaagagataagtatagaaagggatctgtttatatctacacttttggtaaggagccaaccttaaataaagtcctagatgcttgtgatgggaaatttcaggcaattgactttatcacacctggaacccaatacttcatgggctgcaggtggagctgcctgccagtcctgcactgtgcgctggcaggtctcagcccttgggtggtcgatgggaccaggcgccctggagcagtgggcagtgctggtcggggaggctcgggtggcacaggagcccacggcggagtggggaggtttaggcatggcgggctgcaggtccggagccctgcccatggggaggtgctaaggcccagcgagaaatcgagcgcagcccagtgggctggcactgctgggggaccctgtgcgtcctccacagctgctgacctgggtgctaagccccttactgcccggggtggtgggccagccggccgctccgagtgcagggccgccgagcccacgcccacccagaactcgcgctggcccgcaagcaccgtgggcagccccggttcccgcccacgcctctccctccacacctccccgcaagctgagggagcccgctccggccttggccagcccagaaaagggctcccacagtgcagcggcgggctgaagggctggctcctcaagcaccgccagagtgggtgcccaggcagaggaggagcccagagcgagcgagggctgcgagggctgccagcacgctgtcacctctcacgatga

SEQ ID NO: 128252 - DNA, 560 bp, Homo sapiens
atggctgccctgctgctggtcggggcctcctggctcctggcccgtgtcctggcctggcgtacgccttctatgacaactgccaccgcctccagtgtttccagcagccccaaaacggaactgcttttgaggtcacctgagcctgtgcggggcaatgaggaggacatgaggctgatggaggatctgggccactattccgtgatgtccaactctggtggcttgggtctttctaccctgtcctgctctcgtccaccctacgttcactgcccctgtgctccaggcttcaggaggctagcctgggttcactaccaccatgggcctgagtttcaagagagccaaatggcaacgcctggcttggagggcagtgtccgtctggaaatgtttgagcacatcagcctcatgaccttggacagtctacagaaatgcatcttcagctttgacagccattgtcagatggtctctcctgggtcctgtacaacctcgcgaggacccagaataccaggagcactgccgacaggaggtgcaagagctcctgaaaacggtgatcctaaagagattgaatg

SEQ ID NO: 128253 - DNA, 2225 bp, Homo sapiens
ttttttttttcctggataatttttgtatttttagtagagacgggatttcaccatgttggccaggctggtcttggacttctgacctcgtgatccacctgtctctgcctcccaaagtgctgggactacaggcgtgacacgcgccgagccaagttccctttttttgtttgtttttgacgctggtcatcagtttcctttgcttctgggatgccttctgcaccttgctgttgggggcatcctcaatgcccatctgcagctcagcccacaggcccgtcctgggcagggtgccggggcctcaccatgcccaatgggcaggcaagccctgcttcctaggtacccccgggggctttcccgtttctttgcatcaaacagcccctttgggagaatctgatgacaggtgtggggaagttttcccgagaggcagccactttagagggtccgacgctccccactagagagtcggcccgcagtgcagacaaatcgcagatcttcctttagagagaacagaaggctggagaggagacgcggaacccggtccgtggagtccgccagaaaaggaaacagctggtcgctggggaaactgcagcctccctgctcccctgccaggcgtcgggcgagagctgttctgttccctgacaagcgcgtgggccgccagtgctattcctgccacagtgtgggaaggcgctgggctaagggctgtgcttcccggagctgcttctagcctgatttccggccaagccacgcagtccctggtgcccgggaaggcgccggcctcgccgccgctccaaagcgagtggcgcgtctctcgccggctgtgcctccggcctgctgtgcggctgcagggagggagcagctctgcggcccaagctctgtgacctcaactctctgggccgcggctcccacgtgagaaatgaggtgcgcttgttggagagggggcccccgttgctgcccacagaattccgccccagaaacgcttgagtacgtggagcctcgggggacgggtgctccgggaaccacgcataccggcctccccagcccgtcgcagggttgcagaggcgccgagggctgggggggctgccggggctgccgggccctcgtgcaggctcctccccgcagcctcgcggccgggcctggagaccgcgtgcccggacgccgccgccagcctcgtgggccgcaaaggggcgggggcggcccctggcggcgggaggactcgcccgcccgagggaccccgggccaggctccggggtcgccccggctgggtctctgcggccccacagctctgggcggggatgggggcgccggcgcctacgcgcgaggccaaccgggggaaaccgaggcagtgaatggcccaggccccgcccggttatcccggagccaggccgggagcgcccagtgtcccgcgaccgcagccgccgcagcctgaactcgtcccctcccagtaggatgcggagcgcggcccttccatcctgtccctgccaccgttgcttccccacgccgggccgccgtcgggatgggcagacggcgcggccggtacccgaggcctgcgagcgcgaggcccgcggggcgctgcggagccgggagcgcggagccggggcgggggacagacaaaggcggggacggcggcgaggggaagacaaagcgcggaggggggtcggcggcggcgccggggccccgaaggcggctccgggcgcggcggagccaatgggcgggcgcggggcgggggccggcgggggcggtgcagcgataaggcggtggcggcggcggtggctcggggaccactggtagcggcagcagctcgcgcccgcgccctcctcgtacccgtgcgcccccggagaccgatcccgccccgcggcccaggccgggcctggtgagagccgcggggggaggggccgcgtccggctccggaaccgggagaggcgccgaggggtgtggggtgagggccgcccgtggggtcccggcgagtctgcgagccgctctcgcccggggcgcacaggctcgagtcctcgtttcagggccggcccccggctgggcggagccgagacccgctggcggggctcgcggcgtcggggtctggggtccggtcctcgcggggccaggtcgggggccgaggggcggggccgggcggggacctcgggcgctgtccaggggctgcgcagcctaggcctggacgcccgggcgcggcgcagggcagcgagggccggggtcaggtcggggcagcggcttctcat

SEQ ID NO: 128254 - DNA, 2853 bp, Homo sapiens
atgcatccccaagaaaggacggcagctgccacaaatgctgccatcattattactgatggagcagccacccagatgggggtcacttcaactcctgctccaggccatcccagagatggctattaccagggaaaggatgtttccctgctggcacacacacactcattcaagatctcagcagccatagaagctaaaacaacatgggttgggatgtgcaggtggggttgtaaggttgctcttgatgtgactttcgatgtccaccaaggaaaacctgagggtgcaggaaggaataaacaaatccccttcatccaggacttcccatttgccctcaggagtgagaaacgtccctcccttcctgcaactatttcagggaagacgctgccactcaacacaaaaacctgtccccaattgcttcaatgcaaaagagaaggacattccctccaatgcctgatctggctgcaaatggtcccccaattaggacgcctggctgtaggcggctgccattcaaatgcttggttcccatccaagaaagcagtcatctgggaaaagtttaagcataatctctccggactagtttctgataaaggagggaagaggacagggaaaggacttggggagtgcttactgatgatgaggaagatgagccctgctttggaagcactgacaacttttgacagcagcctgcagcatcattttccaagaactttcccagtttctgcactggaagccctgaatcctggcaaaccacgacagctggtcaccccagcaccagcccaggctctggcgggggcttcactgagctcctggagaaggaccttaaaaatcctctatccaccctggacacctaggttacttctgaaacaaccgctccaccttcacgacctcctcaacaggcgtctactgcctttggaattggatgctattaatacaaagagaaaaatgcaaaatggcaagcaatcaaccatcctaaaacctcctttaatgatgtcactagtgagacagcagaaagagagagatgggacttcaacttcacaggctgttcttagatgcccaggcagacaagcaaaggaaatgccggcttccacatggagaggaatacaagaacctgcaaactgctcttcctatcccactcacgaagctctccaaaccgttcttcctcccaatagcagtgacactcctggaacaaaaatccagtcacaccagtgcctgcactggcctccctttaatcctggaataaaatccaaattcgttgagatggcccaccaggcctacctgaagagcatctcaattctattcctccaaccttacctgcagctactttccacttgctgttccctggcctcactggtcttcctacagctctttgaacaagccacacgttctcccagcccagagcctttgcacgtgctatgccctccacctggagacctccccacttttcacatgaccaagagaaggaggtaccttctcttccaccaggtctcagtttacatatcgtctccccagagaatctgtcccaactaccgtatatcaagtccacagttgaagactatctgcattaagcacttgaggttcatccacaatatagctgggatcactatgtccttgcaagtttgggcccctggccagttagagatgtcgagtcagagagcagcacagagtacagagctgatagccagacttttctcaacctcctcagacccactaagaaatggggacatcggaatcattgcacctggaaattttctccttctgcaacagttaagccatgacctgacgatacatgcaacagtttgcctatcagacagctctgccagcctacaagttccagaaaggcaagcacagcatgttatccacatcttcagcagtaagtgctacatagaagatgctcagtcaacgggaaatgagacagtcagtgttgttaagagtacaggtgacagcaacaacggtcaggactatgcactggccaagaagtcaaggcttggggaacagatctcaatacactatgtcacacgagctgtcacagccgcttgcccatccatttcccccagagaccaaaagtcagaagcaggcctgtgtctgtttggtcgctgcatctgcaacagaagaagaggaaaagacacagacacgtggaaaagaaggccagaccaggtggagatcaaggcagagagggcaatgatgcggccacaaagaacgctgacagccaccagaagttggaagagacaaggaactgattgtcccctagagcctccaaggaagtgcagccctgctgacaccttgatttcagactgtggaccccagaactgctgttattcaaaccatcgcagcagcctcctcattgccctcgctgccttcagcctcgccctctccaagcccacccccgctaccagatgtcaggaagaaattccaaaactcaaaccaaaggctgatacgttcttgccctacacttcactcaatgctggcaacccaatgagggacatcaggataaaatcgagaatgcgcgaacaaccaaaacccagtgaaaatgctggtgcaagtcagaagagggggacctgggttctaagagcagccagacggttaaggcagtctaagttacaggatgagataggaggtcggcacaagatacaggtcataaagaccatcctgataaaacaggttgcagtaaagaagcccgctaaatcccaccaaaacaaagatggccacgagagtgacctctggtcatcctcactgctacactcccgccagcgccatgacagtttacgaatgccatggcaacgtcaggaagttaccctatatggtctaaaaggggaaggcattaataatctatcccttgttcagcatatcatcaagaaataa

SEQ ID NO: 128255 - DNA, 2487 bp, Homo sapiens
atgcaaagtgccactagtgatgctggaagtgctcccaagaagcagaaaaaagtcatgaccttacaagaaaaaagtggaattgcttggtatttcttcacagcagcgcaagaatggcctaacacacctcccaaactgagaacctgcactgagagcatgggctgctgtcttctagactgctgctgcactgggcagggggattggacaagggttaccctctattgcagatatcctttcatcctgtttgggacaaacgcttgggtggcaaattttgaaagacctcgaatgaatgcgaattctctgcttgcaagccctactggacttagtccttatctccgatttggttgtttgtcatgtcgactgttttacttcaaactaacagatctctacaaaaagactacattagggtcacttcctgacgctgccatggcatttgtaaactgtcatggcgctggtgggactgtagcagtgaggacgagcagaggtcactctcgttgccattttggttttggtgtgtctggaactcggtactaccaccttactccccaggtggtctgggagaggcagcaacagaaagtagacagtttattagggacccagcagatgctggaagcccagggaagggagtttcagggccctgcatccccctacctgtccccacaaatgcaccagctgctaagaccacacctcagcctccttcaccggacctctaaccccccaactatctcttcctgtgtgtggatggacaccgtccaatttgttgagagcctaaacagaacaaaagtgactccttcaccagccaagcatagagccaagatggatgatattgtggttgtagctcagggctcccaggcctcacggaacgtcagcaacgatcccgatgtcatcaagttgcaagagattccaaccttccagccccttttgaaagggccttatcacttccgtttcttggaagagaggcctctggcctcacgtccctcaatccatccctcctgtggcagttattggttaagactagggtgtgtagctgttggccgtacaggcctagacttaacttgcaattgcatagcgcttcaggtctgcaagctctttcaaaacagaggtgaagatactgtcaaagcgctggggccgggagcccggagcctccgcggggagggacgcgctaatgttgccgggaagcagctccgggttgcagggcaggaacgtgcccttcccccgcggcaaacttgccgtcgctgcgacggaagcaggaacttgctaaccacaaaacccgccaggccggtgcgggagctgcggagcatccgctgcggtcctcgccgagacccccgcgcggattcgccggtccttcccgcgggcgcgacagagctgtcctcgcacctggatggcagcaggggcgccggggtcctctcgacgccaggggacaaagcatgtaacttgatgatcttcgacactcgaaaaacagctagacaacccaactgctacctatttttctgtcccaacgaggaagcctgtccattgaaaccagcaaaaggacttatgagttacaggataattacagattttccatctttgaccagaaatttgccaagccaagagttaccccaggaagattctctcttacatggccaattttcacaagcagtcactcccctagcccatcatcacacagattattcaaagcccaccgatatctcatggagagacacactttctcagaagtttggatcctcagatcacttggagaaactatttaagatggatgaagcaagtgcccagctccttgcttataaggaaaaaggccattctcagagttcacaattttcctctgatcaagaaatagctcatctgctgcctgaaaatgtgagtgcgctcccagctacggtggcagttgcttctccacataccacctcggctactccaaagcccgccacccttctacccaccaatgcttcagtgacaccttctgggacttcccagccacagctggccaccacagctccacctgtaaccactgtcacttctcagcctcccacgaccctcatttctacagtttttacacgggctgcggctacactccaagcaatggctacaacagcagttctgactaccacctttcaggcacctacggactcgaaaggcagcttagaaaccataccgtttacagaaatctccaacctaactttgaacacagggaatgtgtataaccctactgcactttctatgtcaaatgtggagtcttccactatgaataaaactgcttcctgggaaggtagggaggccagtccaggcagttcctcccagggcagtgttccagaaaatcagtacggccttccatttgaaaaatggcttcttatcgggtccctgctctttggtgtcctgttcctggtgataggcctcgtcctcctgggtagaatcctctcggaatcactccgcaggaaacgttactcaagactggattatttgatcaatgggatctatgtggacatctaa

SEQ ID NO: 128256 - DNA, 459 bp, Homo sapiens
atgaagatgagtgagcgggccgcctcgctgagcaccatggtgcccctgcctcgcagcgcctactggcagcacatcacacggcagcacagcacgggacagctctaccgcttgcaaggtaagcgtggggctacctgtgtccagggtgtgggccaggcctgggagtactggggagggggctcagctcaactcgcagctgctgcatgccagctggttagtgcccttcctccaaagacacctgtgaaaagtcaggtggtagaacccaaccagtgcctccattcgaatgggctgcccaagacgcttcccttgtcaggagatgcagaattctggcacacagaccatgcaggggaacttcctgacattaccatggattttgtaaactgtcatggtgctggtgggagtgtagcagtgaggacgaccacaggtcactctcatcgccaccttggttttgatgagtcttag

SEQ ID NO: 128257 - DNA, 2477 bp, Homo sapiens
gcggctttggtggaccacagtacaagcctatgaccccagggcagctctccaacgtgcgggcgccggggtcggctgagaagggcagcggggacacgggggatgcccggccgccctcggccgcgccgcctggggggagcgctggcgaggcacggacggcgggcgcccggtacctctgcccgcggtcctcgctctcgggcggggcggcggcgacgcggacctgcggactagcgaacccggaggaggaaggaccctctgctaaatgtggcgagaatggtagtgcagagaggactgaccttgggggaaacaagtacaaccaggagaggatacaaatagagtatgtggaggtgctgtttgcagatttctttagagaagtttttgcgatatgtggaagctgtgatgctttgggaaactggaatcctcaaaatgctgtggctcttcttccagagaatgacacaggtgaaagcatgctatggaaagcaaccattgtactcagtagaggagtatcagttcagtatcgctacttcaaagggtactttttagaaccaaaggaaaacattcatcatcgcggtgacttccttgtaacctttccaagttcttcacgttcctcatttgttcagactggacagttctctgggagggacatagacaaggacccaaaactaagtcctgtgggcaggggctggggttttgaatgggctatagagctatgcatggcagtcaaagaggatgttcgacaggaagtaggaagccatatagggttacttcctgatgttgccatggcatttgtaaactgtcgtggcactgatgggagtgtagcagtgaggatgaccagaggtcactctcattgccatcttggttttgcctactgtgctagtgggttctccttggagccttgtgttgaaaatgactgtggggcctcttctgcagaggtgcaacagggcttcgtgttcatcacatctgcctcctcctcttcctcatattgcactgaggccaaaagggtgaagctgacactagaaggcctggaggaagatgacgatgatagggtatctcccactgtactccacaaaatgtccaatagcttggagatatccttaataagcgacaatgagttcaagtgcaggcattcacagccggagtgtggttatggcttgcagcctgatcgttggacagagtacagcatacagacgatggaaccagataacctggaactaatctttgattttttcgaagaagatctcagtgagcacgtagttcagggtgatgcccttcctggacatgtgggtacagcttgtctcttatcatccaccattgctgagagtggaaagagtgctggaattcttactcttcccatcatgagcagaaattcccggaaaacaataggcaaagtgagagttgactatataattattaagccattaccaggatacagttgtgacatgaaatcttcattttccaagtattggaagccaagaataccattggatgttggccatcgaggtgcaggaaactctacaacaactgcccagctggctaaagttcaagaaaatactattgcttctttaagaaatgctgctagtcatggtgcagcctttgtagaatttgacgtacacctttcaaaggactttgtgcccgtggtatatcatgatcttacctgttgtttgactatgaaaaagaaatttgatgctgatccagttgaattatttgaaattccagtaaaagaattaacatttgaccaactccagttgttaaagctcactcatgtgactgcactgaaatctaaggatcggaaagaatctgtggttcaggaggaaaattccttttcagaaaatcagccatttccttctcttaagatggatggaatgtgggatggtaacttatcaacatattttgacatgaatctgtttttggatataattttaaaaactgttttagaaaattctgggaagaggagaatagtgttttcttcatttgatgcagatatttgcacaatggttcggcaaaagcagaacaaatatccgatactatttttaactcaaggaaaatctgagatttatcctgaactcatggacctcagatctcggacaacccccattgcaatgagctttgcacagtttgaaaatctactggggataaatgtacatactgaagacttgctcagaaacccatcctatattcaagaggcaaaagctaagggactagtcatattctgctggggtgatgataccaatgatcctgaaaacagaaggaaattgaaggaacttggagttaatggtctaatttatgataggatatatgattggatgcctgaacaaccaaatatattccaagtggagcaattggaacgcctgaagcaggaattgccagagcttaagagctgtttgtgtcccactgttagccgctttgttccctcatctttgtgtggggagtctgatatccatgtggatgccaacggcattgataacgtggagaatgcttag

SEQ ID NO: 128258 - DNA, 661 bp, Homo sapiens
  misc_feature (1)...(661): n = a,t,c or g
ccatgtattcaccaccattcctccataactacgggaaggtatctatcagaaagaccctcagtgttacaggaaaagggtcccgatccagactccaagagaggattcttggatctcacggaagaaagaattcagggtgagtcaatagtaaagtgaaatcaagttgaatgagaaagtagaggaatgaaagaatggctactccatagacaagagcagcgcctagaggctcngtgatgcccacttttatggttatttcttgcttatttgctaaacaagggggggattattcattcctcccccttttgggacatatcgggtaacttcctgatgttgccatggcatttgtaaactgtcatggtgctgtcaggagtgtagcagtgaggacgaccagaggtcactctcgtggccaacttggttttggtgggatttggttggcttctttactgcaatctgttttatcagcaaagtctttatgacctgtatcttgtacggacctcctgtctcatcctgtgacttagaatgccttcaccatctctgctgggatctgttcctggacaatctgttcctggacaatctgttctgaattattggcatcttgatgctcacatctgcttggcattgtgaaataggttttgaatgaatattctttgaaggtgaatgcact

SEQ ID NO: 128259 - DNA, 1114 bp, Homo sapiens
atggccatgagagtgacctctggtcgtcctcactgctacactcccaccagcgccatgacagtttacaaatgccacggacccaaggttccgatccgcgccaaggcgttccggtcagcagcagccccgcggctcctcgggccccgccgcgctggcaagccccagtccccgccagcccaatcgtgctggcgctttaaggacgggcggggcgggctgggcgacagcgctggacacctggagctgcccgaggacgcggaggagagctcccatgggatcatgcctttgagcagccgcacagcaatgtgtgacgggagccacttggcctccaccctccgctattgcatgacagtcagcggcacagtggttctggtggccgggacgctctgcttcgcttggtggagcgaaggggatgcaaccgcccagcctggccagctggccccacccacggagtatccggtgcctgagggccccagccccctgctcaggtccgtcagcttcgtctgctgcggtgcaggtggcctgctgctgctcattggcctgctgtggtccgtcaaggccagcatcccagggccacctcgatgggacccctatcacctctccagagacctgtactacctcactgtggagtcctcagagaaggagagctgcaggaccccccaaagtggttgacatccccgactaacgaggaagccgtgagcttcccagtggccgaggggcccccaacaccacctgcataccctacggaggaagccctggagccaagtggatcgagggatgccctgctcagcacccagcccgcctggcctccacccagctatgagagcatcagccttgctcttgatgccgtttctgcagagacgacaccgaagtgccacacggctcctgctcaggcctggttcagactgcacggggaagaaagtaaaggcttcctagcaggtcctgaaaccaaaagacaaaaaaggctgtgcccttctcccaaaaccttaggccgggcgctgggacaacaggaggcccttcctgcaaacgttcgttgttgaaggctgttctatttatctattgctgtataacaaaccaccccagaatttagtggcttaaaataaatcccattttattatga

SEQ ID NO: 128260 - DNA, 489 bp, Homo sapiens
agtgtgagcgaactccgctggccatggcctccaactttaacgacatagtcaagcagggctacgtgaaaatccgcagcaggaagcttgggccattgaagatccctacatatcacctgtattttctgtctggagtctgtcttgcacccagcactgtcagtctatgctctggggacaactagaccctcaccatagtggctcgctggcagaccaatcccatgtccttgctaggtcatatgcagggatttttgaatcccttcaatgttacaatgttgctgagggaaagagactctaaaccactatttcatgttctttctcaaccaaataatctatgtaatgattttaaatggctttgaccacatgtcttgctatggaatccactggagggaaactgtctcctacgattacaaatagaagcaggatacgttccttctgtgctgtccctcttgcttttagcttcctatccaccctatctgggtttttctatcacag

SEQ ID NO: 128261 - DNA, 1637 bp, Homo sapiens
tttttatatgaatacttttttattgttttctatgaaggctgcactttacaaaggcaaagctctaaacagtgaacacagcaaaagaggctttgtaagtgtaaatatacatttgcacacatcgttaggcagaaatggcgttcaagatgacatttcaaacgctgtgaatgccatagttacccaagaagcaatcaatgcactttccttgggccctatgttataattgggttacatactcagtttttgttgtgtgaaatcctggaggggcttggatggggtggaggggaatcctatagactccagggccaagtgcgcaggaaggggatgctcaggctacattcttcagtctcattttcatatgcaggtgactcgtgtgaaccgcagacatacatcgttgtctgggacttaactcatccattagtttatatagtctgaggcatcagatacaattgcgatttcaagaagatcaaaggccgagaaaaatgatcaagcatccagtcgtaaagcaaagggcttcaaaggtcaagctaagaagacgactcccttccacctccagctctgcacctcccttggctgacagctgtgtggtgacagacttgagcattccgtcccggctgcgaggaacaaccagactcctggagaaccgcagcttttcccgtgggttcgtccttatatgcctggaaaagaatgaggcgctttcttctacccaagaaaagcccttgaaacctggccgaggatctgactctggcgcctgctctctctcgccttggtggggctcacggcagcgcacgttggctccaggctggaggaaggggggcgttgctgtcacccagctccgcactcgctcttgcagcctcccagcctactacagagctgctgaagttccagaatgggcccctgttgtccttggggtacagtctgcacctttaatgcgaaacccagcagaggcagcaccaagagtcaagtctgcctttcccgtcctcctgtccccaacacctggcgccgccaactcccgacaaagcgactcctgcagttccacccgaaaggcgcacacttttgagaacagaccatcgtggatagcaccgcaaagaaacctcctccaaggcacgttcctcgttggaactgacaacccctttcgtctactgacttccccgcacggtcgaagacagcccggtgcactcgaggatggggactcaggcgctcctggagtccccaggtccgtctgcggagccccccggcaggtgtgggcccccacctggccaagcaacaagcgggccatccgcctaagggccgggtccctctctgccctgtacccgcacgggtcacctctccctgcccccccccaggcagccagccgggccgaacgagcgccggggaaggagcaagccgagcgagccactcaccccaagcttcctgctgcggattttcacgtagccctgcttgactatgtcgttaaagttggaggccatggccagcgcgatcgggctcctgcgccccgcgatccgctctccggagtcgagagccgccgtccgccgccgggtctgcgcgggtctcgcatccagccggccgccgccagcagcagcgccgccgcccgctcttccccgagctcccgccgaaatctccatctagagcccgtgtaa

SEQ ID NO: 128262 - DNA, 420 bp, Homo sapiens
caagtcctccttgtggcgctccgcctcctccagtcttctgcgcacccgctccgcgcgctcccgcgccgcctcgcgcgcctccccttgcagaggctgcgctgcctggcttcgcctccgcagcaggctccgctcccgctcgctcaggtcctgcaggcgctggttgaggctctcgctctcggcctcgagcccgcgcatcagcttctctagctcctgcttccgctggcgaccatctcggttatccttctgcaactgcagcagcagctcctgcgtcgcggccatggctgtggagaccgagcctaaatgccgcccgcctcggggacccagcctgcggctggcaggcgtcacaatgggcggcagggagcgcctagcgggctggatcacaatgggcggcaggggaagcccgagcgtagcccgacacat

SEQ ID NO: 128263 - DNA, 1284 bp, Homo sapiens
ttttttttttttcatcccttgaggagtttattaggcgaccttggtctacactctcaggagaggagtgcaccagaaataaagccaggtgccctggagtccacctggagccaggcgcggggcgctgcacttaggttggcagaagcccgttagcgcgcagctccagcagcggggacagcgtgtagcgcaggcggcgcagcgtcgtctccgaggtgaggctccagagccacgcggagacggcgccggggtccaacagcaccgtccagagcagcgacagccccaggaagaggagcggcagcgtcagcagcacctgcagcgcgcccagcacgcaccgccctgatggccagcgcgcgagggccgccgaacagccgcgtctcccgcgcaggcgctcactcggtccgcccctggccatctccctcccatgagcgaactcggtgctgtaactgcactctgcgaaagctgccccgtcacaccgcccccaggtctgggggaggagaggcgggaggcaccttggcgtctgagtggggccgcacctgcaggaactacggtctgctcctggaatatggcccaggcctccgctgtctgcagcgcgtcctgctgcagcttctcctcctgcaaggcgcatttggtctccgccagctccagttcattctgcagcgtcaccaattgggctgcgagttgctgctccgtgctcttctggctctgcggttcccctccgtagtagaagagcaagtcctccttgtggcgctccgcctcctccagtcttctgcgcacccgctgcgcgcgctcccgcgccgcctcgcgcacctccccttgcagaagcagcgcttcctggcttcgcctccgcagcagcctgcagagggaaactgaggttggcgctacaaggcggactgggtcgctcaggatcccgcagtcgccaggaaggaccagccgcaggctcatgattgaggactgggaagtcctggccgagtcccccacctgggtccgctccgctcccgctcgctcaggtcctgcaggcgctggttgaggcaggctctcgctctcggcctcgagcccgcgcatcagcttctctagctcctgcttccgctggcgaccatctcggttatccttctgcaactgcagcagcagctcctgcgtcgcggccatggctgtggagaccgagcctaaatgccgcccgcctcggggacccagcctgcggctggcaggcgtcacaatgggcggcagggagcgcctagcgggctggatcacaatgggcggcaggggaagcccgagggtagcccgacacat

SEQ ID NO: 128264 - DNA, 2464 bp, Homo sapiens
agcggtaccgctccggaatttccgggtcgacgatctcgtgttggagtacgagtctgtgctgtgtgtgaagccagacgtcagcgtctaccggattccgccccgggcctccaaccgcggttacagggcctctgactggaaattagaccagcctgattggactggtcgcctccgaatcacttcaaaagggaagactgcctatatcaaactcgaggataaagtttcaggggagctctttgctcaggcaccagtagaacaatatcctggtattgctgtggagacggtgacagattctagccgctactttgtaatccggatccaggatggtactggtgggtaaagcaggaatctgagatttccaaggaatctcaagaaatggatgctcgtcctaagttggatctgggcttcaaggaaggacaaaccatcaagttgtgtatcgggaacattacaaacaagaaaggaggtgcttctaagcccaggactgcaaggggtgggggtctgagcttactcccacccccgccaggaggcaaagtcactattcccccaccatcctcctcagttgccatcagcaatcatgtcaccccaccacccattccgaaatctaaccatggaggcagtgatgcaagatatccttttaagatttggattctcctgctcctgtcacgacaccagcaccaactccagtttctgtaagcaatgacttgtggggagacttcagcactgcctccagctctgttcccaaaccaggcaccacagccatccaactgggtccagttctgaatggcattggcaggacattaaggacagacttgaggaataaaaatgaccttgagggcaccaatctgtgagggaagttaggaacccatttcctccccagaaccagaatgactggacaatctttttcatagcttctccatcacattcaagctggtttatgtcactcccctgtgttgttacttgtacagccaagaaagtatctgttatctcctgcgtagtaccaaggtagggggactagttggatcttattatagttttggctgactatgcagggcttaaaaaggccagcgtctgtttgaggggggaatgacctcttaacatctgttaaaatttgtcttcatcttttaattttctttaacttatttcaaaattcatctcatgacccttgtgtgcctctttgtgaagccctatttagcaatttcaggggagtcaaaaaccttgcaacttccttctccactaacccaggactaaaaatggacaggctgacctcagtgtttacaaattcagaattttgataggggtagatatggagaaagacctatttcctgggtctctgctgtgtagtctccttcaggcttattgtgctcagtgaacatccagtgctgggtgcagctccatcaccctcttgtgtgtttacatgtctctttctatgataagagggttgtgttggtggcacctccactactcttttctgtttgttgagtttgaattgtgtaacatctttgatcagtgggtgtatctgtaatgaaggaggttcaagaggctgtgctttccaagtgatagtctataggagtgtttaatttcttgcagctccatctggttgctgcatttgaagcatggcattaatttgtatttgccctgttctttgacctaaagttgaagggtttagagtttttaacctgatctgtagagcagagaggttgaaagcacttaactcttgtttagtatcctcattgccttgctgcctgggtatctggcccctttccataaacatttcttttcagttcatgtagttctttaatagaaagctgctattatgtatattgtcatttgtgaaggaagttggagagtcacagctttactgtgacaggttttgcccaaggctttgatacctgtcacccagggtatcttaaaagcaagttgttctcccactactttcctttccctctgccctgccattcctattacaatgctgtgaaaaaagttctgcttcttaggtgaatgggtactttctattttgtttctaaacgagcaattttgaggatgaaatgggaagatatcattgcttcctttttgcacctattgggtatgtacactctggccgaagggagtccttatgtttagtttcaaaatatattactttcctggattctcttcttcactttttctgactttgggtccattttcttttcattgcctccttttccaggcagctctattcttgcagagccatagcaggacatgttaaaattccaatagaaaacactaaagggaaagtctgtggaatcactagtgactaaatactgggaacctattttctcaatcttcctccatgttgtgttctttgtattcttgagatgataatatattatgtatttgaattcctgaaaaatggaaaatgtttaagatatatgtatataaagtgtatgctgtattggtgcaataatggtaattaaaaatatgaaaaaag

SEQ ID NO: 128265 - DNA, 1065 bp, Homo sapiens
atggttggaatatataagactggagtcttttgggttggctgtgatggaaagacaaagaggaaaggaaacttaaggatgctggcaagagaactgttgaaacaaggagatgggaggaataaagagaaggctaacaatgtgcagaacatgaagaagaacaggaattgggttgatcccacgtatagtctatttaacaggatcaaattttccaaaaagataatcggaatacacgccgaaagtgtggcaaaacattttaacaggtgtcgtcctgaaaaatcggagataaagagtgtttcaatatggctccccgcgtcaccgaaaaggttaatctcagaaactaacttgaactcgcgcggaagtgacgcaacagaagttgtcgcgctttgcatctccgcctcccgtgctccgcctccggtcttacgtttcgcccccggcagcgccgacagcggacccaagatggcgaccgagttggagtacgagtctgcgctgggtagtgaagcctaacgtcagcgcctaccggattccgccccgggcctccaaccgcggttacagggcctctgactggaaattagactatgcctgattggactggtcgcctccgaatcacttcaaaagggaagactgcctatatcaaactcgaggataaagtttcaggggagctctttgctcaggcaccagtagaacaatatcctggtattgctgtggagacggtgacagattctagccgctactttgtaatcctggatctcggatggtactgggcgcagtgctttcattggcattggcttcacagatcggggagatgccttcgactttaatgtctccttgcaggatcacttcaagtgggtaaagcaggaatctgagatttccaaggaatctcaagaaatggatgctcgtcctaagttggatctgggcttcaaggaaggacaaaccatcaagttgtgtatcgggctctgttccaaaccaggcaccacagccatccaactgggtccagttctgaatggcattggcaggacattaaggacagacttgaggaataaaaatgaccttgagggcaccaatctgtga

SEQ ID NO: 128266 - DNA, 1017 bp, Homo sapiens
atggcagaaggtgaagggaagcaaggcaccttcatcacaagccagcaggaaggagaagtgcccagcgaaggggttagagcccagtataaaaccaccagatctcactgggaggttccagggggtcctaacagcatctgccgttggtcccgaaacaagcctcggagcacaggtccaacaccagcgaccccagcggagcacaggcccaacagagctggtgatcccgctctcagccttaacaacgtgttaccagaacagcccagtggagggaacggtgttatgctgatggaggcagtggtttgcataagctccttccagacgcccttcccagacttgaagtcatttaatgtagatgccagccctgcgaggtgggactgccatcatgcccgttatacagacaaggaaagtgagaccagaggggactctctcaggcagcagcctgctagagccggtgtggaaggcctgagcccgctgtcctgggacccagacaccatgcacagtgtggcctgtgaggcttgtgggctctggttggcatcagatccacgatttgatctcaggacccttcccacttatgaacggaccaaggggtggggtcaccccactgccccagattccagcaggggccaccccgctcccccagattccagcagcggtcaccccactccccagattccagcaggggtcaccccactcccccagattccagcaggggtcaccccacaccccagattccagcagcggtcaccctactccccagattacagcagcggtcaccccactcccccacatcccagcaggggatcccgtgttgagatggtcatggatggctgccctgtgggcctgtgttcctctggagtgaggcccctcacctcaacccagggcttggagtgtggggccagccacgagcaccagcgctgcctggaaactcggcagaaagcaaactttggccacacgacagacctgccaggccagaaactccaggagccggcacagcctgggcccatcaggccctccgagtga

SEQ ID NO: 128267 - DNA, 841 bp, Homo sapiens
acaagaggagaaactctgggggtttatttaacaaaattaaattcacatttctgagcccatcatagtgcatccaatgtccaccaatctggaaagctgcagaataatgatgttcctctttgttaaataatgtggcaccttccaacaaatacttgtgatcagacaaatccaagtaatagggtacatacgccagatcttcagatttccaatgttgcatatttaagacaacaaaagggggtgccccatggcagaaaattcgttgggaaaattctcttaagccaccacacccatgctcttcacacagttcaatcttggaacagaataactcattcacagccagtcttatcaagtttccatgtggaatttcttggggaggatttatattaattgtgcgctgctgatcctcctgcactcgagttgggcatcgccagttggaacagtaactctcttgaatggtagacatgagatttccaagattttttgtaaaattatcatgctcattcccaaacaaatcaattattaatgaagctttatggacttcagatttgtattgctgtttttccatcttgtcccaaatccaaagtagcttcacagttgtaaaactgtaggtgtccattaagtaaagaaaacagtctacaaactctctaccaaaatgaagagagagttccctagggaagttttcattttcattaagaatgacatataataacatcaagaatccatctatggtgcaggtatttttcagtcttatttcaacatagagtggtgtacaggatactgctttgcggccagctttgatagtaaaaacacccccccaaggaagaacaggcctacaaaatgatcg

SEQ ID NO: 128268 - DNA, 927 bp, Homo sapiens
gccacaagatatattttattccaacataaaatatgctcatataaaaataactcaggaaatataaaaaaattacaaacatttttgcacagatcctctatataaaacatttacctggggttaaacactgaaaatacacttctgaaactagtatgagttgaactattttcttcggataccaagtatacacaaaataaaagcccttcatctgggagagcatgggcaggagggaaaacaacttttagcatcaatctatatttatttctctgttgctcgaatataaaccaatgatgacaagaggagaaactctgggggtttatttaacaaaattaaattcacatttctgagcccatcatagtgcatccaatgtccaccaatctggaaagctgcagaataatgatgttcctctttgttaaataatgtggcaccttccaacaaatacttgtgatcagacaaatccaagtaatagggtacatacgccagatcttcagatttccaatgttgcatatttaagacaacaaaagggggtgccccatggcagaaaattcgttgggaaaattctcttaagccaccacactttatattaattgtgcgctgctgatcctcctgcactcgagttgggcatcgccagttggaacagtaactctcttgaatggtagacatgagattttcaagattttttgtaaaattatcatgctcattcccaaacaaatcaattattaatgaagctttatggacttcagatttgtattgctgtttttccatcttgtcccaaatccaaagtagcggccagtctccgtccaccaggaagcaaactcctcgtacctccctggggaccgaaaactgccggtgccgccgcacccgtcgccgccgccgcctgctcatggagagcccgggctgccgccgccgccgccgccgccgctgcctcat

SEQ ID NO: 128269 - DNA, 960 bp, Homo sapiens
ttatgcagaagacaggtcaggccactgaattctctcacagacaccaatgagaacagaggcatcacctggcagggctagggtctgggacagggccatggcaggccagggccacaaccaggtctgtgctatggccaggtccaacacagtgcccaggtaaggcactgccagctcagggccaggaaaaggccagtgcagagccaggatagggtctgggtctgggtcagggctaggaacaaggcagagcagggccagggccatggcagagtcagggcaggtccttgacaggaccaggttccaggccagggccagggcagcagaaggggcagggcccgcggcaaggcaagtcgtggtgtcacaggctataggtgtctcctcctcctcctggcatggagcagctgggcgggcaaagccagaaaagcccctaatgtaggcaatgacaccctggatagcgcccccaacccaccccacactgcgaaaggtgcagccctggttagcccgtcctaccactctggtcgtgctgcagtctctgtcaccgccaccaccaaccacagtgaggcaagccagtgggttgcaggctctagcacccggcagccaggcacggagcagctctctccaatggtctgctcctaccactctgaccacgctgctgtctccgtggccatcttctttgacctgacgcctttctacactctggctggctgcagcgtccaccgctgccacccacctcagagcctcgcggtgctctcggggtctgtgctgaggataactcagctccgccctcgcaaaggcagacagcgcaggcgccgacagcgacagctcagacagcgctggcgcggcggacaggcgcacagaagacctcaggctcaggttccactccccagcacctgctttgacattgattcccaggtgcatgagttgctcctctgtttttagaccacatttgtttttatccctccgcat

SEQ ID NO: 128270 - DNA, 486 bp, Homo sapiens
atggcagggccagggccacaaccaggtctgtgctatggccaggtccaacacagtgcccagtgccctaacctgtcctcctccatgggcattgcagccccagaaagtgcccataacccaccctccctgccatgggcagtgcagccctgtacagtgctaccaaccagtagccctaatgcaggcaatgacaacctggatagcgcccccaacccaccccacactgtgaaaggtgcagccctggataccccctgtcataccactctggtcatgctgcagtctctgtcactgccaccaccaactacagtgaggcaagccagtgggccgcaggctctagctcccagcagccaggcatggagcagctctcgctgatggccggctcctaccacactgaccatgctgctgtctgtctccgtggcaatcttctttcacccaatgcctttctacactctggctggctgcagtgtccatcgctgccaccccacgcgtccg

SEQ ID NO: 128271 - DNA, 1182 bp, Homo sapiens; identical to SEQ ID NO: 118712

SEQ ID NO: 128272 - DNA, 1998 bp, Homo sapiens
atggaggcgacagcgtgggcagagcaagagcacagccatggaagggaggtcctcccagctagccttcaggaggcccatggccagcctcagggcaggaggaaagaatgtggaccaaaagcggaacgtccagccaggggaggccccagcaatggctgtatcagggctgagtgtgatcacaggaaaagccacccaaggattgaaatcgagtggagtcaagactacgtggaagcctacctctccatgatggcaactttggaagaacgtgtgaccttgcggaagtgcacagaaggcactgctggcctgaatgggtccttgggccctgttccacttaacagttttcaactttatagtgatgcaaaagccatccacagtcagcagaaaccctcgtttgagtcccacacggcaactcggtttttcactttcagtacagtagtcaatgattacatgaggtatccgacacttgactacaaaacaggcttcgtgttgatgcttctgcccaccgcaggctcagggcagtgttctcagcaggccaagcagcggcatgggcctgagactgaccgcactggccacagccctaggcgaggctgctgggagccgggagccgccgcgctccgcggtagcgagtctgcggcgccacctcatggctactgcgtggaactcctcgtggtgcgggccgggaaggccgggtccccacaaagccggagcccgagcacagcgcacgcactcgcgcacactcacacgtgcgtgtgtgcatcctcgggtaccctgacgcgttcacacgcacgcacacgcgtgtgcacaagcaccgtctttcacaagcgtatgacgcgttcacacaagagtgtgacgcgttcacacgcacgcacactccctctccctcgagcctggaaggcgcactgggctcatggtggaaacctctaccgcggcagaggcaccgcgccagggccaggatgtgcgcttttatttcagacgcgaaaaccgaggcccgaaagagacagccggtgtccaaacctgtccaacgactctgctgatcgcgcctcctatccttctaaaagagctcagagcctgacttgtctcactcgttcattttctgctctccaaacttcccaccaagttcatcacttaagcgcccgcatgttccagtccagtatcctggcctgcgttttctgcataactgctgattccagccgcgctccctgcgtcctgagggtatgtgacggatttgccggtcttacccgctcatctgctccctcctccaaggaaaaaccttgcggtttttccctcccagagttcactcccctggctgtctcgtttcctcaggccgctctctgttccctggggacggtcagctgccttcgtcctaggccccagttgacaccttcctgggaatgccccgtccttctagctggtgctgtctgtccagggctgccctgtgctgcaattggctgtccttgggctggggaggagggctgcccaggggctaccagccagcttgaccaggtgtcatggccatcactccaggaggctcctgaggtgctctggccttgcctggattcctggggctggttctgggctccatcaactgtcatccctttgatggcatctccaaggtttggattcatgggaaggagccagcagcctgtattaattaatcacctcataaaggaaccaaaagccaaattttcaaacaaaaatcatagcattagatgctgtcaggggcagaggaaatggagacgtggaaacgctgctggaatgtgctgtcagccccagattccgggaaagggagaggtgaagacagagttccaaccagtctccaacagatctgtcaattatggctgcacaatgcacttccaggaaacactctggacaccaaggcttggcctgggcgatggagactccaacaacaacaacaataacaacaacaacaacagaataacagcaaatcctggcaaggaagcagagaaaccagagcacccacacttgctggtgaaaatgtaa

SEQ ID NO: 128273 - DNA, 1026 bp, Homo sapiens
atgctgcagaggagacggatgcccacagaggcccctgagcagacacaatgctcactaagtggggagactgatcaacctcacaagagtcatacgatttatggggagacagagagaaagaggagacactccaggaagacctgcaggtgggagtaccaggttgaaaccaaggacacattcctggaggagctgctgtttgagccagctctgagaacaggaattcaaagtaagcaaggaggtccactgctccagttgactgcaaataattacaaccttgagcccaagcagcactttgggtcctggtttgggaccatgaagcggctcggtgagactgagagaggtttccacccctatgagcccagtgcgccttccaggctcgagggagagggagtgtgcgtgcgtgtgaacgcgtcacactcttgtgtgaacgcgtcatacgcttgtgaaagactgtgcgtgtgcacacgcgtgtacgtgcatgtgaacgcatcagggtgcccgaggatgcacacatgcacgtgtgagtgtgcgcgaaatgaggacaagaagggggagatgggccacagggatgagggtgcctgctccctgcagcagtgtgcacaccacggctgtgcagaggcagcaggtggcagatcagttgcaaacaacagcagagctttcaatggaaatttaaacagtgggatcaagatcctgaagcatttgttcgaaaagttgcaacaagttatgaaacatggatttcgtagtactatcctgaagacaaagcacaatcaaagcaatggctaccaagaagtggaagtggtgcaaccctgtacagtgctaccaaccagtacccctaatgcaggcaatgacaccctggatagcgccctcaacccaccccacactgcgaaaggtgcagccctggatagcccctgtcctaccactctggtcgtcctgcagtctctgtcaccaccaccaccaaccacagtgaggcaagccagtgggccacaggctctaggacccagcagccaggcatggagcagctctcgctga

SEQ ID NO: 128274 - DNA, 367 bp, Homo sapiens
acctggacatgactgcccacagcattccttctggcggcagacagagtttgtcagttcgccaacatcctgctttcatgagaacagtttgctgtttctcacagagcctccagtggtatactgagttggtcacgaccctcattccttcggcctccaacatctccccttttgtttttgcattaattgaataaaggtaatttcaggctgtgcagctttcaattgccggttggtggttcacccgatcctatagacttatattctccgccggcagactctcccgtccaggggttcgtagttcgtctgatcagtttcactttctctgctctggcagaccttcctcgttcaggtcctggtcgggcaccacttgtca

SEQ ID NO: 128275 - DNA, 2212 bp, Homo sapiens
aatacatggggtctctatttctgctactggaggggacagtacaggccagttctcatcctccctctcctgtttatcattttcaatgggcgctgctggtgagacaaaagattctttcaatttttgagattcagaacatagcacctgctgtctggcagaataagaagaggacaatggcaggaggacagtacagaccaaaccccaagcagagaaaatagaaggatccactttaagaactttctgatgagctcgtttcaatctttctcctactcagtctcaattttccacagcaagagtacctgtctgcagaaaccatgggttatgtgtaataacctcctgcagaagcttaatgtttgagaactaacccgagcaccagattgtttaagtaaaactttaagcagctgcacataatgttgctcctcaacagacagattctgccccatgttaccctgattcagaaacctcccgctcccgataccttctcagggaactgaccttatattctccgccggcagactctcccgtccaggggttcgtagttcgtctgatcagtttcactttctctgctctggcagaccttcctcgttcaggtccctggtcgggcaccacttgtcacggttgcttctggaccaaacgaaggagaacgaaggcagaaatgaagacaaagacaaaaggatctgtttgaaagaaggggagatggacaaacccgtgtgggtgccctccaggtgtgtgtgaccatggaacgggagaccggagggatccatggtattcaaccgtgggcctgttacctccaagtacgagccatgaagccagcggaaatctgaatgcaaacgacacgaacaagggcccgaccggagttcacaatgacatccaaccccataaacatggggacagatcaaagaaaacgacacaaagaagcttgagaaactacttgaagcgccagggtccaggcaaaaaacccttgacttccatgtttctttggccatgctaactgttagtgtcctgtgcgatccttttgtctgtctcatttctgcattcgtcgtccttcgttcggtccagaagcaaccgcgacagtcctgcatgtgttgatgccacctatcgggggtgctcctgccaaggagagggtgtatgtggggaggcctgcagctgtttcccagaccttaatcagccacaaggagtccacgctggggagggtgtactgccatgtagtgggtgggaagatacctttggcaagaacacgtgccttgtgagctatcagcagattcccaacaaaaggagaccctgtacgtgcgaagagtgtggcaaggcctttggacagagaagtcaccttgttcagcacaccagtgagaagctgtatgcatgccaggaatgtgggtgtaccttcagcaacaattcatctctagtcaagcactggcacgtccacacaggcgagaagccctacatgtgtggccactgtggcaagtgcttccgagagagctcatcccttgccaagcaccagcgtgtgcacacaggtgagaagccatacgtgtgtgcgagagcacacaccttgtacagcactggtgattccacaccggggaaaagccatttgcctgccaagagcagcaaagcctttgctgacttctcggccctccttgcatgccacggaacctacacgggtgagaggccctacgagtgccgggtatgctgcaaggcattcagccccagcttgtccctggctgagcacatacgctgccacacgggagagaagctgtatgcgtgtcaggaatgtgggaaagctttcagccacagctcatccctcagcaagcaccagcaggtacacacagaatgtggaaaggccttcagccaggggtcctacctgacccagcacctcaagatccacagcggtgagaagccgtacatacgtggcgagcatccttatgcatgtggaaaatgtgggaagactttcagccacagcaagtttctcacccagcatgagcaagtccgcatgggagagaagcccttcatgtgtggtgactgtggaagagccttcatgcaaacctcatccctcgccctccatcagaggactcacaatggggagaagccctacaagtggaatgagtgtggcaagtcctgcatccagatgtcacacctcaccgagtattaccagaatctccctgaaaaggggtctaaggatccccacactgatgccactgtccattcacccgttatggactga

SEQ ID NO: 128276 - DNA, 483 bp, Homo sapiens
cctccattcaggaagcagcaagctcagcacagaaataaaactgtcctggtgagtcgctcacagcctgtcccagtaactgttccggagcgtcagcctgacgcagcacccctgaaggaccacgccgtgcgggctgcgatcctcgcccttaaccatgcccagcaggaccagagctgccagcacaaatgaaggtcctggccattgaacaacttctgagcctgcactttaagaaggcgctcttgttttgaatacgtagtctgtcctgttctttcaaagtagatcctggtcaagaatgtctccaaaactggattaagccagtgtacttgaatgggaatatagacaaccaggacagacttggaatgttttttaatgtattggcccagcaaagctagaaatcctccactttacctaacagaagataattagaattaaaaatggcactaactgaaaacgtacttgttaaattgcctgtgcttatagaaaaaa

SEQ ID NO: 128277 - DNA, 999 bp, Homo sapiens
tcatggttttacttttggtgacagcccaggtttacagtcatcacagctcacatttactgggcaccatgaatcatggtttgtgccgaatgagctccccatgagctcctctcctgagaggtaggtatgatcattgtccccatttgatgtacgagggaactgggtcatggagggttgagtggctgctctgaagtctcccagtgggtaactgaggagcattgattcccactgaggtctgcctgtctgagctggagtccatccactgggccctgtgctgctcgggtaatactcagccaatcctgatgtgaggcttttctcacatccttcatctagacacatcctgggtctagaacgtatcaggagacagaggtgtagaaccacagccagcttccctaaacttccactaatctccggcttgcttttggttataatgttgtgcagatataaattgacaaagtcatgagaagcctctcttctaactctgcagtttgtcatctctccctcctcctcctcctcctcctccttttcctcctcctcctcctcctcctcctcctccttttcctcctccttctcctgtccctcttcccccatctccccgttctcctcctgtttcccctccccctcctcatagttttcagggtcggagtcctccatcagaactcgggtcatctgcggagccttggctgcggcccggtacctgggtgtgactccgccactaacattttcccagcaggaagcagcaagctcagcacagaaataaaactgtcctggtgagtcgctcacagcctgtcccagtaactgttccggagcgtcagcctgacgcagcacccaatcattcgttacttctcccagggcagcaatgcttctggtgtcagggaccccaccccccttactggatgggccctgtggatgcttcctcctctggctttctctcccagtcattttattgaggtttgcctctccttgagggttgttggtagtgatgatgacggtgatgaccat

SEQ ID NO: 128278 - DNA, 1437 bp, Homo sapiens
ccatcaccacgccagggtaatttttgtatttttagtagggaaggtgtttcaccatgttggccagtctggtctcgaactcctgacctcgtgatccacccgcctcagcctcccaaagtgctgggattacatgtgtgagccaccacgcccggccccaaacgggtagatttcttttgtttttgttttttttttttgagacagagtcttgctctgttgcccaggctggagtgcagtggcacaatcttggctcactgcaagctccgcctccggggttcatgccattctcctgcctcagcctaccgagtagctgggactacaggcacctgccaccatgcccggctaatttttttgtatttttagtagagatggggtttcactgtgttagccaggatggtctcgatctcctgacctcatgatccgcccacctcggcctcccaaagtgctgggattacaggtctgattggggccctggtcctgtctgtgggcatctatgcagaggttgagcggcagaaatataaaacccttgaaagtgccttcctggctccagccatcatcctcatcctcctgggcgtcgtcatgttcatggtctccttcattggtgtgctggcgtccctccgtgacaacctgtaccttctccaagcattcatgtacatccttgggatctgcctcatcatggagctcattggtggcgtggtggccttgaccttccggaaccagcagttgctcttaaggcagcaggtgctgtcccacaccctgggttgtgcagacctctcagatggcccaggatctggccctgtgaaaatgttcatgggagtgcctgtgattccagcccagccaccagagctcctggccagcctgcggctttccaggggctacgggttagtgctttcctggctggagcccaggtatgagaagatgatcagtggtatgtacctgggtgaaatcgtccgcaacatcttaatcgacttcaccaagaagggattcctcttccgagggcagatctctgagacgctgaagacccggggcatctttgagaccaagtttctctctcagatcgagagtgaccgattagcactgctccaggtccgggctatcctccagcagctaggtctgaatagcacctgcgatgacagtatcctcgtcaagacagtgtgcggggtggtgtccaggagggccgcacagctgtgtggcgcaggcatggctgcggttgtggataagatccgcgagaacagaggactggaccgtctgaatgtgactgtgggagtggacgggacactctacaagcttcatccacacttctccagaatcatgcaccagacggtgaaggaactgtcaccaaaatgtaacgtgtccttcctcctgtctgaggatggcagcggcaagggggccgccctcatcacggccgtgggcgtgcggttacgcacagaggcaagcagctaa

SEQ ID NO: 128279 - DNA, 2866 bp, Homo sapiens
ggttttaccatgttggccagtctggtctcgaactcctgacctcgtgatccacctgcctcagcctccctaagtgctgggattacaggtgtgagccactatgcccggctgccccatcctttttcttgatattatagttagtggtgaaaacatgtaaatgataatactccatgcagtatgtatgctgaagtgactaccctgaagacattttttaagtcctattttcttttctttctaggatatgataatcattttctgtttgtattaatacatgcttgaaagggaattagtaaagcgattccatccttgtcagcagcttgggaacaaagctgtgggatctgggggttgtgtaggaactcattttgacatcagtagttacttgtgtcttttatgcctcaggtcaaggtgtgcgtgtttttttctttctccttttagcttcacgagggctggacattgtggtcctaggctcaccttcctcttgcattgacccatgaagcacatccttggagccccagagtcatctcagaacagtatgaaaatcaccactagatgcagaaactgttgtaggattggtcctgctatttgatggcattttgccaagttatccaggaatactcaagaccacaccaggcccactttgggggcagcccaagcagtgcccgcaacagggcagccagcagccccgggtccagcaggagccggcccagagtgggttccttttctagctgtttacaaggagcaattggttagaaatgacagtgtactgaaagtcttttttttccctccaattttttacagggaaggttgggtgtgttgctctgtagtcgaatcacacttgcaggagggttttgtgtggctgttttcactccagttgtgaccacctaagctgagaagccttttctctctttcgtattgtctttcccctcagtgacattgagatttcaagaggacaaactccaaaagctgtggatgtccttgccaaggagattggattgcttgcagatgaaattgaaatctatggcaaaattctggtgtcttcggctggttttgcataggttgtctgggaaatattataaaattcactttctccccccgaactcaggatcacacccacccctcttggagaagggaagagcacagtcaccatcgggcttgtgcaggctgtgtcccttggcctgtgtccatcgtggcagctgtacttggtgacccctgcactccagcctgggcaacaaagcgagaccctatttctgaaaataaataaatagaaagatatcttatttctctagttcaaccttcacttgactggagacatccacgttgtcatatcctgtgaattgtccaagttcatggacaactaacttttgtgtggtctcatttttgttttgtgtttttttagagggataattttggtgaccctttgctttctgtttcttctcaaacttctcaccttttttcttcttaatcattagaaactgggaataaataagactgatcccatcagaacaatgccagacacacaccaggtggctggtccatatttgtcgactgaatgactaatctgttctctttcagtgaagtccagctccttgtgggaatggccatcccactggcactgtcgctgaccactacctgtgtttgggctggttcaggcgcagtttgacatcgcagtggccagcgagatcatggcggtgctggccctgacggacagcctcgggagagaagtgccaaggggttaaccattgcctggatgatattttgtcaggaatctaatgtttttctctcatttgccccaaattgatcttggtttccatgcttctgtttgtcttttgggattttgatttgctttttcacttctctaggggacacctgtgttcgtgcatgcgggcccttttgctgctgacagagatctctgcccataccagttcttactttgtcaaacacatatttataaaatacatgttatcatggcagaatactttcaaagatataaactgatgatgtatgcaaagcaaacgagccctctgtgtgaccttgaacaagccattagcctctctgggtgtgtcccctgtagacattctcatctgaaaaatgagaagttttcctgtacaggttgctagcagtatttacccaaattgtcccttcccaactcagacccactgacccttcctttctcagctgattacgggtttaagtttgaatcaaaccatgcgaatcatagtggtgattgccaaaacctacctttgtttttagaagataatagcacatattccacttgcttccccacagtgaccgaagctggctttggtgctgacatcggaatggagaaattcttcaacatcaagtgccgagatgttgttctttctttcagatcggttgtgtaagcatttttattgctggcagtttagcttggcaggtttggtgggagacaatacacaggggtctgggttttgcttttttcttttttacagaacatccagctggtggcagacggcgtataaatggtgagtctttctttgaaaacatagctaaatggatacagatgcaaaaccacaaacattttcttcactaggaccgacacccgcgctgagattgacttggtgtgtgagcttgcaaagcgggctggtgcctttgatgcagtcccctgctatcactggtccgttggtggaaaaggatcggtggacttggctcgggctgtgagagaggctgcgagtaaaagaagccgattccagttcctgtatgatgttcaggttccaattgtggacaagataaggaccattgctcaggctgtctatggagccaaagatattgaactctctcctgaggcacaagccaaaatagatcgttacactcaacagggttttggaaattt

SEQ ID NO: 128280 - DNA, 1460 bp, Homo sapiens; identical to SEQ ID NO: 121826

SEQ ID NO: 128281 - DNA, 2286 bp, Homo sapiens; identical to SEQ ID NO: 117722

SEQ ID NO: 128282 - DNA, 531 bp, Homo sapiens
tcagtaagttgatcttaatctctgatatcctttcttccactgatcaattcggctatcgatgtgtgaaagaactcctgcagctagctcggtgtctgcctgaacagctgcccagtttgtttttgaaacccagagccctgggggtgtaggcacatgagggaatctctggtctgtggatttacggccgggtactcctctgagacaaaacttccgaggaacaatcagacagcagcattcgcggttcacgaaaaaccactgttcgcagacaccgctgctgatacccaggcaaacagggtctggagtggacctcagcaaactccaacagacctgcagctgagggtcctgtctggtgtgcaccattgacttggcaaatgcctttttctccattcctgtccacaaggcccacagaagcaatttgccttcagctggcaagtatacctttactgtcctaccaaggctgacctggctacagccgtgctgagtgcccaatttgccagcagcagagaccaacactgagccctcaaatggcaccat

SEQ ID NO: 128283 - DNA, 942 bp, Homo sapiens; identical to SEQ ID NO: 121675
  misc_feature (1)...(942): n = a,t,c or g

SEQ ID NO: 128284 - DNA, 1143 bp, Homo sapiens
atggagaacactgatactgcttggcatgaactgtttagagagttatgcaaaataaatgcatttgacactcctgatttatcgctcatgagaggcaaggaatttagtgactctgtacataatacctttgaccatatgtggagaagcaaggaacataatgaagttggttgtttgctcctaagttcagtggacaaagtgatggaagaaaatgatgaactcagggattttaactcccatcttcagaaacagatactgaccctcaaatctgctaatatcaccttgagtgagagtcttatctcctgtagagaaagagctgaaattgtggaaaaacacacacaagctcttatcatatccaacagtgggagctgcagtcactcaactacaaaatttaactgcaatgggagtaattggatcccatggtgccaggggccaagtagtggcactcaaccgtcaaaggcaaggagacctccaaccttttaccagggtaactgtgcactggggaaaagggaaatgcagatatttgggggactactggacactggctctgagctgacattgattccaggggacccaaaacatcattgtggtcctccagttaaagtaggggcttatggaggtcaggtaattaatggagttttagctcaggtccaaattacagtgggtccccagactcatcctgtggttatttccccagtgccagaatgcataattggcatagacatacttagcagctggcagaacccccacattggctccctgactggtattatggtgggaaaggccaaatggaaacaattagagctgcctctacctagaaaaatagtaaatcaaaaaccatattgtatccctggagggactgtggagattagtgccaccatcaaggacttgaaagatgcaggggtggtgattttcaccacatccctgttcaactctcccatttggcctgtgcagaagacagatggatcttggagaatgacagtgggttatcgtaggcttaaccaagtggtgactccaattgcagctgctgtaccagatgtggtttcattgcttgagcaaattaacacatctcctggtacctggtatgcagccattgacatggcaaatgcctttttctccattcctgtccataaggcccaccggaagtaa

SEQ ID NO: 128285 - DNA, 1914 bp, Homo sapiens
atggacggttctagctgtgtcttcattgactgtctgtggctgatacaagctgcagagccctccaagatggaagaaactgctcatgggaaactgccttccaaatcctcagtgctagttccttattgggagtggagttggcggtcccctgctgctgttgctgtctcctggcctcaccaggtgtctactgttagaatgagggcattgattggaaaagaatgggaccctgcaacttggaatggggacatgtgggaggaccctgatgaagctggggacactgagttaataaactctgatgaacatttttggccagaagtaacagcttccccatccccagtagtggcaacgtcctctcccccacccatgctgctatcagcctttccacctttgtctgaagagataaaccctgcgctgcctgaggcagttgccaggcaaaataatgttgattctcctcagaagccacccccaacacctctgtttgcttctaggcctataactagactaaaggcttggtgggcccctagagtgtcagaatgcataattggtatagacatatttagcagctggcagaacccctgcattggctccctgactggtagggtgagggctactgttgtgggaaaggccaaatggaagccattggagctgccatcacctagaaaaattgcaaatcaaaaagaataccacatccctggagggattgtggagattactgccaccatcaaggacttaaaagatgcaggggtggcgattcccaccacatcctcattcagctctcccatttggcctgtgcagaagacagatggagcttggagaatgacagtggattattgtaagcttaaccaagtggtgactccaattacagctgctgtaccagatgtggtttcattgcttgaaactcacatcaataatgcagaagctagcagacaacagatcagtgctttcaaagttcaggtggagatgtctttgaaccttaaatcttatacttggctaaaagatcaattgactgtgagagaaaataaagacatctttggagatttaaagactgaaaaagttttttacacagaagaaagctgttggaaaagaaaatctattagagcagggagaatggcaaggagaagagccccgggatcgggccacagtggtgtgcctggagggcggtggagggaccccacagggtttcattttagttctggagaatggcaaacttctggagggacaacgctgcagaaaaaaatgaaaaggaggctccacaggagaaacagggtgattgaatggctggagacacctgaaaacgtggtcactcctgtgttagcacatgatttaatcctcacagcagccatatttcgtacatatcatgtcaaatttagagacgcacatgctgaaatgcacatgctgacacccagagacctgggatgtcatagccagccaagaccagtgggagaatggaccccaggcatcatctaccagttggacttactcagcctgcagctctcaacccctcatgggaggaggagcacacaggtgagtgggtgcaggggctgggatgagtgcttctgggcgctagcaggagctgaactctgtgtggccttggggcagcaggaagaatcaggtgacatgaacgtattgaagatggtaaatgtgggggattttattgccaataaaagtggctgtcagtgggatgaagagctggaaaggggatggagtgggaaggtccttttatatgtcagtggatgtggggcatctttgattaatggggtggtgtttccctgcatttgcaggcacacctgcaccttctatccactgcagtgctctttcccaagacagctgatggctcaactctacatctgggtctgtgctctgacatcagcttttccaagtccttctctgatctccacatctaggaaagcagcttga

SEQ ID NO: 128286 - DNA, 202 bp, Homo sapiens
gggacccaaaatatcaatgtgatcctccagttaaagtaggtgctaatggaggtcagataattaatgaagttttagctcaggtccaacttacagtgggtccaaagacaaatggatattggagaatgacagtggattatcataagcttaaccaagatgtgactccaattgtagctgctgtaccagatgtggtttcattgcttga

SEQ ID NO: 128287 - DNA, 367 bp, Homo sapiens
ctggtatgcagccattgatttggcaagtgcctttgtctccattcctgtccataaggcccacgagaagcaatttgccttcagctggcaaggccagcaatataccttcactgtcctgcctcaggggtatatcaactctctggctttgtgtcattatttggttggcagagatcttgatcgtttttcccttccacaagatatcatactggtccattacattgatgacattatgcaagctgacctggctacagctactgctgagtgcccaatttgccagcagcagagaccaatactgagccctcgatatggcagcattcctcagggtgatcagccagctacctggaggcaggttgactatattgaacctctt

SEQ ID NO: 128288 - DNA, 553 bp, Homo sapiens; identical to SEQ ID NO: 120785

SEQ ID NO: 128289 - DNA, 728 bp, Homo sapiens; identical to SEQ ID NO: 121822

SEQ ID NO: 128290 - DNA, 635 bp, Homo sapiens; identical to SEQ ID NO: 119166

SEQ ID NO: 128291 - DNA, 266 bp, Homo sapiens; identical to SEQ ID NO: 117721

SEQ ID NO: 128292 - DNA, 1248 bp, Homo sapiens
aagacagatggatcttggggaatgacagtggattatcataagcttaaccaagtggtgactccaattgcagctgctgtaccagaagtgattttattgcttgagcaaattaacacatctcctggtacctggtatgcagccattgacttggcaaatgcctttttctccatttctctccataaggcacaccagaagcaatttgtcttcagctggcaaggccagcaatatacctttactgtcctacctcagggctatctcaactctccagctttttgtcacaatcttattcagaaataccttgatcatttttcgcctccacaagatatcacactggtccattacattgatgacattatgctgattggatccagtgagcagtcttgcaaacacaccggacttattgccataaagtgggtcatggcacagcagcagcattgtatcatcagatggaagtgctgtatatgtgatcgggctcaggcaggtcctgaaggcacaagtaagttacgtgaggaagtggctcaaatgcccatggtctccactcctgtcaccctgtcttctcaaccccagcctgcactaatgatagcctcatggagagttccctatgattggttgatagaggaagagaagactagggcctggtttacagattgttctgcacgatatgcaggcagcaccagaaagtggacagctgcagcactacagtccctttctaggacatccctgaaggacagcagtgaaggcaaatcttcccaatgggcagaacttcgagaagtgcaccgtgttgtgcactttgcatggaagaagaaatggccagatgtgcgattatatactgattcatgggccgtagccaatgatttggctggatggtcagggacctggaagaagcttgattggaaaactggtgacaaagaaatttggcgaagaggtatgtggattgacctctctgagtggtcaaaaactatgaagatatttgtatcacgtgtgagtgctcagcaatgggtgaccttagcagaggaggagtttaataatcaagtgtatagaatgacctgttctgtggacaccactcagcctctttcaccagccacccttgtcatcacccaatgggtccatgaacaaagtgaccatgttggcagggatggaggttactcatgggctcagcaacatggacttccactcaccaaggctgacctggctacagctactgctgagtgcccaatttgccagcagcagagaccaacacagagcctttga

SEQ ID NO: 128293 - DNA, 837 bp, Homo sapiens; identical to SEQ ID NO: 121824

SEQ ID NO: 128294 - DNA, 533 bp, Homo sapiens
atgtatacactaaagtccctgcaagcccttagaggtgaggttgagagtgtgacccatgaggaggtgcacacactaaaaaaaaactgttttgagttctctaatttatatgaacagccaatctggagaacaggtgctgtaccagatgtggtttcattgcttgagcaaattaacacatctcctgctacctggtatgcagccattgacttgggaaatgcctttttctcgattcctgtccataatacccaccagaagcaatttgccttcagctggcaaggccagcaatatatctttactatcctacttcaggtgtatatcaactctccagctttgtgtcataatcttattgggagagattttgattgctttttgcttctgcaagctatcacactggtacattacattgatgacattatgctgaatggatccaacacactggactcatgggtgagaaatttgcatgccagaggatggaaaataaatccaacaaaaattcagggagcttctacctcagtaaaatttctagggatccagtg

SEQ ID NO: 128295 - DNA, 1632 bp, Homo sapiens
atgacagtggattatcataagcttaaccaagtggtgactccaattgcagctgctgtaccagatgtggtttcattcattgagcaaattaacacatctcctggtatctggtatgcagccattgacttggcaaatgtctttttctccattcctgtccataaggcccaccagaagcaatctgtcttctgctggcaaggccaggaatatacctttactgtcctacctcaggtgcatatcaactgtccagctttgtgtcataatcctattctgagagattttgatcacttttcccttccacaagatatcacactggtccattacattgatgacattatgctgattggttccagtgtagaatatgttgctgcatttggtccctcctacaaccaagaaagagacacaacacctagaggtcctatttggattttggaggcaacacattcctcatttggccaccccgtcatcacccaatggacccatgaacaaagtgaccatgatggcaggaatgtaggttatgcatgggatcagaaacatggacttccactcaccaaggctaacctggttatggccattggtgaatgctcagtttaccagcagcagagactaacactgagccctcaatatggcaccattcctcaggccaggattcacaagtccaggaatcaaagggtggaaatggaagtggcaccactcaccatcacccctagtgatccactagtaaaatttttgcttcctgttcccatgacattacattctgctggcctagaggtcttagttctagagggagaaatgctgccactaggagacacaacaacaatttcattaaacctgaagttaagattgctttctggacactttgggatcctcctacctttaagtcaacaggctaagaaaggagttaaagtgttggctggtgggattgacatgaactaccaagataaaatcagtctactactccacaagggagtgtctccatcattccccatgggcagccacctcaccaattatttggcgtggctaaggcaagaacctttggcattacatgatgagaaacaaattcactgtgcactttctaaaaatgtctgtccagtgaaacaggacgcacttatccacaagtttgtctcttccagaatcgaagatgtaaaactacaaatcgttcttcaaatggagtcccagatgcaatccatgactaagatctaccacggacccttggactggcctactagcccatgctctgatgttaatgacatcaaagtcacccctcctgaggaaatctcaactgcaccaccccactacgccccaattcagcacgaagcagttaaagcggtcatcggccaacctccccagcagcatttgggttttcctgttgagagcagggtgtccgctgtgctcctgatccagcgagcttctaatagagctataacactcaccacatggcccaagattccattccttggaatccgtaaggcccagaaccccatgtcagagaatacgaggcttgccaccatcttggaagcggcccgccaccatcttggaagaggctcgccaccatcttggaagctctgtgagcaaggacccccagtaacactaggactcattgtgaactggtcctccaatcttcagaaagctgcctag

SEQ ID NO: 128296 - DNA, 336 bp, Homo sapiens
aaggcagatggatcttggagaatgacagtggattattgtaagcttaaccaagtggtgactgcaattgcagctgctataccagatgtggtttcattgcttgagcaaattaatacatctcctgatacctggtatgcagccattgacttggcaaatgcccttttctccattcctgtccataaggggtatatcaactctctggctttgtgtcataatgttatttggagagaacttgattgcttttcacttccacgagataccacactggtccattacattgatgacattatgctgattggatccagtgtgcaagaagtagaaaacaaactggacttactg

SEQ ID NO: 128297 - DNA, 1886 bp, Homo sapiens
gagacttccagccttttaccagggtaactgtgcattggggaaaaggaaatgatcagacatttaggggactactggacactggctctgagctgacattgattccaggggatccaaaacatcattatggtcctccagttaaagtagggggcttatggagctcagctgctgtagcagatgtggtttcattgcttgagcaaattaacacatctcctggtacctggtatgcagccattgacttggcaaatgcctttttctctattcctgtccataaagcccaccagaagcaatttgccttcagcaggcaaggccagcaatatgcctttactgtcctacctcaggggtatatcaactctctagctttatgtcataatcttatttggagagacctggatggcttttcacttttgcaagatatcacacttgtccattacattgatgacattttgctgattggattcagtgagcaggaagtagcaaacacactggacttactgtccacttatcaagtgactcaaaagactgccagttttgagtggggtccagaacaggagaaggctctgcaacaggtccaggctgccgtgcaagctggtctgccacttgggccacataaactagcagatccaatggtacttgaggtgtcagtggcagacaggaatgctgactggagcctttgtggtttggctggatggtcagggacttggaagaagcatgattggaaaattggtgacaaagaaatttggggaagaggtatgtggatggacctctctgagtggtccaaaactgtgaaggtacttgtatcccatgtgagtgcttgccagtgggtaacctcagcagaggaggattttaataatcaagtggataggatgacctgttctgtggacaccactcagcctctttccccagtctcccttgtcattgcccaatgtacccatgaacaaagtggccgtagtggcaaggatggtggttacacatggtctcagcaacatggaattccactcaccaaggctgatctgggtatggccacggctgagtgcccaatttgccagcagcaaagaccaacactgagccctcgatatggcaccattccttgggctaggattcacgggtccaggaatcaaggggtggaagtggaagtggcaccactcaccatcacttctcgtgatccacaagaaaaatttttgcttcctgttcctgcgacattacgttctgctgtcctaggggtcttagttgcagagggaggaacactgccaccaggagacacaacaacaatccctttaaactggaagttaagattgccacctggacacttttggctccttctacctttaaatcagcaggctgagaagggagttacaatgttggctggggtgactgactcggactatcaagatgaaatccatctactactccacaacggagataccaaactggaacccagagaagctggacaggaatgggcattcctcgagaaaagacctcccttcttgcttgaccacgggcaagtgatcaagcctagtctcctcactggtggcaaagccttccagccagttcaatggtgggagtctccccctgctcttcctgcacaatcatttcccattgaggaagaatgtgaaaatgacgcacaggtgagggaggcatactataagaccgcttcttacctttcgtttcctggagccaatatgaatgaagacccagagagaggagaagggaaagagaagctgccaaaaacagacaatgggagaaaagaaactacgggcaataacagcccacctactgttagccctcggttcctcaaccatacgttgaggaattccgtgtaccctgcacacacctttgtgattaattcagatgaaaataaactctccttgaattatgctaatgtgtga

SEQ ID NO: 128298 - DNA, 1449 bp, Homo sapiens; identical to SEQ ID NO: 119025
  misc_feature (1)...(1449): n = a,t,c or g

SEQ ID NO: 128299 - DNA, 1563 bp, Homo sapiens
atgattatctcaatagatgcagaaaaggccttcgataaaattcaacagcctttcatgctaaaaacactcagtaaactagaagaaacagcatccccatccccagtagtggcaacatacactccgcaacctatgctaccatcagcctttccacctttgtctgaggagataaatcctgtgctgcctgagacaacagtgatggcctcccctgaggcagttaccaggcaagataatgttgattctcctcagaagccaccccctacacccatgtttgcttctagacctataactagactaaagccccggagagcccctagtgaggaagggatccaaaggcttaaaaagattgggatggtggagtggattagtcactttagacctactcctctcagcatggaaggtccagaacatatactcttgaccaacaccttgttaaatagatatgtgaaggcagcacctgcatctttgaagagccctttaactgctcttctctttatgtcagatctaactgtgggaaccacattctctcaactacaaaatttaaatacaatgggaatatttgggtcctcatgtgacaggagccaagtggcagcactcaaccatcaaaggcaagtgccagaatgcaaaattgtcatagatatacttaacatctggcggattccccacattggctcactgactggtagggtgagggaaattatggtgggaaaggccaaatggaagccattagagcagcctccacctagaaaaatagtaattcaaaaacaatatcacatccctggagctattacagagattagtgccaccattgaggacttgaaagaaacaggggtggtgattctcaccacatccccattcaaatcaagcatttggcctttgcagaagacagatggatcttggagaatgacagtgaattatcataagcttaaccaagtggagactccaattgcagctgctgtaccagatgtggtttcattgcttgagcaaattaacacatctcctggtacctggtatgcggccattgacttggtaaatgtctttttctccattcctgtctataaagctcaccagaagcaatttgccttcagctggcaaggccagcaatatacttttactttcctacctcaggggtatatcaactctccggatatcacactggttcactacattgacgacattatgcttattggatccagtgagcaagaagtagcaaacacactggatttactgcctgccagagtggcctcatggggagttccctatgatcagttgacagaggaagagaagactagggcctgcttcacagatggtcctgcaggatatgcaggcaccacccccagggctcatggatccaggaatcatagggtggaagtggaagtggtaccactcaccataacacctactgatccactagcaaaatttttgcttcctgttcccgtgacattaggttctgctggtctaaaggtcttagttccagagaaaagaacgctgacaccaggagacacaaaaacaattccattaaacaggaagttaagatttccactagaacactttgggctcctctaa

SEQ ID NO: 128300 - DNA, 1899 bp, Homo sapiens
atgagaaaatgtggaaagccacaatttaaactagggcaaaccaacaaggctaactctagaatccaggaggaactgattcatagtaaaagtctaatagagcaggaaggagaaaaacctgttcagttttcagctttccatcggatgtggcagcctgctgattcccagtgtgatattatagacagcgctgatatatgggccgacccgcttgtgagacaccgagaaataataacgggtagtggaggaataaatagaagaagaacaagaggaggacgaggaaggggaggagaagcagcaggaggagcagaaaattgtggcagtagagaagaaagagaaagagcaggagtgggaaccgcagtcactcaactacaaaatttaaatacaattggaataattggatcccgaggtggcaggggccaagtggcagcaatcaaccatcaaaggcaaggtggtcatagctactgtaaaggacagcagaagcaaaacagcaatcagaatagtgtgactcatgtagagctctggcattggctaattaatcacagtgttcctagaagtgaaattgataggaagcctactacattcctacttaatttatataagcagaaaacttccagagacctctggccttttaccagggtaactcttcacaggggaaagagaaatgatcagacatttcagggactactggacactggctctgagctgatgttgattccagaggacacaaaacatcactgtggtcctccagttaaagtagaggcttatggaggtcaggtaattaatggagttttagctcagatccaacttacagtgggtccagtgggttcagggactcatcctgtggtcatttacccagtgccagaatgcataattggcataggcatacttagcagctggcagaatccccacattggctccctgactagtaggaagacagatggttcttggagaatgacagtgcattatcataagcttaaccaaatggtgactccaattgcagctgctataccagatgtggtttcattgcttgagcaagttaacacatctcctggtagctggtatgcagccattgacttggcaaatgcctttttcttcattcctgtccataaggcccaccagaagcaattcgccttcagctggcaaggccagcaatatacctttactgtcctacctcagggagagaccttggttaatttttcccttcctcaagatatcacactgttccattacattgatgacattatgcagattggatccagtgaccaagaagtagcaaacacactggacttattgccaagaaagagcacaacgcctagtgggcctatggattttggaggcaacacatttctcactgggtttgttactcacacctatttactgagtgacccaaaaggctgccagtttgagtgtggtctagaacaggagaaggctctgcaacaggtccaggctactgtgcaagcttctctgccacttggggtatatgacccagcagatccaatggtgattgagatgtgctttctgacccatctagccataaagtgggttgtgcgcagcagcattccatcatcaaatggaaaaggtatgtatgtgatcaggcttgagcaagtcctgaaggcacaagttgattatactgtacctcattcatcatggaaaaggaagaagtttgtcctcactggaacagacacttactctggatatgggtttgcctatcctgcatgcaatgcttctgtggattcatctgtggattcatggactgccttatccatcgtcatggtattccacacagcaatgcctctgaccaaggccctcactttatggctaaagaagtgtggcagtaggctcatgcttatagaattcactgatcttaccatgttctccatcatcctgaagcagctggaatga

SEQ ID NO: 128301 - DNA, 1243 bp, Homo sapiens
actcatcccagctgagagggtccagaagatacacccttgaccaatcctttgtgaaacagatttgtgagggcagcacctgcatctttgaagagatctgcagggattggtcttctctgtatgccagatctaacagtgggaattgtagtcactcaactaaaaaatttaaatgcaatgggaatcactggctctgagctgacattgattccaggggacccaaaatgacattttggtcctccagttaaagtaggggcttttggaggtgagatagttaataaatatttagctcagcttggacttacagatgatccagtgggtccccggactcatcctgtggccattttcccagtgccagaatgtataattggcatagacatacttagcagcttgcagaacccccacattggctccctgactgggagggtgagggctattatgaagggaaaggctattatgaagggctattatgaagggaagggaaaggccaagtggaagatattagagctgcctctacctagaaaaataataaatcaaaaacaatatcgcatccctggagggattgtggagatgagtgccaccatcgaggaactgaaatacgcaggggtggtgattccgattcccaccacattcccattaaactctcccatttggcctgtgcggaagacagatggatgttggagaatgacagtggattattgtgagcttaaccaagtggtgactccaactgcagctacagtaccagatgtggtttcattgcttgagcaaattaacacatctcctggtacctggtatgcagacattgacttggcaaatgccgttttctccattcctgtccataaggcccaccagaagcaatttgccttcagctggcaaggccagcaatatacctttactgtcctacctcaggggtaggacagtaaactctccggctttaggtcataatcttattgggagagaccttgatcgcttttcgtttccacgagatatcacactgctggtccattatgttgatgacattatgctgattggatccagtgagcaagaagtagcaaatgcactggacttattggtgttttctgaccatctagccataaagtgggtcatgcacagcagcattgcatcatcaagtggaagtggtatatgcgtgatcaggctcaagaaggtcctgaaggcacaacctgcaccaatggcctcatggggggttctctatgatcagttgacagaagaagagaagattagggcctag

SEQ ID NO: 128302 - DNA, 603 bp, Homo sapiens
atggctgagtcacacctgctgcagtggctgctgctgctgctgcccacgctctgtggcccaggcactgatccggccccgaggtgtgcccgttcaccaggcagaggtgtcatccgaattcaggctcctggggcccgggagggtccgactctacggacccaggtcgctgtggcccatcgctttcgatttgacttggtttctgtcgccactcgcggaaggcgcgccccccgccctcgctcggcggcccgccccgccccgcccctgctcttcctccggggccgctggcactgcggccgctccgcaggcagagaagccgggagcgggcgaggcggcggcggcagcagcgatggtgagggcccaggcggggccggccagccctgcgacgggcagagggcgagtggcgagggtgggagagaggagtccaaagtccgcgggctggggcctcccctggggcccacgagggccagacctgaggcggtgaccactgctggagcaggacggggcggaccctccactccctgcgcgccgcatgggagagaaatgcgtgagccccgtcctggctgcaccgcgcagagcgagcgggactcgggctccccattctcctga

SEQ ID NO: 128303 - DNA, 717 bp, Homo sapiens
ctaggctagattgtgatggatgatgtggcctagcctgggggcatgccacacgatcgcttcggtaagtgcagcagctttacgagggcgactcccatcggcaatttctatgacaccagatactcttcgaccgaacgccggtgtctgttgaccagtcagtagaaaagaagggatgagatcatccagtgcgtcctcagtaagcagctcctggtcacgttcattacctgaccatacccgagaggtcttctcaacactatcaccccggagcacttcaagagtaaacttcacatcccgaccacatacaggcaaagtaatggcattaccgcgagccattactcctacgcgcgcaattaacgaatccaccatcggggcagctggtgtcgataacgaagtatctttaccaacttcatccgtttcacgtacaacattttttagaaccatgcttccccaggcatcccgaatttgctcctccatccacggggactgagagccattactattgctgtatttggtaagcaaaatacgtacatcaggctcgaaccctttaagatcaacgttcttgagcagatcacgaagcatatcgaaaaacggggatcctggcgcggcctcggctgcctgcagcaggactgccaggggcccgcttagttcaggcagcaacagcaggaggaggacggaagccaagaggtggctgagacagcagcagcactgcgaggccttcat

SEQ ID NO: 128304 - DNA, 348 bp, Homo sapiens
atgagaagaagaaaccgaaagactaggagatatggagttttggacactaacatagaaaatatggaattgacacctttagaacaggatgatgaggatgatgacaacacgttgtttgatgccaatcatcctcgaaggaatacaacttacaagggatgtgaaggacctcttcaaggagaactacaaaccactgctcaaggaaataaaagaggatacaaacaaatggaagaacattccatgctcaagggtaggaagaatcaatatcgtgaaaatggccatactgcccaagactgctgtggaattcctgagaaagagcaactgagggatagcaacatggatttcactgagtag

SEQ ID NO: 128305 - DNA, 1419 bp, Homo sapiens
ttagcaaccgaaggcgtccttagcagcagtggccgctgagatgtacgaacttccggttctccgggcagctgccactggtgtagcttctgccacctgccacgactcgggcctttccctggcgtttggtcacctctgcttcattctccaccgcgcctatggtccctcttggagccagcgtggcgggcctggcggctcccgggtggtgagagagcggtccgggaacgatgaaggcctcgcagtgctgctgctgtctcagccacctcttggcttccgtccttcctcctgctgttgctgcctgaactaagcgggccccttgcagtcctgctgcaggcagccgaggccgcgccaggtctttggcgctcctgaccctataccacggacattaccccgcgctgccaccgggccctacccctgcccagcaaccgggccgtggtctggctgaagctgcggagccgcggggctccgagggaggcaatggcagcaacccttgtggccgggcttgagacggacgatcacggagggaaggccggggaaggctcggtgggtggcggccttgctgtgagccccaaccctggcgacaagcccatgacccagcgggccctgaccgtgttgatggtggtgagcggcgcggtgctggtgtacttcgtggtcaggacggtcaggatgagaagaagaaaccgaaagactaggagatatggagttttggacactaacatagaaaatatggaattgacacctttagaacaggatgatgaggatgatgacaacacgttgtttgatgccaatcatcctcgaagataagaatgtgccttttgatgaaagaactttatctttctacaatgaagagtggaatttctatgtttaaggaataagaagccactatatcaatgttgggggggtatttaagttacatatattttaacaacctttaatttgctgttgccaataaataccgtatccttttattatatctttatatgtatagaagtactctgttaatgggctcagagatgttggggataaagtatactgtaataatttatctgtttgaaaattacctataaaacggtgttttcctggtcggtttttgtttccctgcttacccatatgattgtaaattgttttatgtattaatcagttaatgctaattaatttttgctgatgtcatatgttaaagagctataaattccaacaaccaactggtgtgtaaaaataatttaaaatttcctttactgaaaggtatttcccatttttgtggggaaaagaagccaaatttattactttgtgttggggtttttaaaatattaagaaatgtctaagttattgtttgcaaaacaataaatatgattttaaattctcttaaagtggtccaaattatgtgtttatccaataaacataagactatagaattaaaaatta

SEQ ID NO: 128306 - DNA, 2433 bp, Homo sapiens
atggctgtgctgcagccaagcaggcacaggctgagacctcagctggggctcgaacctgacaattggcatagtcagcaggatgaggtcagctctgtggccacagcacgggctgtggtacccagtggcagaggtgctgcttggatgggccccagtggaaacataggaggcagtggactggtctcccacgagtgtggagaaggcactggagcagctggaagcacacagcttcaagaaggaatgcacttttgccggcagagtcgatgggcatttctgactgcactgtgtgaagtatatactcagtccttgcaggacacagtgcagtggctgcagctgtgccaatggtcagcacagggacaagatgaccacactttaattgagtggctaatgggagccacatggactgtttggaatgatgccagagaaataccagaaactggaactggccaagatgcctggctttgtgggagttggggagtggatgaccagaggccacatgtggagctggcaatccactgctccccaactaatgtacagagggtcttggcactggtagatactggtgcagactgcagtctagtttttgggaacccggtcagaaagcctgatggaacttggcagatgacagtggatgattgggaactgaataaggtgacacctcctctgcatgcagctgtaccctccatcatggatttgacagaccacttgacaatggaactaggacagtaccactttgtggactatgtgcatagccccaccatttgtcgtggtcttgttgccatggaattagctgcctggaaatgtccaaaaggggtcctcctgtttcattacattgatgatattatgttaacctctgattctcttgcagatttaaaagtggcagtgcccctcttgtggcaacatttggcagcatgtggttgggccatcaacaaatccaaggtccaatggcctggattatctgcgaaattcttaggagttatttggttgagtaagacaaaggccataccagaggccatcattgagaaaatccaggcatacccccgacccaccacgatgaagcagctgcagacttttgtaggcctcttggagtattggcggccatttgtgccccatttggctcaaatgataaaaccattgtatgggttatcaaaaaaaggggctacctgggattgggataatgaagctggaacagaccttctggccgccaagtgggccattcagcaaacacaggccttacaagtaattgatcaggggtgcccatttgaacttgatgtacatgtaaccacagacggttttggctgggtcctatggcagcgcatggagtgctttagaacgccagtaggtttttggtcccagctgtggaagggagctgagctccagtactcattaatacagaaggaattagctgctgcatatgctgctcttcaggcttatgagactgtgacggattgggctacagtcatcgtgcagatgagttacccaatagtcgggtggactgggacagcacagacaaccactttagcgaagcggggtgcctacttggaacagcagagtatgctgactacaactcccttagcagcagagttacaagaagccttggggcctatagtcctaatggaagataaggccatggggcctgaggcacccctagaccctgagccatcactgttaaagaaagggtatcctctcgttcctgatggggcatggtatacagatgggtccagccagggtgctgctgctgcctggactgctgtggcaatccagccgacactgacaccatatagtttgatactgggtgtggacaaagcacccagtgggctgaactcagagtggttgaggatggacattttggaggcctgccagaagtgcccagcatgtgctcaagcatacctgagacaaagacaactgcccaatgtgacacaacaagtgacagtagggcagatgcccttgaccagatggcaaatagattacgctgagccactgccaaaattgcagggctacacatatgcgctgatggctgcagacatagccaccggcttgttgctcatctacccttgcaggttggccaaccagcaacacagcattcgagccctgcaacacttaagtgccttatatggccttcctctggccatcaaaagtgataggggaacacattttactggacatcaaatacgacactgtaggttggcatgctccaacaacatcatggactgggcccacacctacaccgagttgaccaatgtctccaactgttggatctgcaccgcccttccagcagcagctgcagacagcttgccctggcttgtgcatccagcttctgtgcagaaccggacattgctaaagacttggggtcccacggacaatgggtgggatgcaacatggaggctttggatagggggtgtcacaaaacccatggcaagcttgccccctggctga

SEQ ID NO: 128307 - DNA, 241 bp, Homo sapiens
gtatatctatgttgctgacatattggctcatgaaattcatgttttggaaaaacacactaatatgaatttaactcagttgaaggttctccgcatccagaacattctatctgagaagcctacagtgactacagtttatgccaacaatgggtctgttctccaaggaagttctgtagcctcagtgtatgatgggaagctgctcataggcactttataccacagagccttgtattgtgaactctaa

SEQ ID NO: 128308 - DNA, 479 bp, Homo sapiens
atgttgtttactacagtccaaatgaagttaaagtggtagcagaaggatttgattcagcaaatgggatcaatatttcacctgatgataagtatggccccttatagaatatcttcatttttcttcagttgtggtgctggccaaattctttactttgctttctttgtcaatgtgaaaatagttttcttgacatttatggtatattatacatataatatatagatacactatatatataattatatatgttttgtatatatatttacatatacttagtcacatgtatttatatgcaaatacaataccatatttaagtaaactatataatacagtaatatatatgtatttatatataatatataaagtttggaatacatcattgtcaaatttaattttataaatataaattttaaagtgtgatcatactgatgcatacatattgaagtatcaggtatttccttttaaataaatgtattattttt

SEQ ID NO: 128309 - DNA, 1813 bp, Homo sapiens
  misc_feature (1)...(1813): n = a,t,c or g
cgagccgggaagatggcaccgcccacggagctgctggccaggccggagcgaggcagcgcgcccggctcccgcgccatggggcggctggtgggctgtgggcttgctggggatcgcgctggcgctcctgggcgagaggcttctggcactcagaaatcgacttaaagcctccagagaagtagaatctgtagaccttccacactgccacctgattaaaggaattgtgtggtgagtgtcttcttccttccccaaattcagcagaggagatacaagggtatttgatgagggctgcagaacaggtctaaaattcccagggactccacagctttgcaccagataagcctgggaggaatactaatgatggatctaaaaagaagaaaaaacccaaggggcacgggaattaaggaatcagtcgtggggtttgatttgggcctcattcaatccacatgggcatcagcactttccataggacaacgatggacacagttttatctctttgttgtaaaccaccccagaattcaagaatacagtggaaatttttaaatttgaagaaacaaaaaattttctggtggatttgaaaaccagcaaacctgtagcctttttccaggggggaatggaatcacaggtgggtggacccgggacatttttatggcaccaatgaaccactacttctctgatcctttcttaaagtatttagaaacatacttgaacttacactgggcaaatgttgtttactacagtccaaatgaagttaaagtggccggcagaaggatttgattcagcaaatgggatcaatatttcacctgatgataagtatatctatgttgctgacatattgggctcatgaaattcatgttttgggaaaaacacacctaaatatgaatttaacctcaagttgaagggtacttgaggctgggataccactgggtgggataattttatcctatttggatcccctccctcgggggggacatctgggggtagggcttgtccatcccctaatgggcccaggaggctccttccgtgtatggaccccgaacaaatcccctccccctcggtaagagggttncttcccgcatccccagaacattccctatcctgagaagcccctacagtggacttacagttttatggcccaacaatggggtctgttcctcccaaggaagttcctgtagccctcagtgtatggatggggaagctggctgcatagggcactttattacccacagaggccttgttatttgtggaactcttaaattgttacttttgggccatggaaagtgcgattaactttaacaattaatttttctatgaaattgctaaattctggagggggatttaacccagcaacattgaccccagaaatggtatgggcatgtggtaggtaaattttaattccccagtaagggaacggccccttttagttccttagagcacttttaacaaataaaaaaggaaaatgaacaggttcctttaaaatgcccaagcaagggacagaaaagaaagcctgcctttcgaataaagtgaatacattttgcacaaaagtaagcctgcacctttgccttcccaactgcccagaacatgggttccactggaaataggagtggaattatatttccttaaaaatgtggagtgacctcacttctggcactgtgactactatggctgtttagaactactgataataacgtattttgatgttttgtacttacatctttagaataccattaaaaagttccgccgttatattaaagactaactaaaatcccaaaaaaaaaaaaaaaaaaaattcctgcggctgcgaattcttccctcg

SEQ ID NO: 128310 - DNA, 854 bp, Homo sapiens
tcatggtctctaatatttcagacaggagctccctttaatgagttcttgttttcctgactgcagctctcttcattctgccaaccttttccaactccatgatgatcctgcaggtttcagggggcccctggacagaatattgaggaggggggtgttgttgggagtggcaccacccccatctctccctgctcttcacagagaattccgtctaccaggaacggcaggaatgctatgcgttcaatgggactcagcgcgttgtggacgggctcatctacaaccgggaggaatacgtgcattttgacagcgcagtgggggagttcctagcagtgatggagctggggcggcccataggcgagtacttcaatagccagaaggactttatggaacggaagcgagccgatcagctgccagattgcagagaccccctgatgccagactaaggagtgtggatttctcctctaggccagcaggtccccaacctcactgctcagaagactctccaacatctcccctccaagaaggagccccagcagcaccacgacctgcttgtctaccacgtgacagatttctacccagacagcattcaagtccgatgcttcctgaatggacaggaggaaacagctggggtcgtgtccaccaacctgatccgtaatggagactggaccttccagatcctggagatgctggaaatgaccccccagcaggacaggacatgagcaggggtgcagctgctggaggtgactctgaacctgagcctgttcttcctagaggcacagtctgattctgtgcagagcaagatgctgacaggagccaggggtctcttcattaattacctacaactgaatctctgtacacct

SEQ ID NO: 128311 - DNA, 571 bp, Homo sapiens
tccagggcagggccactccagagaattaccttttccagggacggcaggaatgctacgcgtttaatgggacacagcgcttcctggagagatacatctacaaccgggaggagttcgcgcgcttcgacagcgacgtgggggagttccgggcggtgacggagctggggcggcctgctgcggagtactggaacagccagaaggacatcctggaggagaagcgggcagtgccggacaggatgtgcagacacaactacgagctgggcgggcccatgaccctgcagcgccgagtccagcctagggtgaatgtttccccctccaagaaggggcccttgcagcaccacaacctgcttgtctgccacgtgacggatttctacccaggcagcattcaagtccgatggttcctgaatggacaggaggaaacagctgggcgtcgtgtccaccaacctaatccttaatggagactggaccttccagatcgtggtgatgctggaaatgaccccccagcaggggaggatgtctacacctgccaagtggagcacaccagcctggatagtcctgtcaccgtggagtggat

SEQ ID NO: 128312 - DNA, 1680 bp, Homo sapiens; identical to SEQ ID NO: 121654

SEQ ID NO: 128313 - DNA, 430 bp, Homo sapiens
gagacctccagccttttaccagggtaactgtcactggggaaagggaaatgatcagacatttcagggactactggacactggctgtgagcagacattgattccaggggacccaaaacatcattgtggtcctccagttaaagtaggggcttttggaggtcaggcaggcattgacttggcaaatgcctttttctccattcctgtccataaggcccaccagaagcaatttgtcttcagctggaaaagccaggaatatacctttactgtcctacctcagaggtatatcaactctccggctttgtctcataatcttattcggagagaacttgatcacttttcacttctggacgatatcacactagtccgttacattggtgatattatgcttattggatccagtaagcaagaagtagtaaacacactggacttattg

SEQ ID NO: 128314 - DNA, 1428 bp, Homo sapiens; identical to SEQ ID NO: 120222

SEQ ID NO: 128315 - DNA, 911 bp, Homo sapiens
atgattagacccaaaaatgctaaggactgtacttccaatagtatggagaacactgatattccttggtgtgaactgtttagagagttatgcaaaattaatgcatttgacactcctaattcactgctcacgagaggcaagaagtttagtgactctatacataatacctttgaccatatatggagaacccaagaacataatgaagctggttggttgctcctaacttcagtggacaaaaggatgaaagaagatgatgaacttagggattctgtctcctggcttcagaagcagatactgagcctcaaatctgccaagattaccctgagtgagagtcttatctcctgtagagaaagagctgaaattgtgggaaaacagacacagctcttatcctgcaagtggctgacctgcaacaaaaggagacctccaacctttcaccagagtaactgtgcaatggggaaagaggaatgttcagactttttggggattattgtacactggatctgagttgatgttcattccaggggacccaaaacatcattgtggtcctccagttaaaccgggggcttacagaggggtatatcatctccccggctttgtgccagaatcttgtttgcagagatcttgatcacttttcccttctacaagatatcacatgggtccgttacattgattacactatgctgattggatctaatccaatggtgcttgaggtgtcagtggcagatagggatgctatttggagcctttggcaggcccccatagatgaattacagcaaaggtctctaggattttggagcagggccctgccatcttctgcagataaccatcctcctttcgacatgcacctcttggcttgttatcgggctttgatagaaactgaatgtttgactatgggtcatcaagtcaccatgtga

SEQ ID NO: 128316 - DNA, 2901 bp, Homo sapiens
atgtcagttgaagctcggaaggactcttttattacacagataattcaaagcaagaaatctgctgtcagtatagggacagcctctgggctgaacagggcaacaagttcaggtcacctccacggccttgctgctccacagctggaggaagctgcagcgcaggcaggaggaggtggaagccaggaggggtggaagtggggagggaagaagaagggagcaggaagccgggtggctctaatcagagaaggcaacggcagtgccgggatctgggtcactttgatcgtagggtttgctgaagcacaaagaaagggttttcctgccggttctccacaactagactaccccatcagcaatcctgaaggacgggagactgctgagcggatggaggttaagaacagaagaaactgggacagccggtgccttgtgccaatccctatgcacctgctaaataggctgacatgtttggacgaagcagcccaatttgcatttgtcaccacaatgaatgactttggcaaaggcactcaccctctccacaattataaaatgaggttgtggccttctcccagttgggaaataggtgagaccccatgtcaaaaaaaagaagaagaaggagaaggaggaggaggaggaggaagaggcgaagaagaagaagaagaggaagaagaggaggaggaggaggaaatcaagagtacagtttgtagtagggatagccacgaaaaaaagcatttaaagaacccggatgctggcgacgagtgtttacatagccaattccctttattaaataccctctactttaaatacctagaatgggaccaacttgagcagtaccagtacattctccacagagatgctgaccctgattatcaacctgcagaaccaatgacagcatcagtctccctccagacattgtatactagaagcggtgaccatgggcagacccgtccatctcagcttgccctgcggagcattgtgggagtgctttctgagtcggaatttcaagcgtcactgcaaggacagtttgtgttttggatatcagacagtaaaagttcagttcagttaattgcattctcagttcaggacgtattatcaaaatcgcatcacctctctgccaatcctgatgctgggttatttacgtattccaacctgtctgtctttctgggaatcttccaaattccatatcagaggaagccgaagtgtgtggatcgtttcccttttcctccttttccaagtagacgtttttggctaaaattagcaacagttttcaataaaccagatgtgatctctcacccagggttctggagtttggcgcagagtacacactttcatcagctgtccccagtgccgggctggtcagagttcagtaccagagatggttctctgacagtgtggagcaccagaaaccatgagaaggaggcacagcaatctctcctgagcatggagcctgctcttggtgttgttttgctgcagctgctgtttgccattgatgatcgttctcttctttcaggagatatggagaacactgagagtccttggcatgaactgttcagagacttatgcaaaataaatgcatttgacactcctgattcatcactcatgagaggcaaggagtttagtgactctatacataatacctttgaccatatgtggagaaccaaggaacataatgaagctggttggttgttcctaagttcagtggacaaagtgatgacagaaaatgatgaactcaggaattctatcttccggcttcagaagcagatactaagcctcaaatctgctaagattgccctgagtgagagttttatctcctatagagaaagaactgaaattgtggaaaaacagacagaagctcttatcatggtatctgtgcactggggaaagggaaatgatcagacatttcttggactactggatactaactctgagttgtcattgattccggggaacccaaaacatcattgtggtcctccagttaaagtaggagcttatggaggtgaggggtatatcacctctctggctttgtgtcataatcttattcggagaggacttgatagcttttcgcttccacaaaatatcacactggtttattacattgatgacattatgctgattggatccagtgagcaagaagtagcagacacactggacttattgactgccagttttgagtggggtccagatcaggagaaggctctgcaacaggtccagactgctgtgcaagctgctctgccacgtgggccatatgacccagcagatccaatggtgcttgaggtgtcagtggcagatagggatgctgtttggagcctttggcaggctcccataggtgagtcacagcatgggcctctaggattttggagaaaggccctgccatcttctgcagataactactctccttttgagagacagctcttggcctgttactgggctttagtgaaaactgaacatttgactatggatcatcaagtcatcatgcgacctgaactgtttatcatgaactgggtgctttctgatccatctagccataaagtgggtcatgcacagcagcattccatcaccaaatggaggtggtatgcatgtgatcaggctccagcaggtcctgaaggcacaagtaagctacatgaggaaatggctcagatgcccatggtctccactcctgccaccctgccttctctcccccagcctgcactgatgtcctcaacggtagttctgtatgatcagttgacagaggaagagaaggctagggcctggttcagagatggttctgtacgatatgcaggcaacacccgaaagtggacagctgcaacactactgcccctttctaggacatccctgaagggcagtggggaagggaaatctttccagtgggcagaacttctcgcagtgcacctggttgtgcactttgcatga

SEQ ID NO: 128317 - DNA, 2583 bp, Homo sapiens
atgactaaaacaccaaaagcaatgacaacagaagccaaaattgacaaatgggatctaattaaactaaagagcttctgcacagcaaaagaaactatcgtcaaagtgaacaagcaacctacagaatgggagaaaatttttacaatctacccatctgacaaagggctaatatccagaatccacaaagaacttaaacaaatttacaagaaaaaatcaaacaaccccatcaaaaagtgggcaaaggatatgaacagacacttctcacaagaagacatttatgcagccaaaagacacatgaaaagatgctcatcatcactggccatcagagaaatgcaaatcaaaaccacaatgagataccatctcacaccagttagaatggcaatcattaaaaagtcaggaaacaacaggatgcagggggaggaacatggcttcattcctgctctgagtcatcgtcactgttcccacatccacttggtgatgagggacacacatctcagctgtgaagctcacagaactcactcaagagccacagatctatttcgaacgcatttggagagttggtgtgtgcaatccgaacacttgcagcctgcagacaacctactgtgggaccttgtgagcatggtaactgtgcactggggaaaaggaaatgatcagacatttcagggactactggacactggctctgagctgactttgattccaggggacccaaaacgtcactgtggtcctccagttaaagtaggggcttatggaggtcaggtaattaatggagttttagctcaggtgcaacttacagtgggtccaaagacagatggatcttggagaatggcagtggattatcataagcttcaccaagtggtgactccaactgtggctgctgtaccagatgtggtttcattgcttgagcaaattaacacatctcttggtacctggtatgcagccattgatttggcaaatgcctttttctccattcttgtctataaggcccaccagaagcaatttgccttcagctggcaaggacagcaatatgcctttacaatcctacctcaggggtatatcagttatctggctttgtgtcataatcttattgggagagattttgattgctttttgcttctgcaagctatcacactggtacattacattgatgacattatgctgaatggatccaacacactggactcatgggtgagaaatttgcatgccagaggatggaaaataaatccaacaaaaattcagggagcttctacctcagtaaaatttctagggatccagtggccatatgacccagcagatccaatggtgcttgaggtgttaatggcagatagggatgctgtttggatcctttggcaggcacccataggtgaatcacagcagaggcctctaggattttggagtaaggccctgccatcttctgcagataactactctccttttgagagactgctcttggcctgttactgtgctttcgtggaaactgaacgtttgactatgggtcatcaagtcatcgtgcgacgcgaactgcctatcatgaactgtatgctttctgactcatcaggccacaaagtgggtcacgcacagcagcatcatgaaattgaagtgatatttgtataccatgtgagtgctcaccaatgggtgacttcagcagatgaggagtttaataatcaagtggataagatgacccgttctgaggataccactcagcctctttcctcagccacccctgtcatcacccaatgggcccacgaacaaagtggccatggtggcagggatggaggttacacatgggctcagcaacatggacttccactcaccaaggctgacctgactatggccactgttgagtgcccaatttgccagcagcagagaccaacactgagccctcaatatggcaccattccttggggtgatcagccatccacctggtggcaggttagttatattggaccttttccatcatggaaagggcagaggtttgtcctgactggaataggcacttattccggatatgggtctgcctatcctgcacgcaatgcttctgccaagactaccacctgtggactcaaggaatgcctaatccaccatcatggtattccacacagcattgcttctgaccgaggcactcattttatggctaaagaggtgtggcagtgggctcatgctcgtggagttcactggtcttatcgtgtttcccatcatcctgaagcagatggattgatagaatggtggaatggccttttgaagtcacaattacaacaccaactaggtgacaatactttgcaggactggggcaaagttctccagaaagccacatatgctctgaatcagcatctgatatatgaacattggactccaagttcttcagttttgggacacggactggctctccttccttctcagcttgcagacaacctattgtgggaccttgtggtcatggcctatacgttaaaactacagaatgctgatgaaataaacataaggcgtagatgtctgactagacagccaggaagtactgctcccaccgagagaccaaaatatggagtaaaccaacatgcttcaaacacatcttcagagagaaaacactga

SEQ ID NO: 128318 - DNA, 2727 bp, Homo sapiens
ggaaataatatggaagaatgaatacttcattttaattgatcttccagggtgactgtgaagatcacgctaaccttctgtgcagccttcttcttggatatggattagaagcctttgtttgtgttgggaccaaggcaaaaggagtacctcatgcatgggttatgacttgtggaactgatggggccatcactttttgggagagtttaacaggacacaggtacatccataaacctaccaatcctgatgaacctccagttgctgaacagcccaaaccactgtacccatatcgaacaattggttgtgttttcaaccatcagatgttcctgggaaattgtcaaccctctgatgcagtagaaacctgtgtatttgatttgaacgatgaatccaaatggaaacccatgagtgaggaagcaattaaatctgtgtgtgctcctggagctacaacatcccttcctccctttccacctctgtgtgcatccacaattgacgcgtcagtaacaagtaatgaaattgaaatgcagctgaggctcctggtgtcagaacacaggaagtataccaaaatccacacatgtccaagccccactggtggccctgtagaacctgcagatacaaagagtcagccctctgtatgcatggatttcacatcccatgaataccgtatttccgacccgtttttggttgaaaaaaatttgcctaaagaaaaaactgccaacacagccggacatcagaaggaacaaactggggacacgctgcctttaagaaacataacaggcaccgtgagggtccacggcttcattcttgaagttagtgagaccaagaacccacctaatcccgggcacaaaaccacctcaatctcccaaagaccgaaagccctggtgtcgctgggaccagaggtgagacgtggaacacgtggggaagatgagaaggcgctggagaaggagggtggtggtcgcagatgggaatgtggtggagccaatgagctgtgcgggagacctccagccttcaccagggtaactgtgcattggggaaagggaaatgatcagacatttcaggacctattggacactggctctgagctgacattgattccaggggacccaaaacgtcattgtggtcctccagttaaaataggggcttatggaggtcagataattaatggagttttagctcaggtccaacttacagtggatgcagtgggtccctggactcatcctgtggtttttcccagtgccagaatgcataattggaatagacatactcagcagctggcagaatcccacattggctccctgactgtccatttatctagtgacccaaaaggctgccattctgagtggggtccagaacaggagaaggctctgcaagaggtccaggctgctgtgcaagctgctctgatacttgagccatatgacccagcaggtccagtggtgcttgaggtgtcactggcagatagggatgctgtttggagcctttggcaggcccccataggtgaatcacagcaaaggcctctaggattttggagcaaggccctgccatcttctgcagccataaagcgtgtcatgcacagcagcattccatcatcaaatggaagtggtatatacatgatcgggctcgagcaggtccggaaggcacaaatagttctgcacgatatgcagccaccatgtgaaaatgggacagcttcagcactacagcctctttctaggaaatccttgaaggacagcagtgaagggaaatcttcccagtgggcagaacttcgagccgtgcacctggctgtgcacgttgcatggaaggagaaatggccagatgtgcgattagatactgattcatgggccgtagccaatggtttggccagatggtcagggacttggaaggagcatgataggaaaattggtgacaaagaagtctggggaagaggtacgcggatagaactctctgagtggtcaaaaactgtgacgatatttgtatcccattgcttctaccaagactaccatccatccgtgggctcacagaatgccttatacaccaacatggtattccacacagcattgcctctgaccaaggcactcactttacggctaaagaattgcaacagtgggctcatgctcacggaattcactggtcttaccatgttccccatcatccagggttggggcaaagttctccagaaggccgtgtatgctctgaatcagcgtccaatatatgaatggaaggaagaatcatgcttgcacacaggtgtggctgatgcgctcagaggcaactgggcagaaggccacagggagcacaaggccttgtggctgggcctctggagcacctggtctcagcacccgctcaggtccttgaagacgaccagacaccatccagggcttggtgtactctctgaagatatatgcgaggcagggggagctacagaagagctgtccagggcctctggttttgccacagggtatgggaagagaaaagaagacactaagaagcataagcagcactctgtgtcagatataatgtaaggaacacaatctgccaaagaactggcctaagccatttcctaagaattttccttcacagaacgtgtaatatcaaaaataacttgccttttatcttaaatactcaaagcttcaaaaccttataatgtccataattcattacatcgtcagaaaaaaactgaaataccatttcatttccaaaagaagtcaagatatacttttacctatgatttaaagcagaacaagc

SEQ ID NO: 128319 - DNA, 377 bp, Homo sapiens
gtctgctggagtttgctggaggtccactccagaccctgtttgcctggttatcaccagcggaggctgcagaacagcaaagattgctgtctgttccttcctctatggaatttctaggcggctttgtttacactgtgagggtgaaaccatctactcaggcgtcagcaatggcagacgcccttccccccaccaagctggagcatcccaggtcgagctcagactgctgtggtagcagcgagaatttcaagccagtggatcttagcttgctgggttccgtgggggtaggacccaccgagccagaccacttggatccctggcttcagccccctttccaggggagtgaacggttctgtcttgctggcgttccaggtgccactggg

SEQ ID NO: 128320 - DNA, 753 bp, Homo sapiens
tcatgcaatctgcagaaggcctccctccacaggtacgagcccaagggcacgtccaatgaacatactgcacattgggctccatctcagagcctgcttcccaagaattcgacctgtggcatgggtagggcaatggccagccacagtcacagagatttttccataatgagaagactcttgttgaaggtttaccctaggccccacagaggccagcaagctaagatccactggcttgaaattcttgctgccagcacagcagtctgaagtcgacctgggacactcgagcttggtggcaggaggggcgtccactactactgaggcttgagtaggcagttttcctctcacagtgtaaacaaagccactaggaagtttggaaggagagttctggctggcatctggcaggtgcccctctgggacaaagcttccagaggaaggaacaggcagtaatctttgctgttctgcagcctctgctggtgatacccaagcaaacagggtctggagtggacctccagcaaactccagcacacctgcagcagaggggcctgagtgggtgtcttcaatccttatgctcattgacctcttcatgacctcaacgtcatcctcaaaattcttcgttggtttccaactgtgtggtttcctagttggattctttctgctctcatctttcctccttcggggcacccggatggctattccattcgcagcatccagaggaaggtgcccctgcctccagctgccttgatttagttcccccat

SEQ ID NO: 128321 - DNA, 2424 bp, Homo sapiens
atggtggatgaagatacaagtgatgtgttccaagagcagataggaggtgtctacttaaaagaaaacctaagattctcacatgtggtttcatgtcagacccagcacattgacagctgtggtggctatggtgagaaaggtgcagaaggccttctgcttgagaaagaggtccccaatccctggaccacggaccagtacccatccgtggcctgttatgaaccaggctgcaccgcagaagcagcagcatcagattctcataggagtgcaaaccctactgttaactgcacatgtgagggatcaaggttgcacactccttataagactctaatgcctgatgacctgagatggaacagtttcatcctgaaaccatacccccaaccgccatcctgggaaaaattatcttccatgaaactggtccctggtgccaaaaaggttggggaccgctgctttactgcacataaagtaactagtaaaccaaagttcagttctaaaagtcacatttggcatgtttataatgaaaattccaacagacagaagctggaacatgtaaaagtcaataaaggaagcaaagcgagtttatttataaataaagaagatgtatatgaatattaccaaaaagatcccaaaaacacaaaatttggtaaatccaagcataaacaatcaactcttgaccagatatactctacaggactcagaaagggcaatctccataacgtcaaagatcccaacacaaacgtaccaaaaggtataggaagaagaaaaacacaacataaaaggacccaagtagatgatgtagactgtaatccaagaaagatactagctgtctctccttccaggagaataaacagattggttacctatcagcagcatattccagaaactcataatgaccttccagaagaattgtgtgaaccttccagcttaactctgtcaagcctgagaaatggattagatagcagtactgaggcttgttcagtttccaaagagaaacacatccagaacctggatttatcagatagtcaagaagttcaatgcttggaattagaatctgttgaccaaactgaagctgtttctttcccagagcttttattacataaagaaatcaagttaccagttgttactacagataagcagcctcacactctccaggaacaacaccatgtactttataaatctcatgaaaacagtaacttggtcccaaaagatgagagatttaacaaatgggaaaattctttcctatcctttgtaaaggaaaattctgataatgatgatgatgatgattgctctacctctgagaaggctataacatctaaaaaggtgttgtgttctacaggtggcaaaaaacactataattttaaggagaatttaacaaataaaaaagaaatgggtttccaacagtttttactttctgaagatcatctttcacaggaaaatgagttaaaagcagtcagcctaaccacacttccagaacaggaagctgttaatttttcttattcagataatgcagttatttctgaacatgttgcaaattatgaacaatgcatatttggaccttcttttgatcactcaaatggcaatcctgagcaaaattccctggcttgtatgagaacacttttgacacatgaggcttcaaagttgactaatcatgtggagctattcaaaaagccacaggattatattcccagagcaccaacttttttaatgaatcaaacagatacacatattgtggaaaagatggcaaagaattgtgacactgagaggaattacattgacagagaccaaaaaataatttattcaaatgagcctttatccatagttgctcattctcaagtaatagaaacaactaaagttgaaaaaaggagacaaaaccatctagaaagtgagactatacacaatatagattctcattccactgacaatatgagtaaagaattggccaacatctcaaaacttagtcaaagagaaaagaaggaaatttctcacaaaccagatgaggaattaactaataacatcagtggagatgaaataactataagaaattgtgaggagataaaagaaaaaacggagtcagaaattcacatgcctactaatagccaagaacacaaaacagttcagaatttcagaaaaagacaaagtttcttaaaaactacctgcaacctaggggttcccccgtggagttctttggttcgttcagtgggttcgtcgactttaatgggtagtgtttctgcccttgtctcggtctccgttccgtcagacccctctgctgcaggtctgctggagtttgctggaggtccactccagaccctgtttgtctgggtatcaccagcagaggttgcagaacagcaaagattgctgcctgctccttcctctggaagctttgtcccagacgggcacctgccagatgccagtcggagctctcctgtatga

SEQ ID NO: 128322 - DNA, 1073 bp, Homo sapiens
ttagctattgatacttgtgtatgcttcacgaagttcttgtgttgtgtttttcaactctatcaggtcatttatgttcttctctaaactggttattctagttagcagtttctgtaaccttttatcaaggttcttagcttccttgcattgggttggaacatgttcttttagcttggtggagtctgttattacccaccatctgaagactacttctgtcaattcatgaaactcgttctccgtccagttttgttcccttgctggcgaggagttgtgatcctttggaggagaagaggcattctggtttttggaattttcagcctttttgtgctgttttttcctcatcttcgtggatttatctacctttggtctttgacgttggtgacctttggatggggtttttatgtgggtgtcctttttgttgatgttgatgctattgctttcagcagaggctgcagaacagcaaatattgcagaacagcagatgttgctgcctgatccttcctctggaagcttcgtcacagaggggcacctgccagatgccagcaggagctctcctgtatgaggtgtctgttgacccctgctaggagatgtttcccagtcaggaggcatgagggtcagggacccacttgaggaggcagtttgttccttagcggagctcaagcactgtgccgggagatctgctgctctcttcagagctctaactgcaaaagagatcattatatcagcctctccttcatacagcctggagaatgtgagtggagtcacctcttcccagactttcagagctttctcaacagcagaatcaacagcatcttttggcaaatctggtgtataattcacaatcctgtatgtaaggtgggttttcctccacttcgggatgccaggaaaggttctgaagtgaccaacgtcaggaactccacacctgggcttgcgcatcacctccagagtgtcggagtccagcttccccgtcacctgaacaaggttcatgctggtgtcctcaccccttgcagctccatccaatggataggctgagcaaactgccacgcacagcaacagtaggattggaagactcttcat

SEQ ID NO: 128323 - DNA, 690 bp, Homo sapiens
atgaggatgtctggaggaagagtcttccaggcagagaacagagtgaccgtcattttgcgggaacagcagggagaaaggagggggataagcaaggagtttgcgggagagagggcaacgcctgctctgcgctgcgcattcgctctggccatagcgggcctcgtgtcgctgctgatgcagcccgagggcgccctcggcgaggagctgcaagtgccgcagcccagggccgccagttggctgaacttaggctccatcaagaagtacttggggaagctcttcaacagcagcccgaagaaatctaaaaaccacaagaaaactgcgaacgccacggacacctccccatcaaaagccacgaaacccccaccatggaccaccacgaacccccagtggctgaacacctcggaaccccgaccaccgacctcctcccggggccccaggtaggacagcctggatgctgggcaccgagccaggggcctcggggctgggggcagcttgggtgctagcgagaggaagttcctgggggcgggcatgcggggagacacagcacccctgtggggggggcttctttctccaggctgggccttggcctccagacgcctctctgcctaccaacccctttgtattgagaggggcctcgacccctcctcatcccctcagtgaaaacaataaagacaaatttttgttgcaaaaaaa

SEQ ID NO: 128324 - DNA, 437 bp, Homo sapiens
acgaccgccggacgcagttcggccgatttgacactgggcatcctcgagcttgttaaagcacttgcccaacggtgagcaacggcctgcaacggagcccgagggactcgcgctgcccgttaagcagctttgcggtggcggaggctgggctgacgtctctccgacatcccgggacggaggaagagatgaaggctctgcagcccccgccgcccgatttacgcttgagaaagcgaaggcgagagaggtcgtccagcccctgggggcccagccctagagagcgggacgcgggctgcggggcccggcggcctggacggcggagcgttgaaagctcccccagggataggaagtgcagccgaaatcaacgattgagggtctgagcacctccctcatgcagacagagccccggctcccatgttcaccatgctgagaaagacctgcgg

SEQ ID NO: 128325 - DNA, 687 bp, Homo sapiens
atgtctgaatatattcgggtaaccgaagatgagaacgatgagcccattgaaataccatcggaagacgatgggacggtgctgctgtccacggttacagcccagtttccaggggcgtgtgggcttcgctgcaggaatccggtgtctcaatgtatgagaggtgtccggctggtagaaggaattctgcatgcccccgatgctggctggagaaatccggtgtatgttgtcaactatccgaaagataacaaaagaaaaatggtgttgggtctcccatggaaaacaactgaacaggacctgaaagagtactgtagtacctttggagacgttcttatggtgcggcaaagccaagatgagcctttgagaagcagaaaagtgtttgtggggcgccgtacggaggacatgactgaggatgagctgtgggagttcttctctcagtatggggatgtgatggatgtcttcgtccccaagccgttcagggcctttgcctttgttccatttgcagatgatcagattgcgcggtctctttgtggagaggactcgatgaaaggaatcagcgttcacatatccaatgccgaacccaagcgcaatagcaatagacagcaagaagtggaagatttggtggtaatccaggtggctttgggaatcagggtggatttgagtcgtatcaacgctgtgaacgcaaggctgtga

SEQ ID NO: 128326 - DNA, 833 bp, Homo sapiens
gagcccattgaaataccatcggaagacgatgggacggtgctgctctccacggttacagcccagtttccaggggcgtgtgggcttcgctacaggaatccagtgtctcagtgtatgagaggtgtccggctggtagaaggaattctgcatgccccagatgctggctggggaaatctggtgtatgttgtcaactatccaaaagataacaaaagaaaaatggatgagacagatgcttcatcagcagtgaaagtgaaaagagcagtccagaaaacatccgatttaatagtgttgggtctcccatggaaaacaaccgaacaggacctgaaagagtattttagtacctttggagaagttcttatggtgcaggtcaagaaagatcttaagactggtcattcaaaggggtttggctttgttcgttttacggaatatgaaacacaagtgaaagtaatgtcacagcgacatatgatagatggacgatggtgtgactgcaaacttcctaattctaagcaaagccaagatgagcctttgagaagcagaaaagtgtttgtggggcgctgtacagaggacatgactgaggatgagctgcgggagttcttctctcagtacggggatgtgatggatgtcttcatccccaagccattcagggcctttgcctttgttacatttgcagatgatcagattgcgcagtctctttgtggagaggacttgatcattaaaggaatcagcgttcatatatccaatgccgaacctaagcacaatagcaatagacagttagaaagaagtggaagatttggtggtaatccaggtggctttgggaatcagggtggatttggtat

SEQ ID NO: 128327 - DNA, 447 bp, Homo sapiens
tgcgggggacagcaggaggacagccggggaatgggcccgcacttgcccagagtccctgatggtgtcgtcttgggagtggaggaacctgagggaaaagcccagggacgagtcaggggagagctctgccctggtgctcttgcacgtatccacatgggccacagctgcacccggctctcagcagagggcatcgccatgctcctgggcacagccgggccctctcgcctccctgcggctcctgatgcctcccaggctccgctgaggtcaccttgggcacttagcgtggctgcagctctttgcagccccgtgtcctgtcatccatgtggccgtcatgtggtcacttttgggcattgccctgcgcaaggtccatggggactgggcacctttggccattctttctttggttgtctgtgcaagtaataaactaaatctgaaaaaaaaaaaaaaaaa

SEQ ID NO: 128328 - DNA, 1803 bp, Homo sapiens
tcactctcctgcacgggagggcactggttggaaggtgtgtgagggaaccttctgatggccacgctcaggaccttgagaagggtttgaggcacaaaacagcacacacttgtcaaaactcagcaggtattcactcgtgagcagggcattgcactgaacgccaagctttccatccaaaggaaaacccggtggcaaatggactgtaacgatgtgcgcactcagcggagcctgggaggcatcaggagccgcagggaggcgagagggcccggctgtgcccaggagcatggcgatgccctctgctgagagccgggtgcagctgtggcccatgtggatacgtgcaagagcaccagggcagagctctcccctgactcgtccctgggcttttccctcaggttcctccactcccaagacgacaccatcagggactctgggcaagtgcgggcccattccccggctgtcctcctgctgtcccccgcaggtctttctcagcatggtgaacatgggagccggggctctgtctgcatgagggaggtgctcagaccctgcagggcgggaacaaggtggaggaagtcgctggcgctgcagaagctgggcagtcaccccctccacacccaccccagcacataacaggtgctcaacacattcgcgaggggagcgctgagcaaagcggaggcccgggttccctcctggagaaacctgcttcccctccaaggcctcaagcgtccgctccttcactgacctcaatcgttgatttcggctgcacttcctatccctgggggagctttcaacgctccgccgtccaggccgccgggccccgcagcccgcgccccgctctctagggctgggcccccaggggctggacgacctctctcgccttcgctttctcaagcgtaaatcgggcggcgggggctgcagagccttcatctcttcctccgtcccgggatgtcggagagacggcagcccagcctccgccaccgcaaagctgcttaacgggcagcgcgagtccctcgggcaccgttggaggccgttgctcaccgttgggcaagtgcatcggaagacgatgggacggtgctgctgtccacggttacagcccagtttccaggggcgtgtgggcttcgctgcaggaatccggtgtctcaatgtatgagaggtgtccggctggtagaaggaattctgcatgcccccgatgctggctggagaaatccggtgtatgttgtcaactttggagacgttcttatggtgcggcaaagccaagatgagcctttgagaagcagaaaagtgtttgtggggcgccgtacggaggacatgactgaggatgagctgtgggagttcttctctcagtatggggatgtgatggatgtcttcgtccccaagccgttcagggcctttgcctttgttccatttgcagatgatcagattgcgcggtctctttgtggagaggactcgatgaaaggaatcagcgttcacatatccaatgccgaacccaagcgcaatagcaatagacagcaagaagtggaagatttggtggtaatccaggtggccggctccaagggactcggtattccccagcgccggctccgggcagtcccggaagggctcaagggctgggcgactggctgatcgagaccgtccgggtcctggctctcgggtcacttgcagaggcctgagcagagcgtagggagggcgccggccgcgccgcgtcacgccgtccgccggtcgctccgccgactcgcggctctgtgccgccggacccgcgcccgctgccgccgcgcacagctgcacgtatcccctcagcgccgtcgacat

SEQ ID NO: 128329 - DNA, 185 bp, Homo sapiens
gagagcgggaagctatccagaagtctgtgacaagaagctgcttactagaggaggaggaggagtcagctggctacactgctcaggcttcaggcccacttgttgaacagaacaatctgggtagcaacagcatcttccacagttttccaaactggatagctgccaaccagcagacattacccacttga

SEQ ID NO: 128330 - DNA, 411 bp, Homo sapiens; identical to SEQ ID NO: 115560

SEQ ID NO: 128331 - DNA, 456 bp, Homo sapiens
cccacgcgtgcggtggaggcagccatggtgcggttcatgcacaggtacctgctctgcgaacaggtgtgtgacgacctccgctgccgcctaagccttgatgaccgagttctgagcagcctcgtacgggacacgatcgccagggtgcacggaactttctgcgcaatcgcctgctccatcgccttggcgcttgcaagggcgctgaacgaagaggggaacccggaaggatggcgggatgtggcgggagcaagcgccggaggaagaaagaaggggcacgagtgcccaagcccgtgcaccgttttttgtacgttggctatcccaatgcctatactgtaatagggctacttcgatgcaaaaaagaattgtatcaagttgtgtggtcagttctttacttgatgacatacttggagaacaaaggacaccgttacccatgctttttcaacacattacatgtgggag

SEQ ID NO: 128332 - DNA, 990 bp, Homo sapiens; identical to SEQ ID NO: 115562

SEQ ID NO: 128333 - DNA, 455 bp, Homo sapiens; identical to SEQ ID NO: 128231

SEQ ID NO: 128334 - DNA, 1044 bp, Homo sapiens
ttcttcccaaatgccaagtccacaagaaggaatgtgtggcaaagcttgcacaccagccctctctcaggctgacagcctttgccctttgctcaggttggcttcagaggtggagggatattggcagatggcttgtgcagagccttatgttcagtcagagatgaacgatcatctgtcagtgtggtctctccagcatggcagcaccaccctggctagcatgagcttcaccacttgctccgccttcaccaactactggtccccgggttctgtccaggtgcccagctatggcacccagcctgtcagccacgcagccagcgtctatgcaggcctggggggctctggttcccggatctccgtgtcccacttcaccagcttctgggggtctggcaggaatgggaggcatccagaacgagaaggagaccatgcaaagcctgagagaccgcctggcctcctacctggacagggtgaggggcctggagaccgagaattggaagctggagagcaaaatccaggagcacctggagaagaatcggctgtagctggagacagagatcgaggctctcaagaaggagctgctcttcatgaagaagaacaacgaagaggaagcaaaaggcctacaagcccagattgccagctctgggttgaccgtggaggtagatgcccccaaatctcagaccttgccaagaacatggcagactcccgggcccaatatgacaagcttgctcggaagaaccgagaggagctggacaagtactggtctcagcaaatcgaggagagcaccagagtggttaccacacagtccgccaaggttggagctgctgagatgacgctcacagagctgagacatagagtccagtccttagagatcgacctggactccacgagaaatctgaaggccagcttggagaacagcctgagggaggtggaggcccgctatgccctgcagatggagccatcattgttattttcaaagattatctttgggagagtttgggagatatcatacttacatgtctttgagggcaagcaagttgttgtatgctggtt

SEQ ID NO: 128335 - DNA, 1125 bp, Homo sapiens
ggacagagtgaggagcctggagaccgagaaccggagcttggagagcaaaatccgggagcacttggagaagaagggaccccaggtcagagactggagccattacttcaagatcatcgaggacctgagggctcagatcttcagcaaatactgtggacaatgcccgcatcgttctgcagattgacaatgcccgtcttgctgctgatgactttagagtcaagtatgagacagagctggccaatgcgccagtcttgtggagaacgacatccatgggctccgcaaggtcattgatgacaccaatatcacaccgacttgcaagcttggagacagagatccgaggctctcaaggaggagctgctcttcattgaagaagaaccccgaagaggaagtaaaaggcctacaagcccagattgccagctctgggtttgaccgtggaggtaagatgcccccaaattttcaggaccttcgccaagattcatgggcagacatccggggcccaatatgacgagctggctcggaaagaaccgagaagaggctagacaagtactggtctcagcagattgaggagagcaccacagtggtcaccacacagtctgctgaggttggagctgctgagacgcacgctcacagagctgagacgtacagtccaggtctttggagattcgacctggacttccatgagaaatctgaaggccaagcttggagaacagccttgagggaggtggaggcccgctacgcccttacagatggagcagctccaacgggatcctgctgcaccttgagtcacagctgggacagacaccgcgcacagaggcacagcgccaggcccaggaagtatgaggccctgcatgaacatcaaggtcaagcttggaagctgagatctgccaccttacccggccgccttcttggaagattggcgaggactttaatctttggtgattcctttggacgaacgcaactccatgcaaaccatccaaaagaccaccacccgccggataagttggattgggcaaagtggtgtcttgagaccaattgacaccaaagttcttgaggcattaagccagcaagaagccagtggtacccttttggggaagcaggaggccaataaaaagtttcagagtttcaaaa

SEQ ID NO: 128336 - DNA, 3499 bp, Homo sapiens
  misc_feature (1)...(3499): n = a,t,c or g
ctcagaggctccgaactcgccggcggagtcgccgcgccagatcccagcagcagggcgcgggcaccggggcgcgggcagggctcggagccaccgcgcaggtcctagggccgcggccgggccccgccacgcgcgcacacgcccctcgatgactttcctccggggcgcgcggcgctgagcccggggcgagggctgtcttcccggagacccgaccccggcagcgcggggcggccgcttctcctgtgcctccgcccgccgctccactccccgccgccgccgcgcggatgccaagcaccagctttccagtcccttccaagtttccacttggccctgcggctgcggtcttcgggagaggagaaactttggggcccgcgccgcgcgccggcggcaccatgaagtcagcggaggaagcccgaccctgcccgccctggactggcagctgccgtcccactcaggcccgtatgagcttcggattgaggtgcagcccaagtcccaccaccgagcccactacgagacggagggcagccggggggccgtgaaggcgtcggccggaggacaccccatcgtgcagctgcatggctacttggagaatgagccgctgatgctgcagcttttcattgggacggcggacgaccgcctgctgcgcccgcacgccttctaccaggtgcaccgcatcacagggaagaccgtgtccaccaccagccacgaggccatcctctccaacaccaaagtcctggagatcccactcctgccggagaacagcatgcgagccgtcattgactgtgccggaatcctgaaactcagaaactccgacattgaacttcggaaaggagagacggacatcgggaggaagaacacacgggtacggctggtgttccgcgttcacgtcccgcaacccagcggccgcacgctgtccctgcaggtggcctccaaccccatcgaatgctcccagcgctcagctcaggagctgcctctggtggagaagcagagcacggacagctatccggtcgtgggcgggaagaagatggtcctgtctggccacaacttcctgcaggactccaaggtcattttcgtggagaaagccccagatggccaccatgtctgggagatggaagcgaaaactgaccgggacctgtgcaagccgaattctctggtggttgagatcccgccgtttcggaatcagaggataaccagccccgttcacgtcagtttctacgtctgcaacgggaagagaaagcgaagccagtaccagcgtttcacctaccttcccgccaacgttccaattataaaaacagaacccactgatgattatgagcctgctccaacctgtggaccggtgagccaggggttaagtcctctcccaagaccatactacagccagcagctcgcgatgccacccgaccccagctcctgcctcgtggccggcttcccgccctgtccgcagagaagcaccctgatgccagcagcccctggcgtgagccccaagctccacgacctttctcccgctgcctacaccaagggcgttgccagcccgggccactgtcacctcggactcccgcagccggccggagaggcccccgccgtccaggacgtgcccaggccagtggccacgcaccccggctcgcccgggcagccacccccggccctgctgccacagcagtaaatgaaataatacgaaatgacctctccagcacgagcacccactcctagttgccacattggagcactcagttcagcaggggtatgctgacttcagcagacaaagacttttgaataaataaactgaactcacacctggtaccactcagaacctccaactgactgaatgccaggagctgaacattaatatgtgcaaagattggctctccaacaagaaggaaagcagggaggaagggagaccactgtgtcacctggaggagaagtcatctcatgacaacagaagggaggtggccgggctgagcacgggagacccaccgtgcaggggcctttcatgggaacggcccacacgcagtttgaccccacgcccagcccttctggcacccctggggttcaatactggaagtgccttatttaaccagaccatcagggcatcatagaattgagcattgaatttgctactgtaggagtatttttaggagcagaaactgcaaacacatttcattgtgaggttttaccctctgtatgaatgaagagaatgctggaaggctgcgagaggactctagtatgagtctccaacatttggaacgtttcctgggctgtcacgtacactcctgctgccttacacagtgcattttagaatcttccagtctgtcatctcagctcttttgtaacatgcttcccttgtctgcgcggttgaaaccgtaggcttgttcatagtcgcatgctcgcatctttgtttttaatctggcttcgaacatagcacaagtaacttgaatagcacatcaataggttactggacaaaagcagaaaaacctgttacaggatagcctgcatttgcatgtgtgtacatatctaggcatctatttatgtataaataataacagagccgacgtgtcctcgcccaggagggcttccctgtcagcaataaccggcatccgttttggaacctgcgtctggggctccagtcgctgctcttgctggcgtccatcgccgcctcggacggccgtgcattttctcgtctcacgcagttcgaggaggaccctagaaagccaggagctgtgattgacagtagctgtaggttaccagacggcaacattagaaagtgattgtaaataacatgcaacctaagtgtaatatatttgttcagttataagatgattgtttcacagaagccttaccactctctgcttcatctaagaaaaccaataccaaaaacgccactttaatgctcagccctgcgttgtgtgttttcagatgagttactgttaacaggtaggttcgtgtaggccttgctgggcactctgtacaattagttgcttattacgtatgattactcgcagcgatctattgttccatataaccaaaaagcatggtttattcattgaaacacggttgacctgaactcgtgccttaggaattaatgcccccttatggaacctgcctgaattgcacctgcgggtggaggctccggctgtgaagtcactgaacagaacgtcgctgatggagaaagggctcccgcagaaggaacggcctgtaccgtgcgctccggcacaatcgcgtctcttgtgtctcactcacggaaagaaacaacctgaaggccatcccgtcggtctgcacgtaaccgtgaagacgtgtggccgcgtcccacctgcggctgggtaccctgcacccggcactgtaggagtcacgtgcagcctttctcaggggactgtcattgaaaaggaaacgtttgatgtctgtgtcagctgtctttgtagttaggaaatagatccaataaagccgtatttttttgctggnnnnnnnnnnnnnnnnnnnnnnnnnnnnnnnnnnnnnnnnnnnnnnn

SEQ ID NO: 128337 - DNA, 4963 bp, Homo sapiens
gagccgccgggccggcggggaggcgggggaggtgttttccagctttaaaaaggcaggaggcagagcgcggccctgcgtcagagcgagactcagaggctccgaactcgccggcggagtcgccgcgccagatcccagcagcagggcgcgggcaccggggcgcgggcagggctcggagccaccgcgcaggtcctagggccgcggccgggccccgccacgcgcgcacacgcccctcgatgactttcctccggggcgcgcggcgctgagcccggggcgagggctgtcttcccggagacccgaccccggcagcgcggggcggccgcttctcctgtgcctccgcccgccgctccactccccgccgccgccgcgcggatgccaagcaccagctttccagtcccttccaagtttccacttggccctgcggctgcggtcttcgggagaggagaaactttggggcccgcgccgcgcgccggcggcaccatgaagtcagcggaggaagaacactatggctatgcatcctccaacgtcagccccgccctgccgctccccacggcgcactccaccctgccggccccgtgccacaaccttcagacctccacaccgggcatcatcccgccggcggatcacccctcggggtacggagcagctttggacggtgggcccgcgggctacttcctctcctccggccacaccaggcctgatggggcccctgccctggagagtcctcgcatcgagataacctcgtgcttgggcctgtaccacaacaataaccagtttttccacgatgtggaggtggaagacgtcctccctagctccaaacggtccccctccacggccacgctgagtctgcccagcctggaggcctacagagacccctcgtgcctgagcccggccagcagcctgtcctcccggagctgcaactcagaggcctcctcctacgagtccaactactcgtacccgtacgcgtccccccagacgtcgccatggcagtctccctgcgtgtctcccaagaccacggaccccgaggagggctttccccgcgggctgggggcctgcacactgctgggttccccgcggcactccccctccacctcgccccgcgccagcgtcactgaggagagctggctgggtgcccgctcctccagacccgcgtccccttgcaacaagaggaagtacagcctcaacggccggcagccgccctactcaccccaccactcgcccacgccgtccccgcacggctccccgcgggtcagcgtgaccgacgactcgtggttgggcaacaccacccagtacaccagctcggccatcgtggccgccatcaacgcgctgaccaccgacagcagcctggacctgggagatggcgtccctgtcaagtcccgcaagaccaccctggagcagccgccctcagtggcgctcaaggtggagcccgtcggggaggacctgggcagccccccgcccccggccgacttcgcgcccgaagactactcctctttccagcacatcaggaagggcggcttctgcgaccagtacctggcggtgccgcagcacccctaccagtgggcgaagcccaagcccctgtcccctacgtcctacatgagcccgaccctgcccgccctggactggcagctgccgtcccactcaggcccgtatgagcttcggattgaggtgcagcccaagtcccaccaccgagcccactacgagacggagggcagccggggggccgtgaaggcgtcggccggaggacaccccatcgtgcagctgcatggctacttggagaatgagccgctgatgctgcagcttttcattgggacggcggacgaccgcctgctgcgcccgcacgccttctaccaggtgcaccgcatcacagggaagaccgtgtccaccaccagccacgaggccatcctctccaacaccaaagtcctggagatcccactcctgccggagaacagcatgcgagccgtcattgactgtgccggaatcctgaaactcagaaactccgacattgaacttcggaaaggagagacggacatcgggaggaagaacacacgggtacggctggtgttccgcgttcacgtcccgcaacccagcggccgcacgctgtccctgcaggtggcctccaaccccatcgaatgctcccagcgctcagctcaggagctgcctctggtggagaagcagagcacggacagctatccggtcgtgggcgggaagaagatggtcctgtctggccacaacttcctgcaggactccaaggtcattttcgtggagaaagccccagatggccaccatgtctgggagatggaagcgaaaactgaccgggacctgtgcaagccgaattctctggtggttgagatcccgccgtttcggaatcagaggataaccagccccgttcacgtcagtttctacgtctgcaacgggaagagaaagcgaagccagtaccagcgtttcacctaccttcccgccaacgttccaattataaaaacagaacccactgatgattatgagcctgctccaacctgtggaccggtgagccaggggttaagtcctctcccaagaccatactacagccagcagctcgcgatgccacccgaccccagctcctgcctcgtggccggcttcccgccctgtccgcagagaagcaccctgatgccagcagcccctggcgtgagccccaagctccacgacctttctcccgctgcctacaccaagggcgttgccagcccgggccactgtcacctcggactcccgcagccggccggagaggcccccgccgtccaggacgtgcccaggccagtggccacgcaccccggctcgcccgggcagccacccccggccctgctgccacagcaggtgagtgcgcctccaagcagtagctgcccccctggtctcgaacactcgctctgccccagcagcccctctcctccactcccgcctgccacccaagagccgacctgcctgcagccctgcagcccagcgtgcccgcccgccacgggccgcccgcagcacctgccgtccacggtccgcagggacgagtctccgactgccgggccacggctgctgccagaggtgcatgaggacggtagtcctaatttggcccctattcctgtaacggtcaagcgagagcctgaagagttggaccagttgtacctggatgacgtaaatgaaataatacgaaatgacctctccagcacgagcacccactcctagttgccacattggagcactcagttcagcaggggtatgctgacttcagcagacaaagacttttgaataaataaactgaactcacacctggtaccactcagaacctccaactgactgaatgccaggagctgaacattaatatgtgcaaagattggctctccaacaagaaggaaagcagggaggaagggagaccactgtgtcacctggaggagaagtcatctcatgacaacagaagggaggtggccgggctgagcacgggagacccaccgtgcaggggcctttcatgggaacggcccacacgcagtttgaccccacgcccagcccttctggcacccctggggttcaatactggaagtgccttatttaaccagaccatcagggcatcatagaattgagcattgaatttgctactgtaggagtatttttaggagcagaaactgcaaacacatttcattgtgaggttttaccctctgtatgaatgaagagaatgctggaaggctgcgagaggactctagtatgagtctccaacatttggaacgtttcctgggctgtcacgtacactcctgctgccttacacagtgcattttagaatcttccagtctgtcatctcagctcttttgtaacatgcttcccttgtctgcgcggttgaaaccgtaggcttgttcatagtcgcatgctcgcatctttgtttttaatctggcttcgaacatagcacaagtaacttgaatagcacatcaataggttactggacaaaagcagaaaaacctgttacaggatagcctgcatttgcatgtgtgtacatatctaggcatctatttatgtataaataataacagagccgacgtgtcctcgcccaggagggcttccctgtcagcaataaccggcatccgttttggaacctgcgtctggggctccagtcgctgctcttgctggcgtccatcgccgcctcggacggccgtgcattttctcgtctcacgcagttcgaggaggaccctagaaagccaggagctgtgattgacagtagctgtaggttaccagacggcaacattagaaagtgattgtaaataacatgcaacctaagtgtaatatatttgttcagttataagatgattgtttcacagaagccttaccactctctgcttcatctaagaaaaccaataccaaaaacgccactttaatgctcagccctgcgttgtgtgttttcagatgagttactgttaacaggtaggttcgtgtaggccttgctgggcactctgtacaattagttgcttattacgtatgattactcgcagcgatctattgttccatataaccaaaaagcatggtttattcattgaaacacggttgacctgaactcgtgccttaggaattaatgcccccttatggaacctgcctgaattgcacctgcgggtggaggctccggctgtgaagtcactgaacagaacgtcgctgatggagaaagggctcccgcagaaggaacggcctgtaccgtgcgctccggcacaatcgcgtctcttgtgtctcactcacggaaagaaacaacctgaaggccatcccgtcggtctgcacgtaaccgtgaagacgtgtggccgcgtcccacctgcggctgggtaccctgcacccggcactgtaggagtcacgtgcagcctttctcaggggactgtcattgaaaaggaaacgtttgatgtctgtgtcagctgtctttgtagttaggaaatagatccaataaagccgtatttttttgctggaaaaaaaaaaaaaaaaa

SEQ ID NO: 128338 - DNA, 1767 bp, Homo sapiens
atgggtcagaagtgctcgtggcgggaaggagttggggggtgggggggcggtcctgtctttcagcccagcgccagcgagccacatggcctcagaccaaccccaggatgggcccgttgtccacctgtgaaaggggaagccgtggctttcctctcagggctacggcacaggccgtgtctgcggggcgagcacggctccacgtacggctctcgtccgcggtgtggatgggtgggcggtacagcctcctctgcggttcggttgctgtgctgtcctctgctgagtggtgtcagggttgtccatcccgctctctgtcagctgctgccatggggcagcgggaaggccctggagggtgcctgggctgtgtctggtcccggccacgcgtccctgcagcgtctgagaccttgtggaacacacttgacccggcgctgggacggggtcggcccacacgcaccgccagcccgcaggagtgaggtgcaggctgccgctggctccttaggcctcgacagctctcttgaggtcggccctcctcccctcccgagagctcagcagccgcagacccaggcagagagagcaaaggaggctgtggtggcccccgacgggaacctgggtggccgggggacacaccgaggaactttccgccccccgacgggctctcccaccgaggctcaggtgctcgtgggcagcaaggggaagccccatggccatgccgcttccctttcaccctcagcgacgcgccctcctgtgcccgcggggaacaagacggctctcggcggccatgcaggcggcctgtcccacgaacacgatggagacctcagacgccgtccccaccctgtcactgtcaccatcacccatcctgtcccctcacgcctccccacatcccatcattactacccctcaggcctccccacaagtgctggtgtggacctgtgggtcgcttggttcgtggagagacagccacagcatcttcccagcatcgcggccggcacctggcacctgcactttggccgtcagagacgtgctggtaccgtgctacggacgagggcggtcactctggcgaccccagctctctgccgaggcagccaggcactggctcacgacactcatggaccagggcgggaccgaggaggaaatgagggcttccctgtcagcaataaccggcatccgttttggaacctgcgtctggggctccagtcgctgctcttgctggcgtccatcgccgcctcggacggccgtgcattttctcgtctcacgcagttcgaggaggaccctagaaagccaggagctgtcctgcactccagctggatgcttcaggcaaacaccaggccccaacgctaaaacttctgtgaccaactttctaaaaatgagcctggaaagcagcttccgggagaaggtgaggtttccgaggagaatctgaagtcctctgatctgctggtgatacctggggggctctgggccaggcaaactgtagccctctgagagctccgcctgggcgtcacggtggcccctccgtggcccgtgcaaagcccctgagccggctgcatcagacccgctaagcatgcgttttccctgatcaaacaaatgacaaaacgaaagctcaaatgcttgaatttcattaggatccctcgcccaggtccttggagggcgggtagtggataaagttcccttgttcctcggatcctcaggaacaccccagactttagaaggaaagtcagaaggtgctgacacaggtgcataactaaagggaaatccttctttctcagctccaaccat

SEQ ID NO: 128339 - DNA, 382 bp, Homo sapiens
ttccagggctggaggccaggtgggcggtggggctcatctcaggggcagggcgtgggggtttgtgggccaggacccacccaagggctgggtctgggaggtgcttggggagcccagggcgacctggtgtgtgccctgcgggatgccccgagggctcctgcttgtgttgccagcacctgcccttgggagccgtcagctggggccacgatgctggcagggtgaggcctggcagggtctggggcttttggagggtgggggctaagggaacccctggtggaagctgccttcagggttcctgcctgccttgaggatgggtgataaggggctgggccctgccctcctgctgcctgggctctgtaactgatgctcagaggaccgggtggag

SEQ ID NO: 128340 - DNA, 657 bp, Homo sapiens
tcacagtccctgtccatcctgaaccagtccagggccagagtaggttccactgtagaggacgaaaggcaagagcaggctgcgagccgccacgctgtgcacggtctcagacgtgaatgaccatcctcttggggggacccacggcccgtccacagcgggtgggaaccgcatctgtaacaggcccaaggtgcttcctcctgcaccatcaatcccagacacctgggtgtggtgtctgagttcaacagccagggaggggcctggacctttcaacagacggccccggtggccgttctcaggtgggactgatctggtcctgctgctgccttcactgagcagcatcgggagaaccaggtggccgctgtccaggctctgcgctcccggccctgctgggtctgctctggagttcagggctcgtgatggtgtcccagtgtgtaggtggcccgagctgggagtcccacagtcccgcagcggcgacgccgccacccgccgagtgccgaggcccggggcccactcccagcccagctccaggagaggccgcgccggaggaccgcgaggacggcgccgcagcgccaggtcgggctgagcctgccagcatcgtggccccagctgacggctcccaagggcaggtgctggcaacacaagcaggagccctcggggcat

SEQ ID NO: 128341 - DNA, 868 bp, Homo sapiens
atgatgctcaataaatactgggtgagtgagcaaaaacttgcacttgacagttgtgaccgcatatgtcgttctgaggatactgctaagaacaatcatcagagcctacaaaacaggtgcgtggatgtgatgatagccagactcaagccaagcaccatcaagaaattctacgaggccggctgcaagtacaaggaagagcagctcaccaccggctgcgagaagtggctggaaatgaacttggttcctctaggggggacgcagatccacctccacaaaatcccacaggacctgctccacaaagtgctgaagtccccagatgtgattctcgagtgcctgggcttcaaatgggagctccatcagccccagctttttcagtctgagaccttggccaagctctacctgaaagtccctggcgcagggcaccacacaccccctgagggagctggaggagcttctgcgaggtacttcctccctggcacccagtgctggagccccagtgccctctagcttgacggtcccagcttggaacatggttatctgttttgagaccacggtcactctagcagtcaagagtgaggtcgccatcctctcatgtctcctcacctggctctatgcaggccccaaactctccatcgtccttccagcctgggatgaacggggcttggatctggtggctgtgaacccatatacccctggctcgatggccagggcccccaggcatcctggtgataacatgtccaactgtcacatggataaagtggtcattcatttgttcatttcatccaacataaacttattgagcgtctatccagtgctgggcatctatgccaaggattcaatggtgattgaaacagagtgcctgctctcctga

SEQ ID NO: 128342 - DNA, 1543 bp, Homo sapiens
atggattacctgggagataaactcacagtggcccagacccacatgacccagtggatgggcaccgtgaggaggtccttccaggaagccctcaatttggtgaccaccacggtgggccacgaacggacgagtgcagagtcggccagccggacccccttcaagcgtacttcctccttccgacacctggcttcccggagtcgggaatccttccgccgcttctctgctcgcagccaacagagattttcttcactgaggaaaaggcatacagattcggaaccgccagatattgatgtaaggtccatgagggccagggctttggccgtcctggttcaccttgatattgccagtacccagaacagtggctagagaaatacagagaacaccacaaagatactccttgagaagagcaaccccaagacacataattgtcagattcaccaaggttgaaatgaaggaaaaaatgttaagggccgccaaagagaaagctgataagcaacttcagcaaagtctcaggatacaaaatcaatgtgcaaaaatcataagcattcctatacagcaagaaaagacagagagccaaatcatgagtgaactcccattcacaattgcttcaaagagaataaaatacctaggaatccaacttacaagggacatgaaggacctcttcaaggagaactacaaaccactgctcaatgagataaaagaggacacaaacatatggaagaacattccatgctcatggataggaagaatcaatattgtgaaaatagccatactgcccaaggtaatttatagatttaatgccatccccatcaagctaccaatgacttccttcacagaattggaaaaaactactttaaagttcatatggaaccaaaaaagagcccatattgccaagtcaatcctaagccaaaagaacaaagctggaggcatcaccctacctgacctcaacctatactacaaggctacagtaaccaaaacagcatggtattggtaccaaaacagagatatagaccaatggaacagaacagagccctcagaaataataccacacatctacaaccatctgatctttgacaaacctgacaaaaacaagcaatggggaaatgattccctatttaataaatggtgctgggaaaactggctatccatatgtagaaggctgaaactggatcccttccttacaccttataaaaaaattaattcaagatggattaaggacttaaatgttagacctaaaaccataaaaaccctagaagaaaacctaggcaataccattgaggacataggcatgggcaaggacttcatgactaaaacaccaaaagcaatgaaaacaaaagccaaaatagagaaatgggatctaattaaactaaagagcttctgcacagcaaaagaaactacaatcagaagttttggcagtgaacagaagtctcacacccttgtgagggccactaggctggtttctgatcacagccagtcatttgaagcatggctgcaatttctaggggacaccaggtttggcactcagaaactcagagactcagattga

SEQ ID NO: 128343 - DNA, 3214 bp, Homo sapiens
tcaatccttagaagactgtgtacatgagatactgtacatgttggttgggttctccgagaagcgcatgcccggatagaatgcaaaagattcattagggagtaacacctctgcgggagaacgcgaggatgaggttctagtgggaccggcgctagcgggcgcgtcctgccaggagtgagtcttggcgccatctagcgcctgctggaggctctgcagctgcagtggactgagccgccggcgctgggcgtgggtcaccgccgcggcgttctccggacccagggaggcgatctgctccgcggacagctcctgtttccctgtgtgatttgaaatggggtcaagctcccatttctccttgaagaactgagcacctactttgaatatctcatcaggaaggcattttattgctgatggctggaaatatggcatcaaatccttgtcaagcatccggagctctgccttagttaatccagctgcaatggtcccaagctcctgcaagacagaactggtccactcagtgggatccccaaacacaacttcagccttcctcttaaactcggctaagacatgtgtgctgcagagcagggtcccaattctggccactaccaccctgaattctgagatctttataagtgggatttcagtgatgtttatagcacacagggttgcaccaagtcctaccaaatgaaagctcttcaggtcctggatactgtatcctgaatcatccaggtacccttgcaaaatggattcagcctgtcccggggtccattctgtttgccagcttagggaagccacagtgtatatggagctgaggtccagctgctccagctcactctcattaagagccagagcaatgcgccccagggagacgatatggtgttctctccagtaagatggcatgtcccaaacctgatattgctttctccttcagggtcatcagctgaggccggctgaaaccctggacagctcccagcagttccacggtcctgatgaatgtgtcttcctccatgcaccgcaggtcctccagggcccagcaggcgttggcttcggccaacttgaagatgtcatcagaagagggggccacgactccatggcaaccaggcatagggtcatagctggggatcttatcactgctgttccgaacagactgaaagacagcccagaggaattctttagtgggcagggtcctggccatcttggaagctgcttgcagaaggatctcaggaaatgcagccttttgctcagggttgaggtctgggcagtctctgaggccgtgtagagcagtcgcccaagccctgggggagatccccctgtcgatgatggctgccggcaagtgacacagcaggttccccatgatgtccacagtgtactcatcagcaatggagtcgtccaggcactgctgcactttcctgaggactgaagtctttttgtgggaatctaaaaccaaggagtccaaccagctcttccccaggctgatcagaaagggcacacactgggaggctgggacagaagccaggtagcgggccgggagtgcagccaagaggaaaggtggcatagacaatctggaaacttcccagtatttccacgccaaacaattaacctgatagggtgaaagcagggcgaagttgttctgaaaatcctggaaatgggccagaaagaagtcagtgctcatggcatcaatgtgtgagcaggtcacgcctttgaccagctgcccagcactcaaaagctcctcaggccttctggtggtctttaacagaagctcatacaggaacagagcctggctccttccaagttccttatccttcaggactgtagagttgaatccaggttgcctccttaaatcaaagagagacacttccttaaagaaagccccttgtatctccacgatgcctggggcagtgtcttccgcttggaccatcttgctgaggataccttgctgctgggcaggtgacaagtcggatacatactgggagacggcacttctcaggacctgcgagatgtccttgcgtttcatgctgcagaaggcctgggtgctgaccccagccagcagtgcgcccatctggctgacattgtagaaagacagcaccttctcatgggccaagtatttggcagacaagatgatgacctggctcttggcccaacctgagacctggttgagggtggagatggctccgtgcacagcctcgggggagagggattccagttggctgtaggtcaaacctacaactgcatccgacaaagaacccagggtctcattgagggtctggttctccatggcaatgtccaggagttctgctttgagcttctggacgccagcctggaagcccctcaggtggctgcacttgatcatctggtaaagcaggacttgagccacagtggcatccagcaattccaggtcattgtagaaacaaaccagcagccccagcatcttgggaaagggctccaaggcccagagctcatgcgcttgcctgtggatggtggaggtattcctcatgttaaagttggaggagctgatcctctccagaaacgcctgggccagctcaggtgtgatgtcatagaccatgtccagctgcttggtggcgttgtcatagctgataaacagcccaatttctataggactaattttcgtaatttcttcaaacgataggtgaaccatgtatctgcccaaaacccataagtgttccgcactgacccatgaagcagagtcatcagtggcattggaggatgtctgcagtattccagtcatccaggaatagagagctctctgggaatgagccgaggttttgtcgtagagatctttgaacactgcagataggttcttaaaggcatcctcgcgcaggtcccgagggagccgctctgtgatgtctggctggagaaagctccctgaggaccccctcagcaccttgcccaggatctccacacactccagggagttcagcatctggaaacacctctccagtgtgatgagaaacaggctgcggttcacgccagggctctgcaaggctcgttctcgaatctctcctaagtcgatgatgatgtctttcaggtccaagccgtccttcttgtcttctaagaggcatttcatggcagtgcggaactgctgggcgtctgtcttcctcaggtcctccagcagcttctggggctggtgcagacgctgctccaggtggttttccacggctgccctgcctggaatttggcactgtataactcgacactccat

SEQ ID NO: 128344 - DNA, 626 bp, Homo sapiens
ggcgccggtctctggcttcctcattgagctccaatccatatgtcaagtggctgaacttttgggacagtgggctctatggggcaggtacagaggccctggcaggtgccctgagcaaaagcagcagcatctgcgatgtggacctgttggagaaccagctgggagtggcaggagcccaggccctctgtgccgccctcacagtgaaccaggccatgcggaagatgcagctgtcagggaatggcctggaggagcaggcggcccagcaccttgccgaactcctgctggcccacacagacctgaagtccctggacctgagctacaaccagctgaatgaccaagcagatctgtgcatgggactgcagggcttcctcatcttccacagctttgggggcggcactggctctgggttcgtgtctctgctcatgaagcggctctcggtggactacgggaagaagtccaagctggagtttgccatttgcccagccccccaggtctccatggccatgacggagccctacaactccatcctgaccacctacacgaccctggaacattctgactgtgccttcatagtcgacagcaaagccacctatgacatgtcagcacaacctggacatcgagtgtcccat

SEQ ID NO: 128345 - DNA, 1356 bp, Homo sapiens
atgaggggttcctgtgagaggtctggggaggatgaagagcagaaagaagaggctatggtggcctgtgggcgtctttcaggggtccccgaggccgagcagggtcccgaggccaattgggactccgacctggagacggaaggcaccgatgggcttggagaactggtcagggacacactgtacctgaggtcttgccgggcccatagtgttgtgcccatctcctgctttctgcgccaagggagcgcccaagagctgaacctccggcaccgtggcctggggccccagggcgcccgggctctggcttcctcattgagctccaatccatatgtcaagcggctggaccttcgagacaatgggctctgtggggcaggtgcagaggccctggcaggtgccctgagcaaaagcagcagcatccatgatgtggacctgtcggagaaccagctgggagtggcaggagcccaggccctctgtgccgccctcacagtgaaccaggccatgcggaagatgcagctgtcagggaatggcctggaggagcaggcggcccagcaccttgccgaactcctgctggcccacacagacctgaagtccctggacctgagctacaaccagctgaatgaccaagcaggcccagctccaagcctgcgtgcatttccacaggcaaacatcttccttaaagttctagacatctcatacaatggctttggggatcctggagcctctgcggtgggtgaggctctgaaggccaacaacgtgttggaggaactcaacatgagtaacaaccgcatctctgcgatgggagccctgagcctgggcctgggcctccgggtcaaccagacgctgaggattcttgtactttgtgtgcgtgtttctcaggtgtccaggaatcccatgcgaagtgaaggctgctttggtctcctcaagtctgtccaggacaatccagcctctgccctggaactgctggatttctcagatatccaggtgaacgcagagtttgatggccttgctagctcagtgaggggaattcttccaggacttggcattaaagactggcgcttgcagagtggagtataaaaaggagttgctgccagtcttcagatcagccctgccagcgtctgtccctaagtgaccttggagtgtggcttcctcatctccaatcagctgctttgacctccagggtatatacttgaaagaaatgaagacatatgtccccacaagaactcgtgcacgaatatccatagcaacattatttataatattctaagagtgaaaatgcccaccagtggataaatgcaatgtggtatatccatacagtggaatattatttggcaataaaaaggaatttgaggtgataccaaaaaa

SEQ ID NO: 128346 - DNA, 497 bp, Homo sapiens
gagtacgtgactgtacggaggattaacctagaagcttgttccaatgagatggtaacattcttgcagggcgagctgcatgtctccaaactcttcaaccatcccaatatcgtgccatatcgagccacttttattgcagacaatgagctgtgggttgtcacatcattcatggcatacggttctgcaaaagatctcatctgtacacacttcatggatggcatgaatgagctggcgattgcttacatcctgcagggggtgctgaaggccctcgactacatccaccacatgggatatgtacacaggagtgtcaaagccagccacatcctgatctctgtggatgggaaggtctacctgtctggtttgcgcagcaacctcagctgccctggtgctttctccaagggccatcagtgtcttgcctagcttgagggcttaagtccttatgctgtgttagtttcgttgtcagaacaaattaaaattttcagagacgctgaaaaaaaaaa

SEQ ID NO: 128347 - DNA, 423 bp, Homo sapiens
tgagctgtgggttgtcacatcattcatggcatacggttctgcaaaagatctcatctgtacacacttcatggatggcatgaatgagctggcgattgcttacatcctgcagggggtgctgaaggccctcgactacatccaccacatgggatatgtacacagaatctccagggttatgatgccaagtctgacatctacagtgtgggaatcacagcctgtgaactggccaacggccatgtcccctttaaggatatgcctgccacccagatgctgctagagaaactgaacggcacagtgccctgcctgttggataccagcaccatccccgctgaggagctgaccatgagcccttcgcgctcagtggccaactctggcctgatgacagcctgaccaccacaccccccggccttcaacggtactcgccct

SEQ ID NO: 128348 - DNA, 474 bp, Homo sapiens
attcccgggtcgacgatttcgtctggcggcggcgcggcagtaaaactgaggaggcggagccaagacggtcggggctgcttgctaactccaggaacaggtttaagtttttgaaactgaagtaggcctacacagtaggaactcatgtcatttcttcggtgggtctcggaaaagttcattgttgagggcttaagagatttggaactatttggagagcagcctccgggtgacactcagagaaaaaccaatgatgcgagctcagagtcaatagcatccttctctaaacaggaggtcatgagtagctttctgccagagggagggtgttacgagctgctcactgtgataggcaaaggatttgaggacctgatgactgtgaatctagcaaggtacaaaccaacaggagagtacgtgactgtacggaggattaacctagaagctgttccaatgagatggaacattcttgcaggcgagctgatg

SEQ ID NO: 128349 - DNA, 1473 bp, Homo sapiens
atgggggagctgactcctgctggagatgaatcgagtccaggctcccagaaccctggccgaagctcacctccccctggctatgttcctgagcggcagcagcacattgcccggcaggggtcctacaccagcatcaacagtgagggggagttcatcccagagaccagcgagcagtgcaccaatgatgcgagctcagagtcaatagcatccttctctaaacaggaggtcatgagtagctttctgccagagggagggtgttacgagctgctcactgtgataggcaaaggatttgaggacctgatgactgtgaatctagcaaggtacaaaccaacaggagagtacgtgactgtacggaggattaacctagaagcttgttccaatgagatggtaacattcttgcaggatcaggcagctagagacatgaagaggcttgaagaaaaggacaaggaaagaaaaaacgtaaagggtattcgagatgacattgaagaggaagatgaccaagaagcttattttcgatacatggcagaaaacccaactgctggtgtggttcaggaggaagaggaagacaatctagaatatgatagtgacggaaatccaattgcacctaccaaaaaaatcattgatcctcttccccccattgatcattcagaggtatgctttttttctcaaggtgcaatgaaagccttccacactttctgtgttgtccttctggtgtttgggagtgtctctgaagccaagtttgatgattttgaggatgaggaggacatagtagagtatgatgataatgacttcgctgaatttgaggatgtcatggaagactctgttactgaatctcctcaacgggtcataatcactgaagatgatgaagatgagaccactgtggagttggaagggcaggatgaaaaccaagaaggagattttgaagatgcagatacccaggagggagatactgagagtgaaccatatgatgatgaagaatttgaaggttatgaagacaaaccagatacttcttctagcaaaaataaagacccaataacgattgttgatgttcctgcacacctccagaacagctgggagagttattatctagaaattttgatggtgactggtctgcttgcttatatcatgaattacatcattgggaagaataaaaacagtcgccttgcacaggcctggtttaacactcatagggagcttttggagagcaactttactttagtggaacagttcctctccccactctggggtgtccagacaggtgcggatcaaggcttcccagtccgcaggggatataaatactatctaccagccccccgagcccagaagcaggcacctctctgtcagagggggtatccaaaacgcggatatataccatcaggtaatgaacactcgctcttgccagctctgagctttgacacagatttagaccgtcctaacttccaagactgggggaggagtttagctacatccaagtag

SEQ ID NO: 128350 - DNA, 970 bp, Homo sapiens
agttttctctactaacctatttttctttttcttttttagaccaatgatgcgagctcagagtcaatagcatccttctctaaacaggaggtcatgagtagctttctgccagagggagggtgttacgagctgctcactgtgataggtatgtgcaggggccgtccttactctcctgctttctgctccaggggctgctgcagctttctcagcagccccagatgtgtgtacagcagaggccatccactagttaggaggattcatgggcacagacttgcttctgtggggtcttctctgtttttttctgccaagtatggggaagagatcaaacttccaggaaagaagctcttttgccatctttcctttgtgggctgccatgtttccggtgtcctgggccatagtgagtcagaaaggttggctgagaaggaactgatgagagaaaaatcaagaaatgtgagccatgaacataacagttaaattctgctgggaaaaggaaaaaaaaaaaagtaacagtagtgaaaaatttaacattaagtttcttttgaaatcaagtcccttttttaaaggaaaattttcttaaaaccttttgttgttcttgtcgttgcgtatggcattccctttttcttttaggcaaaggatttgaggaccctgcatgaactgtgaatcctagcaaggtacaaacccaaccggagagtaccgtgcactgtcacggaggattaacctagaagcttgttcccaatgagatggtaacattcttgcaggtaataaaccatgagtgtgtcacatggagggagggtgggctcttggctctgataggaattacaaggaattacaaagaaatgaagggagactaaacgttcggaagttatggaagctttcagtggagaatcctggccatttggcactaaggattgggctgaaatgctgctcagcctaatttatatttccctttttttctccaaacactcccttgtgg

SEQ ID NO: 128351 - DNA, 480 bp, Homo sapiens
ttacttagcttctttctgcaagaatgttaccatctccattggaacaagcttctaggttaatccttcggacaagtcaagtcttctccggttggtttgtaccttgctagattcaacagtcaatcaggtccctaaaatcctttgccctatcacagtgagcagctcgtaacaccctccctctggcagaaagctaactcatgacctcctgtttagagaaggatgctattgactctgagctcgcatcattggtttttctccgagtgtcacccggaggctgctctccaaatagttccaaatctcttaagccctcaacaatgaacttttccgagacccaccgcctgattcgctctggtttacttacaagaaatgacatgagttcctactgtgtagacctacttcagtttcaaaaacttaaacctgttcctggagttagcaaacagccccgaccatcttggctcccccacgcgtccgcccacgcgtccg

SEQ ID NO: 128352 - DNA, 1635 bp, Homo sapiens
  misc_feature (1)...(1635): n = a,t,c or g
ttcgacgatttcgtcagcaaccggtctggcggcgttgcggcagtttaactgaggaggcggagccaagacggtcggggctgcttgctaactccaggaacaggtttaagtttttgaaactgaagtaggtctacacagtacgaactcatgtcatttcttaccaatgatgcgagctcagagtcaatagcatccttctctaaacaggaggtcatgagtagctttctgccagagggagggtggtacgagctgctcactgtgataggcaaaggatttgaggacctgatgactgtgaatctagcaaggtacaaaccaacaggagagtacgtgactgtacggaggattaacctagaagcttgttccaatgagatggtaacattcttgcagggcgagctgcatgtctacaaactcttcaaccatcccaatatcgtgccatatcgagccacttttattgcagacaatgagctgtgggttgtcacatcattcatggcatacggttctgcaaaagatctcatctgtacacacttcatggatggcatgaatgagctggcgattgcttacatcctgcagggggtgctgaaggccctcgactacatccaccacatgggatatgtacacaggagtgtcaaagccagccacatcctgatctctgtggatgggaaggtctacctgtctggtttgcgcagcaacctcagcatgataagccatgggcagcggcagcgagtggtccacgattttcccaagtacagtgtcaaggttctgccgtggctcagccccgaggtcctccagcagaatctccagggttatgatgccaagtctgacatctacagtgtgggaatcacagcctgtgaactggccaacggccatgtcccctttaaggatatgcctgccacccagcccaggtcctggttctgtcctccccagatgctgctagagaaactgaacggcacagtgccctgcctgttggataccagcaccatccccgctgaggagctgaccatgagcccttcgcgctcagtggccaactctggcctgagtgacagcctgaccaccagcaccccccggccctccaacggtgactcgccctcccacccctaccaccgaaccttctccccccacttccaccactttgtggnagcagtgccttcagcgcaacccggatgccaggcccagtgccagcaccctcctgaaccactctttcttcaagcagatcaagcgacgtgcctcagaggctttgcccgaattgcttcgtcctgtcacccccatcaccaattttgagggcagccagtctcaggaccacagtggaatctttggcctggtaacaaacctgggaagagctggaggtggacgattgggagttctgagccctctgcaaacctgtgcgcattctccagccagggatgcagaggccacccagaggccccttcctgagggcggcccacattcccgccctcctggggaagatttgggtaggaaaggacatttttttccagggaaagtttgattgcttgattgattggggaaagaaaatcctgggagagacatttcattgttccaaggtttttgagacacaagggattttcaacaaccagggatcaggagggtccaaagccgacattcccagtcctgtgagctcaggtg

SEQ ID NO: 128353 - DNA, 460 bp, Homo sapiens
  misc_feature (1)...(460): n = a,t,c or g
agggccggncnncccccaactgatgatcatagatcacccgtggggaanncgcaggccactcanccagcactgccttctcccagcaggacctgctggttggggccattctctttggccacaatggcagcctcagctcccgcaacaccctggccttctcaatggatgtggggccttctcaatggatgtggggccagtgcacacagatgccatcctacaagtgaccattgccctagagggcccactagccccactgaagctggcctggcacaagaagatctacatcttccagggagaggcagctgagatcagaagagaccagctggagaccacggagttcatcatctcggagccactggccaatatgtactcgcgtgggaaccagaacacactgatggaggagtgggcagagtangcacagtggcacgacgagatgctgcgcatgcaccacgtgctgaaggag

SEQ ID NO: 128354 - DNA, 433 bp, Homo sapiens; identical to SEQ ID NO: 122701

SEQ ID NO: 128355 - DNA, 299 bp, Homo sapiens
gagaaactaacaatgaaaacggactcgttgatggaggaaaagttggaatgcagcctctggtgctgtttgagcgatccctctatcccgggtcgctgctgtgttctggaaaggcgcattgtaccctggatgcagcagcttccttctttggtgagaaccacctggaggtgactgtggccatggctctgactgacatagacctgcaactgcagttctccacgtcccaacccgaagccctccttctcctggcagcaggcccagctgaccacctcctgctgcagctctactctggacacctgcag

SEQ ID NO: 128356 - DNA, 5526 bp, Homo sapiens
atgagctgggcagaggcctgcactcttgcccctgccatccctgctgcccctgattctttactttctgcatctactcagaaacccaagaatgcagtggagccagcccttgggctcctttatccccgttgtaagcatagccatcatcttgtggtaatagacataaacttgcattttcctttggaagaagagaccaacggcttctttcatttaacacagtccactgagtgggagtttgcccccaaaagagagaaagatcaagtagtcaagaagaggtatgtagaaaaccccaacatcatggcctgctacaatgaactgctccagctggagtttggagaggtgcgatcacaactgaaactcagggcttgtaactcagtattcactgcattagaaaacagtgaagatgcaattgaaattacaagcgaagaccgttttatacagtatgcaaatcctgcatttgaaacaacaatgggctatcagtcaggtgaattaatagggaaggagttaggagaagtgcctataaatgaaaaaaaggctgacttgctcgatactataaattcatgcatcaggataggcaaggagtggcaaggaatttactatgccaaaaagaaaaacggagataatatacaacaaaatgtgaagataatacctgtcattggacagggaggacatctagctaaccacgttcagtgtgaacctcaactcccagtgtggcccgcggctgtggccaccagtgaccataatcagacaggcaaacataaagacaggagaaaaggctcactagacgtcaaagctgttgcctcccgtgcaactgaagtttccagccagagacgacactcttccatggcccggatacattccatgacaattgaggcgcccatcaccaaggtaatcaatattatcaatgctgcccaggaaagtagtcccatgcctgtgacagaagccctagaccgtgtgctggaaattctaagaaccactgagttatattcaccacagtttggtgctaaagatgatgatccccatgccaatgaccttgttgggggcttaatgtctgacacaggccttgaaataatcaaggatggagaggaagaaggggagagccgcacagcgcagcagtaccctgggctgtcagagtccacgcggcagccctggaggaggtccaggacccccaggaccacctggggctggaaagcaacagagcaacagtgtccagacttcccgcctcctggcccgcaccctcatctagagcttctcatcttccactgtgaaggacaaggaactggccagaaacacagcacctcatacccgtgcacactcatgtctgagaagcgtggcttaatgaacgtcttctttgcaaaatacacaggccctgcaatgaggaagtcctctggattgactcctagcttattacatctttattgtgcagaccctctccattcaaagcccctcttcaactgcccaccccccactacctccaagacagagattctgggttcttgcaactgcagcccctcagagagtgtaagaggggcagaaaaaggagatcaagagctgctagcgaatataaagcaggcagaaaaacatgaaaagaaccacccggaggtgactgtggccatggctctgactgacatagacctgcagctgcagttctccatgtcccaacccgaagccctccttctcctggcagcaggcccagctgaccacctcctgctgcagctctactctggacacctgcaggtcaggcttgtcctgggccaggaggagctgaggctgcagaccccagcagaaattctactgagtggctccgtcccccacaccacagttctgactgtctcagaggactggcccacattgtcagtcaatgggtttctgaatgcctcctctgtagtcctgggagcccccctagaagtcccctatgggctctttgttgggagcactgggagacttggcctgccctacctgaggggaaccagccatcccctgaggggttgcctccatgcagccgctctcaatggccgcagactcctccagcctctgacccccaataagcatgagggctgtgctgaagagttttctgccaatgatgatgtggccctgggcttctctgggtcccactctctggctgccttgcctgcctggggcactcaggatgaaggaaccctggagtttacactcaccacacagagctggcaggcacccttggccttccaggcagcaggctggcatggggacttcatccatgtggacatatttgagggccacctgtggtccatggttgagaagggccagggtactgtattgctcctcaacagtgtgcctgtgactgacgcacagccccacaaggtcagcatccacatcaacattcaccagctagaaatctccatggaccagtaccccacacgaactgaggagtcctcagctacctggagccacgcccgcttcatccacgatggccctgaggacacctctgaccagctggtgctggaggtgtcagtgatggcttggttgcccatgccctcatgcctgcggaggggccaaacagacctcctgcccatccaggtcaaccctgtcaatgacccaccccacatcatcttcccacatggcagccttatggtgatcctggaacacacacagaagcctctggggcctgaggttctccaggcctatgacctggactctgcctgtgagggcctcgccttccagctccttggcaccccctctggcctccccatggagcaccgagaccagcctggggagccggtgactgagttctcctgctgggagttggaggccggcagcctagtctatgtccactgtggtggccctacacaggacttgacattccgggtcagcaatggactgcaggccagccccccggccatgctgaaggtggtggctgtccagctggccatacaaatccaccgcagcacagggctgcatctggcccagggctctgccatgcccatcttgcctaccaacctgttggtggagaccagcgccgtggggcaggatgtgaccgtgctgttccgtgtcaccggaggcctgccgttcagggagctgcagaagcagggggctggtggggtggaggatgctgagtggtgggtcacacaggcgttccaccagcaggatgtggagcagggccacgtgaggtacctgagcactgacccacagcactacaccgaggacaccgtggagaacctggatctgcaggtgcaggtgagctgggaaatcctgagcaatctgtccttcctagtgaccatccagagagccactgtgtggatgctgcagctggagccactgcacactcagaacacccagcaggaggccctcaccacagcccacctggaggccaccctggaggaggcaggcccaagccccccaaccttccactgtgaggtggttcaggctcccaggaaaggcaactttcaactacagggcacgatgctgtcagacggtcagggcttcacccaggatgacgtacaggctgcagaggtgacctatggggccatggcacgtgcctcagtggcagtggaggacaccttctgtttccatgtcacagctccaccatatttctccccactctgtaccttctccatccatattggcggtgacccagacatgcctgtcctcgtggtgcccgagggtggtgggtgtgtcctctctgctgaccagctcttcatcaagagtctcaacagtgccaggtacctctatgaggtcatggagcagccccgccatgggaggttgacttggcgtgggacacaggacaagatcactatggtgacatccttcaccaatggagacctgatgcatggccagctgaccatcagctgcgtcttccacgtggcctggggtaggtggcggctgctgactacagacaacatggccttcagcaatgctgattcgggctttgctgaggcccagctggtgctgacccaccaggacctcctctctggcagtatcatggccacggatgagcccatgcagcccatctgccgcttcatccaggaggggcctcaggaagaggcgagtcctgtgtccgatgggcagcaccaggccatcacggtgctggaggtgcaggccttggagccttacctctgtgtggccaatggctccggcctcatggttcctcaaggaggccagggtaccatcaacatggccgagctccacctgggcaccaacctcaacatctgcagtagggatgaggcccactaccacgtcacagacagccctcactggggacagttgctccaagccactcagccagccacagccttctctcagcaggacctgctggttggggctgttttctatggccacaatggcagcctcagctcccgcaacaccctggccttctcaatggatgtgggaccagtgcacacagatgccaccctacaagtgaccattgccctagagggcccagtagccccactgaagctggcccagcacaaggagatctacatcttccagggagaggcagctgagatcagaagggaccagctggaggtagcccaggaggcagtgccgccagcagacatcgttttctcagtgaagagcccaccgagtgccggctacctggtgatggtgctgcgtggcatcttggcagatgagccacccagcctggaccccgtgcagagcttctcccaagaggcagtggacacaggcaggatcctctacctgcactcccgccctgaggcccggagccatgccttctcgctggatgtggcctcggcctgggtgctccccttgaggacgtcacgtggagctggaggtggaagagcatctgatccagtacctgcacgatgggagcaagacactgacggttttgtcctgatggctaatgcctctgagatggaccgccagagccatcctgtggccttcactgtcaccatcctgcctgtcaatggccaacccccgacctcatacaaactcaggcctgcagaggctctgaggagcatggatggttactctgggcccaaggacctggtgtacaccattaagcagcccagcaatgggtggagtccgtccagccactcagcagccagagcctcagagccagcaggcaccgacccccagctcctgctctaccatgtggtgcggggcctccagctaggccggctcttccacgcccagcatgacagcacaggggaggacctggtgaacttcactcagggagagaccccggagttcatcatctcggagccgctggccaatatgtactcatgtgggaaccagaacacactgatggaggagttggcagagcaggcacagcagcacgacgagatgctgcacatgcaccacgcgctgaaggaggcgctcagcatcatcggtgacatcaacaggaccactgtcaccatgcccatgcccccgcccgtggacgacacctggttgcaggtgcagagcatccctgacgcacacaggtaccagagactgccccccacggccccaaaatcccccacccgggatgcccagaggagtgccctgggggcaagtggcacaccccctcaccggggtggctcccacctggagtga

SEQ ID NO: 128357 - DNA, 4584 bp, Homo sapiens
tcagggatgctctgacaaccaggtgtcgtccacgggcgggggcatgggcatggtgacagtggtcctgttgatgtcaccgatgatgctgagcgcctccttcagcgcgtggtgcatgtgcagcatctcgtcatgctgctgtgcctgctctgccaactcctccatcagtgtgttctggttcccacatgagtacatattggccagcggctccgagatgatgaactccggggtctctgcctgagtgaagttcaccaggtcctcccctgtgctgtcatgctgggcgtggaagagccggcctagctggaggccccgcaccacatggtagagcaggagctgggggtcggtgcctgctggctctgaggctctggctgctgagtggctggacggactctcagtgcccggcaccgcccactgcactacccacccattgctgggctgcttaatggtgtacaccaggtccttgggcccagagtaaccatccatgctcctcagagcctctgcaggcctgagtttgtatgaggtcgggggttggccattgacaggcaggatggtgacagtgaaggccacaggatggctctggcggtccatctcagaggcattagccatcaggacaaaaccgtcagtgtcttgctcccatcgtgcaggtactggatcagatgctcttccacagccgtacctctctccagcagaaggtgctgagggtcctggcttgaggcccatcctccttctgcagggccccatgccggggtggctccagcacctccagctccacgtgacgtcctcaaggggagcacccaggccgaggccacatccagcgagaaggcatgcctcagggcgggagtgcaggtagaggatcctgcctgtgtccactgcctcttgggagaagctctgcacggggtccaggctgggtggctcatctgccaagatgccacgcagcaccatcaccaggtagccggcactcggtgggctcttcactgagaaaacgatgtctgctggcggcactgcctcctgggctacctccagctggtcccttctgatctcagctgcctctccctggaagatgtagatctccttgtgctgggccagcttcagtggggctactgggccctctagggcaatggtcacttgtagggtggcatctgtgtgcactggtcccacatccattgagaaggccagggtgttgcgggagctgaggctgccattgtggccatagaaaacagccccaaccagcaggtcctgctgagagaaggctgtggctggctgagtggcttggagcaactgtccccagtgagggctgtctgtgacgtggtagtgggcctcatccctactgcagatgttgaggttggtgcccaggtggagctcggccatgttgatggtaccctggcctccttgaggaaccatgaggccggagccattggccacacagaggtaaggctccaaggcctgcacctccagcaccgtgatggcctggtgctgcccatcggacacaggactcgcctcttcctgaggcccctcctggatgaagcggcagatgggctgcatgggctcatccgtggccatgatactgccagagaggaggtcctggtgggtcagcaccagctgggcctcagcaaagcccgaatcagcattgctgaaggccatgttgtctgtagtcagcagccgccacctaccccaggccacgtggaagacgcagctgatggtcagctggccatgcatcaggtctccattggtgaaggatgtcaccatagtgatcttgtcctgtgtcccacgccaagtcaacctcccatggcggggctgctccatgacctcatagaggtacctggcactgttgagactcttgatgaagagctggtcagcagagaggacacacccaccaccctcgggcaccacgaggacaggcatgtctgggtcaccgccaatatggatggagaaggtacagagtggggagaaatatggtggagctgtgacatggaaacagaaggtgtcctccactgccactgaggcatgtgccatggccccataggtcacctctgcagcctgtacgtcatcctgggtgaagccctgaccgtctgacagcatcgtgccctgtagttgaaagttgcctttcctgggagcctgaaccacctcacagtggaaggttggggggcttgggcctgcctcctccagggtggcctccaggtgggctgtggtgagggcctcctgctgggtgttctgagtgtgcagtggctccagctgcagcatccacacagtggctctctggatggtcactaggaaggacagattgctcaggattttccagctcacctgcacctgcagatccaggttctccacggtgtcctcggtgtagtgcccaccagccccctgcttctgcagctccctgaacggcaggcctccggtgacacggaacagcacggtcacatcctgccccacggcgctggtctccaccaacaggttggtaggcaagatgggcatggcagagccctgggccagatgcagccctgtgctgcggtggatttgtatggccagctggacagccaccaccttcagcatggccggggggctggcctgcagtccattgctgacccggaatgtcaagtcctgtgtagggccaccacagtggacatagactaggctgccggcctccaactcccagcaggagaactcagtcaccggctccccaggctggtctcggtgctccacggggaggccagagggggtgccaaggagctggaaggtgaggccctcacaggcagagtccaggtcataggcctggagaacctcaggccccagaggcttctgtgtgtgttccaggatcaccataaggctgccatgtgggaagatgatgtggggtgggtcattgacagggttgacctggatgggcaggaggtctgtttggcccctccgcaggcatgagggcatgggcaaccaagccatcactgacacctccagcaccagctggtcagaggtgtcctcagggccatcgtggatgaagcgggcctgggatttacgcagttcagcctccatcagtgccagcatgggctgcacatgccaccactcaagccaggctgtgccaccctcggtcaccaccactgcgctgatagcagctcctccagtctgcagccagccaccatgttgtgcgtcagcaaggcttcccacagcccctgcctctagccattgacactgaggtcttccatgcagccagcccagcagggaggcattggcagcccctggtgtcaggcctgagcggtgttcgtggctccaggtagctgaggactcctcagttcgtgtggggtactggtccatggagatttctagctggtgaatgttgatgtggatgctgaccttgtggggctgtgcgtcagtcacaggcacactgttgaggagcaatacagtaccctggcccttctcaaccatggaccacaggtggccctcaaatatgtccacatggatgaagtccccatgccagcctgctgcctggaaggccaagggtgcctgccagctctgtgtggtgagtgtaaactccagggttccttcatcctgagtgccccaggcaggcaaggcagccagagagtgggacccagagaagcccagggccacatcatcattggcagaaaactcttcagcacagccctcatgcttattgggggtcagaggctggaggagtctgcggccattgagagcggctgcatggaggcaacccctcaggggatggctggttcccctcaggtagggcaggccaagtctcccagtgctcccaacaaagagcccataggggacttctaggggggctcccaggactacagaggaggcattcagaaacccattgactgacaatgtgggccagtcctctgagacagtcagaactgtggtgtgggggacggagccactcagtagaatttctgctggggtctgcagcctcagctcctcctggcccaggacaagcctgacctgcaggtgtccagagtagagctgcagcaggaggtggtcagctgggcctgctgccaggagaaggagggcttcgggttgggacatggagaactgcagctgcaggtctatgtcagtcagagccatggccacagtcacctccgggtggttcttttcatgtttttctgcctgctttatattcgctagcagctgctgcatccagggtacaatgcgcctttccagaacacagcagcgacccggggtagagggatcgctcaaacagcaccagaggctgcattccaacttttcctccatcaacgagtccgttttcattgttagtttctccttaaacacgattggcttcgccgcggagaaagacaataggctgcctctcccccggcggcggcagcagcggctgcggctaaagcggcggcaaccgaggcgagcaatgggcacggcggtctcggccgagccgaggggcttcaccgctgctgctccggctccgcgacagctctgcacgtagccccagccaccccgcgcaccggctacaagccgcccgggggtggccggggcacgcaagagggcagtaacgtctgcgagtcctcccgtgagtacacgcggagcaagggctgcgagctgggattgcacggcagagctgcccat

SEQ ID NO: 128358 - DNA, 2139 bp, Homo sapiens
cttgcctgtttcctggacaaacatcatgacattatcatcatagaccacagaaatcctcgacagctggatgcagaggcactgtgcaggtctatcagatcatcaaaactctcagaaaacacagttattgttggtgtagtacgcagggtggatagagaagagttgtccgtaatgcctttcatttctgctggatttacaaggaggtatgtagaaaaccccaacatcatggcctgctacaatgaactgctccagctggagtttggagaggtgcgatcacaactgaaactcagggcttgtaactcagtattcactgcattagaaaacagtgaagatgcaattgaaattacaagcgaagaccgttttatacagtatgcaaatcctgcatttgaaacaacaatgggctatcagtcaggtgaattaatagggaaggagttaggagaagtgcctataaatgaaaaaaaggctgacttgctcgatactataaattcatgcatcaggataggcaaggagtggcaaggaatttactatgccaaaaagaaaaacggagataatatacaacaaaatgtgaagataatacctgtcattggacagggaggaaaaattagacactatgtgtccattatcagagtgtgcaatggcaacaataaggctgagaaaatatccgaatgtgttcagtctgacactcgtacagataatcagacaggcaaacataaagacaggagaaaaggctcactagacgtcaaagctgttgcctcccgtgcaactgaagtttccagccagagacgacactcttccatggcccggatacattccatgacaattgaggcgcccatcaccaaggtaatcaatgttatcaatgctgcccaggaaagtagtcccatgcctgtgacagaagccctagaccgtgtgctggaaattctaagaaccactgagttatattcaccacagtttggtgctaaagatgatgatccccatgccaatgaccttgttgggggcttaatgtctgatggtttgcgaagactatcagggaatgaatatgttctttcaacaaaaaacactcaaatggtttcaagcaatataatcactcccatctcccttgatgatgtcccaccacggatagctcgggccatggaaaatgaggaatactgggactttgatatttttgaactggaggctgccacccacaataggcctttgatttatcttggtctcaaaatgtttgctcgctttggaatctgtgaattcttacactgctccgagtcaacgctaagatcatggttacaaattatcgaagccaattatcattcctccaatccctaccacaattctacacattctgctgatgtgcttcatgccactgcctattttctctccaaggagaggataaaggaaactttagatccaattgatgaggtcgctgcactcatcgcagccaccattcatgatgtggatcaccctgggagaaccaactccttcctgtgtaatgctggaagtgagctggccattttgtacaatgacactgctgtgctggagagccaccatgcggccttggccttccagctgaccactggagatgataaatgcaatatatttaaaaacatggagaggaatgattatcggacactgcgccaggggattatcgacatggtcttagccacagaaatgacaaagcactttgagcatgtcaacaaatttgtcaacagcatcaacaaacccttggcaacactagaagaaaatggggaaactgataaaaaccaggaagtgataaacactatgcttaggactccagagaaccggaccctaatcaaacgaatgctgattaaatgtgctgatgtgtccaatccctgccgacccctgcagtactgcatcgagtgggctgcacgcatttcggaagaatatttttctcagactgatgaagagaagcagcagggcttacctgtggtgatgccagtgtttgacagaaatacctgcagcatccccaaatcccaaatctctttcattgattacttcatcacagacatgtttgatgcttgggatgcctttgtagacctgcctgatttaatgcagcatcttgacaacaactttaaatactggaaaggactggacgaaatgaagctgcggaacctccgaccacctcctgaa

SEQ ID NO: 128359 - DNA, 645 bp, Homo sapiens
gcagccagtgctccttgtcaagctccccccgtcactccaggtgggagccaccccggtgagggggtgtgccacttgcccccagggcactcctctgggcatcccgggtgggggattttggggcctggggggcagtctttggtacctgtgttcgtcagggatgctctgacaaccaggtgtcgtccacgggcgggggcatgggcatggtgacagtggtcctgttgatgtcaccgatgatgctgagcgcctccttcagcgcgtggtgcatgtgcagcatctcgtcgtgctgctgtgcctgctctgccaactcctccatcagtgtgttctggttcccacatgagtacatactggccagcggctccgagatgatgaactccggggtctgagagtgggcaaacagggaagaaggttgggacctggtgcctgtgccgccctggctgccttgctgggcccttctgggactgtgcgctggacttggagccccttggagtatggcttttcacacgggcttctataccgcttcgactggaagatccacctccccactgccttttctcactcagatggggacaccgaggtccagaggaaaagacacctgtcaaatgtcacagatctgggaggggacttaagacctatcatgccaagagg

SEQ ID NO: 128360 - DNA, 652 bp, Homo sapiens
actcgcagacgttactgccctcttgcgtgccccggccacccccgggcggcttgtagccggtgcgcggggtggctggggctacgtgcagagctgtcgcggagccggagcagcagcggtgaagcccctcggctcggccgagaccgccgtgcccactgctcgcctcggttgccgccgctttagccgcagccgctgctgccgccgccgggggagaggcagcctattgtctttctccgcggcgaaggtgaggagctgtctcggctcggcccgcgggggagccccgggagccgcacggtggcatttttcaactccgctggagccagtgcccaggaggaacaaagggtgtgctgccagcccctggctcacccagtggcctcgtcccagaagaagccagaggtagcggccccagccccagagagtgggggtgagtctgtgtttggggagacccaccgggccctgcagggggccatggagaagctgcaggtgagtaggtcctggcatgggccaacaaggggggcgggggggcaggacaaggcaggtgactcctgacatgtgaccccattattttggctccacagcgactttatggaaggagaaggtggacctgaaggagcgggtagagaaactagagcttcaattcatccacctctcctcg

SEQ ID NO: 128361 - DNA, 543 bp, Homo sapiens
agtcagcaacaggtatctacggggagggccgtgcatcctctactaccctgcaggatctggaggtaagaggccctgggccgaggtgcagtgaccctgcaggccagccctccaacctcctcccacagcaggggcttgttgcccctctgccagctgaggcagcccacacacccccaccagccctaatgattattctctctacccctccccacaatcttcctccaactccttctctctgcatgcacctcagagccagtaccaagaactagcagtagccctggattcaagctccgcaataatcagtcaactcactgaaaacatcaattcactggttcgcacatctaaggaggagaagaagcatgagatacatctggtacagaagcttgggaggagcttgttcaaactcaaaaaccagacggctgaacccctggccccagagcccccagcagggccatctaaggtggagcagctacaagatgagaccaaccacctaaggaaggagctagagagtgtgggaagacagctccaggctgaggtggaaaacaa

SEQ ID NO: 128362 - DNA, 1260 bp, Homo sapiens
atgtcagaaaaaacacaacaggggaaattggccgcagccaagaaaaagccaatcgtgtttaaggagaaactaacaatgaaaacggactcgttgatggaggaaaagttggaatgcagcctctggtgctgtttgagcgatccctctaccccgggtcgctgctgtgttctggaaaggcgcattgtaccctggatgcagcaggaatcctattcatcttcttcaccgatatggtttgtggactctgatgagccaaatctgacatcagttctggaacgtctagaagatactaaggacaacagttcgctgctagcgaatataaagcaggcagaaaaacatgaaaagaaccacccggaggtgactgtggccatggctctgactgacatagacctgcagctgcagttctccatgtcccaacccgaagccctccttctcctggcagcaggcccagctgaccacctcctgctgcagctctactctggacacctgcaggtcaggcttgtcctgggccaggaggagctgaggctgcagaccccagcagaaattctactgagtgactccgtcccccacaccacagttctgactgtctcagaggactggcccacattgtcagtcaatgggtttctgaatgcctcctctgtagtcctgggagcccccctagaagtcccctatgggctctttgttgggaacactgggagacttggcctgccctacctgaggggaaccagccatcccctgaggggttgcctccatgcagccgctctcaatggccgcagactcctccagcctctgacccccaataagcatgagggctgtgctgaagagttttctgccaatgacgatgtggccctgggcttctctaggtcccactctctggctgccttgcctgcctggggcactcaggatgaaggaaccctggagtttacactcaccacacagagctggcaggcacccttggccttccaggcagcaggctggcatggggacttcatccatgtggacatatttgagggccacctgtggtccatggttgagaagggccagggtactgtattgctcctcaacagtgtgcctgtgactgacgcacagccccacaaggtcagcatccacatcaacattcaccagctagaaatctccatggaccagtaccccacatgtactttgaaccgaggagtcctcagctacctggagccacgtgacagtctccttcttggggagctggtgcagaggcctctcgtcacctccaggaacaccgctcaggcctga
